United States Patent Application Publication US 2007/0016976 A1 - sequence listing, part 3

SEQ ID NO: 4781 - DNA, 2000 bp, Oryza sativa
acgatttcgccggcgagagagtgatcacgatttggctgcaggggcgtccccgtctgcccccctattcatttttctgatttctgtggttgctgccaattgaactccggtaggttacaaacgaagccacctaacaaagcgtcatcttctagtaactgaatttttctgtgaccgagtcgaagtcgaaatcgatgtgcaatgatttaacagacgagagcacaccggtgcttagatttccatattgtttagtcaactaacagccggtaggattcgagtaatttcaactaactgcatgtttgagaatttccattagagagttttgttaccattacatcgaagtcctgtttagaaagtaaaattaatgaaccagagattgtgttccaaacaggtctcgatgaatttggttacaaagaatacaggctgcaatttaagtagtctaattttaactcttaaactatgctcgaagtctatttattatgatgaaaagtaaaagataaactattttttatatctttgggttaaacgcatatatgtattaggtttcacctattttacattctgccactttttttttgctaattgctatataatcccactagtttagcatgaagatgatataatgccattctgttgtgttagatgacaccaacaccattaatttattgtgaattgactttgttaggcactatgaattataaacgcacattgctactaccttcgtcctagaatacttgattctttagaattcaaattttatcccaaaatacttgtcattatggagtactagttgtcccattaatcactttctattcaaaagttttcccattttaccctcaataaccattccacttcctatcatatattatttattaagggatattatatttttttattaaaccttaatatatactaaacaatctagaatgacgactattgtgggacgaagggagtaaaaaatatgctcctacctcagtttgagatgaggggtatttatgtcgtaatagaatgccacggaactttcaacaatttttacttttcctaatttcaaaatttaaagatacattctccaatccaaggacaccgtgacagttagctggttttcggtggtaaattgacaattacaacatgccctaatagcaaatatacaattgtttctacaattattacatataaaaatgttgagtcatatttttgtcacggaactacttttacgtcacatgtctgatacgttttacaaatgtaaaaaaaaaaaacaatggccaatggttactacagagaaccgagctactagcagtttttctcccggtgaracaggaagtaaaagaaaaaaaaaacgacccactgccaaatggttgtatcaaagcatcaacaattcaccccccgcatgtgctggtagtatgacggcgtataaaacagcacatggaaacagatgaaccacaatcatatggtaaaaaacaaaaacggaagctcaccttcccamcgscamgtcccggctccccatgcgaccgcgcctatggacgggcgccctgcccacgccactgccccmaccgtcgcacgacggccgcgtcggtcgccacgtctccatctccctccacaccacctggtttcctcttcagtttcctcctcattattcctcctcttcccccctcgccgcttacaacatccatccccaaacccgcattcaaaacaagcaaccctcctcccgaatcgaacaaggaaacagatatcgcctctaaaacccccatcgtctcgtctcgtctcgttcccctctccatcttccgcggctttccgcgcgatccaccgatccggtttccccgcgccgtgcccggagtcggcgctccattcccgcgccgggttttggggtggtgtgttgatgcggcgggattcgagccctggcctgtgagttgggcgtcggctcggcggctgcggggtcggcgcgggcgcggacgcggcggatgtctgctatgaggcggcggccggtgctgccgactcaccaggacgac

SEQ ID NO: 4782 - DNA, 2000 bp, Oryza sativa
ttccatgtgatggagataattggtttgggtctgggcaacttgtatactgtgaacgcgcttctctaccccgaatacaaagtttgctctatgaataaagtaacaaaaaaacttgctccatgaattttccttcataatgaaggctgtgtttagatctaaagtttggatccaaacttcagttcttttccatcacatcaacctgttatacacacacaactttttagtcacatcatctctaatttcaatcaaaatctaaactttgcgctaaactaaacacaaccttcggactctgacaacacagcaggtgaaaatgacaacgatttataactcgttggactctgcaaattcggttgctgcttgctagtgttgttgtagtgatatattttcctagactttacacatataatgtacacatgaagctttgacaaagtacagcttataattgtttcacaagattactgctaagtgctaacggtttattgttcactggaatagttgattcaggagatgattagaaccttacctgtagaagttctcactaccgccaaagatcctgcagtagctaagcatactgttgagtcagaagattagaagattctcatatcactttttactcctgggagctatttatcaaacctggaagagaatcttacagtccctacaggctacagctccaccaccaggatcactgacaaaagttccattcaacctgcaagataagaatagcatactaatttttggtcaatcatttgtttaacaccaggacacgcttgcatctctacccctgccttcactaaaatctacttacacatactcactacgtcctaaaataaaaaaaaaagacaaaacctgatttccgtgcccaatatttgaccgtccgttttatttgaaaaaattatgaaaaaaaattaaaaagacaagtcatgcataaaatatttatcatgttttatcatctaacaacaatgaaaatacgaattataaaaaattttcatataagacggacagtcaaagttgaacacgaaaatccatggtttgcctttttttggacggagggagtattcaactaaagtaatcttggcgttaaccgtgcgtgtccgcttagtaaaattccatttgttcagactactgaactattaagaccaccacttgtgttatcccttctttctttcatatatgatggttgagtttaactgaatttcttaaagcttaatttgttctaaaagatgaaaatggtggaaaaaactgcttgctgtcatacttgaacattgatcagaacaaactgaaaattagtatgtaccaatacggaacacggtagagtagaaatatactagaatgaatgtgtactcctttcaggccgtcggcaattgaacagcaattccgtttcatgcccatactttagaactatgtattatatctgcaaaaacaaccatgttattgacacaacgaaaatagggaatcggctccaatgaaaacttccatgttctgtgtttacaatgattgcaattctcgttgtttaaaccagcaagacaaaattctctctccaatgacgagtgatcaatcccctttcgcacattctcttaaccacatgggccatgtctcccgaagctctcaataattccaagagcattttccagcctatgtccatgctccctcctaacctttacactctcataccgagctgttgttgtgctatccatggcccccacaaggctctactaaaccatgcagtacctaacactaacaacaacacacacacactagcacaccaatgcattagcatgccacaaagtagtattttattgtctccaaacacatagattaatgcattaatccaatcctaatcatagacatcctcttatataccttcctacaagtttccctccatttctctattgcttcaaacaaggcaatgaaaacacaaaactagaaacagtgtgtgtgagagagagagagaggggccagaggagtgtagaggacaagggaggaacagaagaacccgaggc

SEQ ID NO: 4783 - DNA, 2000 bp, Oryza sativa
gatagctccgtttgattcacacttatgaaaaaaaaagatttatttctatatatatatgtttggtggctgcatatcggcctttggattttaatccaatgatctgagatttgcaaaagtttagctttctgatagataacttaggaagctcctagaccttgcgatttaaaaaagaagtcctagattttcttttaaaataacttctgaattttataataaataattcattcattcttaccatgaaatcttattataatatataagataatctatacttcgttcatccattcagacctttcacattgggggctcatatcccgcatgtgcgcatcgcgagattaaattgcgcgcgggattgatggtgcggagtcgcctttctctttttttttcttttttatgttttctttttgctttttttctaggaaaaaataacctcccacacattttatttcttattttaaggcgcggaaaattgtgataggtacagagagttaactataataaacttttaaaaatttaagatttaaaactttttaactcaagatttcaaactttcgacgtaggtttgaaagcttttaagtcaagatttgaaactttcaactcaagaattttttttttgaaattttcgcttagatttgaaaactttcaggtcaagatttaaaaattttcaactcggatttgaaaactttcagttcagacttgaaaactttcaaatcggatttgaaaaatttcaaatcatgatttgaaacttttaactcgaattcgaaaactttcaactgaagatttgaaactttcaacacaaatttaaaaaaaatcaagtcaagatttgaaaacttttaacttaaatttaaaaattttcactccaaattccaaatattcaatttaaatttgraaattttcatctcmaaattccaaacattcaacttaaatttaaaaaactttcaactcmaattcaaaactctcaagtctcaactgatatttaaggtgaaagattcaatttataaaatatcgcaaaaaaaaaatcatgcacgtgcgtggagaaaagaaagggagcggtttccatgaaaaaaaaggaaaaaaggagaaactagccgatttctctaaaaaaaaagagagagaaattagcsccgtggccgttggcatcgcagacactgccaacacttacacgctaattagcaaatttgttcacattagtcatagaccccaaatttcttatatgcatgaggcagtcatttttttttcctttgcaaaatttcaaacgcgtgttgatgtgtcgctgtttgagtttgactgtgagtctctgactgctttagaggaaggcgtttcctgccaaactggaaagcacatcctagtcgacatatcctttttaaatttgatgttgtccacgttcaaatatcttgacactgatatgtctaaaccttatatacctttattccagcagagtttggcatgatttttctgttaataactagagtacttcaatatgaaagctcctattggttcacacttacgcaaatcaagcatctcttcaagacttcaagacaataacttgactagtcggctacttaattagccatcctctcatcatccacacattcaaccatttccagagataagttgtctctgagaatggttgaataagatggccacggttgggaaatgtgcaggggaagatcagttgaaaagtacaacactgaattattgacttcttataataatcctgcacagtggagtccagctctacaccaagatatctaatcccctagtagtgatgattaagcactaaacattattggttaacaaatcttccaacattgacactatcttccttgctgttaccaagtcaaagaccccatcatccccttagtgttcttattccaagcttcattaattttccttggaaaagaaattatttgagcttctcattttctcaatcaattccatttcagctagcctgcagctaccatgcaattgcttccaagctgaagccaagaacagcagcg

SEQ ID NO: 4784 - DNA, 2000 bp, Oryza sativa
attttgaccattttacgtgccttataggacagaatgttggccaaagtcctgatttccgggaggcatttgacgtagcagtagcaagagcagttgcagaactgaaagttttaggtatgtaaccttatttttttcctcctgttatgaggcatcttatagcaattaagtcttctccttgtagccgagtactgcctcccgttagtccgaattgatggtttatttatagctgcgaaaggacacaatccccatgtaagtcttttgggcattagcctattgtgcatttgaataaaattaacttgtgctaatataatttcctattttgttgtgacaggaagaaataaaaaatgctaaaagtgcagtacataagttgggtgcctccatgttagaaatatgtgatggtatgctattctatctgcttatgaagattgtgaaattctatagcacattttttattctatttgttatttgcaccctacatggtatttcaactagtgactcaaaatagggagaaaatgctactccctccgtcccaaaatacaagggatttcaggtggatgggatgtatcctagtactacgaacctggatatgctcctgtccagattcaaagtactagaatacgtcacatccaaccaaaatcccttatatttagggacggagggagtagtgtgtatgaaacaaaagaaatttccatggtatcaaaagaaatgtggaatgcaatatctatgttggagagctgacgcaattgttgacttgacccatttactaatcaatggatagtaacatatatatatatatatccatgttgattgaagagtagatgatgtttttgacctggtcgctttactaattcatgagtatgtcataatcatatactcccaacaacttaaccctctatccattcacagttgaatctatgggacctcatggtcaacggacggctgttgtgtacataaaggagtgcattactccaaagaaatacccgcggcatccaggtactcctaagatgcaatcattgaagaagtttatatttgcttaaagctgagacatacagctggtgttatccaggtactccttcgaagatgcccttatgagaagaatgttcactttgctgtagatttacaaatttacaatagccaaaagctgaaatccgtggttagcctcacttgaatgatattggctggaaggattattcataaatcatggaaggattgttacaccgtcctgatatcagttatttgatgaatcagactaacaaatcgttaagcattttttaaagtgtaataatttctaggattgtcactgtaacaatgttgcagtagaaaaaatagcatgaattgcttgttgtaccatccattttccgttgactatcaatgtttcttgtgaacgacatagaatatatgttgttagtaggatacatcccaaagttttcaactgctacggctcaaagttgttagtatgaaattcgttgttctattccatacttcaaagactctgtcaacatattttgttggttaaaacaacagctgaaagaagcttttctttcttactttgaaactaaaatcatataaaatcacattgcttgaacagttgaacacgtacacacacatttcttgaacagttaaatacttataaatccttcacttttgcgtgcactaacctaccaaaacaaaaattaagcatagcccaagtagaatgaaccttcctcccctctcactttcctggaattaatacgcccattgtgcacatgggggtcacctcacatatatcgattgcaacaaaacacacgagactaattccgaccttgaccaaaccaaaccctaccaaattatagtacaattagaacaaaaacaaaccaaacatatttacttagccggctatacgcggctacgttggctgacttggtagtcagtcttctttggactcgtcaagctataaacacaagctgattcattgcctttgcctcttcaaatttcttttacctcgcccaagaaccatagctgca

SEQ ID NO: 4785 - DNA, 2000 bp, Oryza sativa
cacgtgcgtgggtgtttcttggtgtcaaactcgacctgtgtttgattgctcgaatgtacttagcctggctcgtatgtcttatccaggttgagtttggccttggttggtaaaatgcaataaaatgcaatagagggtgtttggttgtatgcattagatgagcctggtttatctgagatgttgtttagttggttggataagaaaatttatacgcaagagattgtgtttggttgctcgtatgtaccttgaatccaattatgttttttctattgtaagagtataatcctaccaagtatatagaaatwataatgtcttaagttcataacacttggggtgagttcttatgaacaatttacaactacagctttctcattctctataaacacgcgctttaaaaccgttaaacatcagcgatacgttttatgtaaaaaccttatatataaaagattcctttagaaaaattcaaataaacctattatgtcttagtttcagttcccaacaaacatacaagctgaactgctcggtcgaactcgaacccagcctatacgactgtcatttctgaagccaagcaatacgaagctttgtttgaggctttgagctgctacatgaatggatccccaacgatagcgcataacaaaagatctactagtatcagtcacacgataatagcattctgaagctgtcgctattaaaagtcgttgttgccactcgaatggaaccatattctatgaacgtttcctcctcaattatccgcaaaacagaaatcacgtgtgtttgtctcagttcgtcctctcctctcctatttttctgttctacaagccctgtgctggcgcgtcaaaatatccttgcagtcttaggctaaatttagttctaaactttttctttaaacttccaactttttcattacatttacacaaataaactttcaacttttccgtcaatcgttccaattttaatcaaacttccaattttgacatgaactaaacacatccttacacgaagtaccactgtttwactttgttttggatgactagatgatttgtgagattatctaatggtaggaacgaattggttaactattatacttttttaaaaaataatgtattgaaagtttttgaaagcttagcaagcttttcatgagaattgaacmgcaggctggctgacccgttcgcggaagatggaagacgacgttgccgtccatcccaacacgcaacgccgccggccgcaacgcgccggtttccggtccgatccgcttcacacccaccacgtytgcaggccagccgcacgacgcaagcaaaaggaaaaaaaaacaaacagaccggataagattacctactactctcttagaaatacgaatctaaactataaaccttatttttttcttataaaaatataatattttacattaatttccgttagcacgttttcaaactatataagttttgtgtgaaaaatttctatataagctttaaaatacatccattcgtcaagtttgtcataattaaaatttaattaattatactacatgtcaatagttttttcgttttacgtgcactaacttaatctgcgtctttactagttttaaacatcatttatttgttccactaatatcgtttagatttataattttaagaatgcaaactagttataagtaagacgaagggagtaagagttatatgtctttcccaaacagctaaaaaaaggccgaaaaacagcggagatttctatggaattcgtctagaaagctgcgaatcttcccttaggattcgcttatccttgccaaatcctctccaaattcaaagcatcacttatttttttttttaaaaaaaacggcaaacacgagtccatgagaccacgagtgacgacgagtagtcctccaaccctamgcctsgccttctcctctcttcttttcccacgcaaacgccggagacagaggaggagacaagagtccaagaccaatgcgaggcaacggcagggggcgggaggaggaggggaactcccca

SEQ ID NO: 4786 - DNA, 2000 bp, Oryza sativa
atccaaacgaagagtccggttttgttcagaggaattattgcacaaaaaaagcaccttttttgggcacctcgtctaaccgttttttcaattaacaccgaatcaatactccattcaatcatgcatatttttttaaaactaaagttactttttaactatgtttttcagacatcatataggtgttttgaaaactataagttattttttaactattaaatccaacaattatgacatcacacatttttttaaactaaaagttattttttaactatgcatttcaaacatcatataggtgtttttataactataagttgctttttaactattaaatccaacaattataacatcacacaaatttcataaattagtttttaactactattacaagatcttatatttacaagctaaactttaagtacatattcagtccccgtataagtatttctacaacttcatattttttaactaataaaacaaatgtttttaatgtcagttattatcacatcgatttaaagttaatagttaactcatccatattttgagtttacgtaactccaagttcaacaactcacattgtaaagttcaatttttactccacaacaatgtcatctcaatccaccaaccaactgtatcatatttaaattttaactccacagagaggttggttgcctcggtggtgggggaagtcatgagtagcgctacgaagtttcatagcacgcagcgtctgtttgtcgcttcacgtagcgccaccatatatataattatatatgatatatatattggaacatatatatgcataatatataaacatgcaacaagcagcatgaaaaaaaaatctttatacccggttggtggcaccaatcgggactaaagattgatctttagtgccaggtatttgaatcggaacttaaaatagtaatctttagtcccatatacataactccgccaaggggttgcaaccggggttaaaagatggtttgtgcaacagtgatataatcctacaagtcatttttgtgctgaccttaaatattgctttgatcgaagaatagtttcatttatttatattttagtagtcgtttcgattgtcgatctgaaaaacaaaaaaatagggaaggaaaaagtgcgtgtatttattagtacttgtactacttctactccctttatcaaaaaaagtctaacgccaaagatgaacttatgttcagattattcatctgtggaattagatatttttttaataatagatttaaataaaacccggcctctgtctaagttcagcgccacacgatttggcgttgagcaaaagggtcagatttgaaataagttttggcagcgattcatttgtaaaaatagtttttgcaaagggtcaaattgtcaaaattaatggccaattggatgtaccgagtctgattcctgattgagcatagggaagtctaatcctaattgaacgctacggaagtgaacgtcagaacgggacagctgggatagggagatgagggaattcggcagacgaatccacgaattagtacggtggtatactgttgatccacatcaccaagcaccggaatttctgcctgcaggttattctcctccacacaagaccgtataaattgcctcgagtggacccgcagcagttagcgcgcagctctcaatcatggtcaccttgcttgagaactggtcatgataagcaaggaagatacaggagcagttagtcccgacactggtcaccttctcgatcctacgaggcgctgacatggaaatccaatcatattaattcccctttactggcactgttggacgagcgacggtgggtgcgactcgcaacgagtagcaagcggtgacgggcgcggtagggagggggaatcggccggcagcaagtggcgagcggcgatgggtgcagctgggtggctccggtcgactacgggtgcggttcagcatacgtcggcgagcgcggttccgatcggcggcgggcgcggcaaggagggcgaactagtcggcggcgagcg

SEQ ID NO: 4787 - DNA, 2000 bp, Oryza sativa
tttgtacatagatatggtacgccattgccaagacacttgcagagaaggcagcctgggagttcgccaaggagaacggcatcgaccttgtggctgttcttccaaccttcgtggttggacccaatctgtctcatgaattaagtcccactaccaccgatgtcctcggcctattccaaggtacatgaaacgcaaccgtgaatacgaagaattttcttcgatttcagttagaatcatgaactgtctcatatgaaactcttgcatttcaacggagcgtaatctttcagaaacacttctacaaagacgctctctgcattcagtcctctgagtgaatgtccatgaaatcgcattgcaggtgagacaacgaagttcaccatgtacgggaggatggggtacgtccacatcgacgatgtcgcgagctgccacatcctgctctacgagacaccccgtgcagccgggaggtacatctgcaactcggctgtcctggacgtcaacgaactggtcaccttgctcgctaggcgattcccttcgtaccccatcccaaagaggtcaagaactccggcgaaatggaacttttttttttctgctgattgatcgattcattggtttgtgtctgtgtttctgaagatgacattgtcttgggatttctctgtagtttgccgtgcgtttacggggagcagacttatggtttcagcacggccaaggtgagggagctgggcatgaagttcagagatgtggaggagatgttcgacgacgccgtcgactcgctcagagctcacggctacctgctgaacagcgtaccatgacaattgacgacaaatttatcagaattcagaaattgggtatgccccgacgaagatgaagctgtagctagaatcatcagttgcacacaggaaaaatgtgtctctgtgtcagagaaggttgtgcgctactgaagaagtggagatgattatgtattatactccctccgtttcacaatataagtcattctattatttcccacattcatattgatgttaatgaaactacatctatttaagtttcattaacatcaatataaatgtgggaaatactagaatgacttacattgtgaaacggaggaagtagaagatttataacttgttgagaaaacgttaatcgtattgttcgtgtatccaaaacataaattttaaaaaaatattatctcgttcagattattgttagtggtgactattactccgtagtattttatttcgaccgcttgttagttaatgaggacgatgcacaaaatttcatactcgtgtctaagataccaatacacttagtaaacatgacatcttttaagtatttgcttttcttttcccaggagtagtcaaagttggatgatgactaattctgttgactgctacttaaaaatggatggagctatgtttaaaattaagaagatttaactgcaactactgtagtataatttttttttaaaaaaatatttttgaccagagggagggtttttttttttttgagagagtaatagggaggaggtttaaacatgaccaaaagcatgactcgctgatcgatctgagcccatgggccttatctcggcccaagattccgagacgtaatcaagcaggaggacaaagtcatagagataagccgtttttagcgcactcgcttgctcaggttcctcctcatcttcttctctcctcttatccccttcgccttcctcctccccgcctacacgaccagttcctggtttctgctgccttccctcggtctggatcaacaaggtgagtcccaatctttgacatcctgcctcacttccattcttgcacccaggtttgcttggatgatttctggtttcgttggcgacctgcactgcacctgttcgatgaattgccgcaatggatagtttcttgattgattgagtacgctagggtaccgtttgcactgagtgcactagatgtccgaacacacgctgagaaatttgagggatttttttatggttgttgagcagaggaggtcgtcca

SEQ ID NO: 4788 - DNA, 2000 bp, Oryza sativa
ttgccgaggggttcgtggccgaaacgcggttgagtggttcccccacgtcatgtgtgtttgatcaatttttggcacgcgtgacggggggtattttaatttggtgctcgtgaccgaaatggacgtgcgatgcatggtcttttgtagcaccaaattccgcagctatcacgtttttgaaaccgatctatttcttgggcgtacgcaagtgtagtgaggtggctccgtacagagaagaatttgatactcctttcatttcaaaatatagtaatttaaaattaaatgtaacacatcttaatataacgaatccggataaatctctgtctagattcactgtgtattaggatatatacgtgtcatccttggctgtaggttgtaactcgttaagcaaagcccggaattatattctattatctaaagaaaatatatgtcatccaatattgtgttataatattttgggacacgagaagtattagttatcacttgaggagtgtctataactctaaattgggtcaattgaagcacgaatattggattgcctatggccgatttccaaaattttcagaattccggtaacccaatattaattgttaaaccgaaatgttcaaccctgaaacactgtctgatgagactgttcagttgacaaaattaatcaatctttcatgcatgttagattgttaggtagctaggcgtacgtcaaggtgttccgttcaaccgtgcatgtatgcacgcacgctatatatagttaattgatctaccctgcatctcatctcacaaaaaaaaaatcatatcatcacctttctttaaataaaatggttgctggcctaatctggttgcctataaatataatctagtttaatatcccttctctcttacacaaacttatcttcttatgtcaatttttttaaacactattatagatgtaggtgcatatataaacacatgtaaactcacctgtataaacgtaaaagtgtattgtgcccattatttatcacttttttcaatatatagacttaccaacttctttaccttaattatataatccttttcagaattgtgtttcccaagtcttaacttaaattttgagaaaaaaatttcttgcagatatttacttctcaataactctatgcacgtctccgttgtattatgttctagtcttacagtccatttggtaagcgagcaaatattcatcaatctgtttttaaagaaaaaaatcccctaaaatcctttggtgcgcttaaagcactatatttaaaagatgatatttttctcttttccctagtgcctgcttataaaatctcccctttattgtgtccactttcttatgcatactcttggaagtttatagaagcctatggtgtatatttggaaaacttgaatgcaacaacatgtgatgttctcaatcaattagagcctttcacctcttaatttttcacacctacttatcttctcaaccaatcacaatcttttcctatttatttttacctacttttttataataactatgttctaacctaaatttttttgtatttttggatgaatgtagtaagaatttatcaaaaagtcgcctcgccttccccacccccaccaaaaaaaacaaataaaataaaatagatgggtgctttcccaattgtaagaatcaaatctcttccccactttctgaatcacgccatataactactttccaacttttcctgtatcaattgtcatgccgaaataagttataggaaacttcccactttgtagctcagcatatcagccactctttcttctctctttatcaactcttaccacaaaaaccttttttgcagtttcatttcagacaaagcaaattaaagagcagaaatttcaaggccatgaagtttttgtcaatgactttagcaacaaaactgtatcatcagagagacagagacagagacaactatatatattagatatacgcccccatcaactctactcccgcagtgtgcgcacggtggaaccaagataagatgcaagcgcaggac

SEQ ID NO: 4789 - DNA, 2000 bp, Oryza sativa
agtaggactctacacatgcgtcatgcatgcatggtcgggaatacgaatactgatgaggatcaggacgcgcacggggacgactaccggaggaaatgacggcggttctaccgcgggcaagacggtcttcggcgctgtgcatgtaggtcgagccacggcacgttcgcaaaaggttcgtaagccgggggtccgtcaccatatataggcgttgttccacgcgcgcaaggggcgtattgtgatcgatatatatgagcgtgagtgaacgtggacaacagcgagtcgtcggcaagggctggtccggcctgtgcccgcgcgcatcatgatcgatcaaacatgagattagtcgtaactcatctctctctgtatctgttggaatgttcatttgttgcttgatcttccgttcagataagatttgcctttgttatttactaattaaagtttagatttaattttcttgattctcgttgtccttgtcctttgacgtggcatgtggccagcgtatgtgtacaccgagacaatagtgctccatccatagttttgaaggacataaagtgaacttgtaaatttatgcctgccgatgtctgttccgacgggccaaacgtgcggatgcggcccagcagcgtggccagagagctgagctgccgatatacgcgccgtacgtgaagccacctcgacgcgtacgtgtgcacggacattcctgaataccaccacctagctccctgatcaaccacgacgccgggttgagtacttatttgccggagcaaggacgagttccgatcctctacgactgaggtgatatgtatgcatgcaggggcgcgtcatgcatacgttgtgtgtgccgcacgtcgatctcgtggaagtagaagcggaggcttttgccgggagccggagcaggaagggaaacaagcagagaatgagtacagctttggattgtgatcggacggacgccagacgcagcaagacaaggggccgaaatgaccgttggatgacgatccgagggccaccgagacgagcaaccagaaggcagaaaaaccagctgcttaattccccccgcgtgccgctgatgggtcggcacaccgcaatggccgcaacagcgaaaattaacgcaatgaagaaggggatttccaacaggtttgaagatttaagattgaccccccggaattgcaaggtacagcagtaccatagagtggaatttgatcgtcttcctatttgttctcaagctcttcttaaggttgtcattgtgggtgcactactggaattgatcaaagggactggtttggaccaaataccagtcctccaagcaggccttaaataaactcgtgatccggtgtgatcgtaaacagaccaccccaagtatccttgtcatctcatttttaaaccctgaagacgcccccatgcatcccactgcctttctaatctaaatctacatagttgttgcaatgaactgagtagcatctaaatgtcatgattttaaatttttatagaaactaattttagattgagttgtttcatagactaagttcataatttaaaaatactacacaaacccttctctattttttttaaaagaagcgacctgaacattactagtcaactgggccactgagagctagcgtagcatctatggactcacggcgcacgtgccgcccatcggccaccgcgcgacctcgtcggtaccacgcgtgagtcgtcttttccttttttgctctactcctgatttttaccatcaaccatatggccatatgggttcgttcaaattctgtgtactacggccctaattaaaatgactttatatcccactaaaaaaatgacatcatattcggttcaacaaaccagcgctgatgtgttcaataaaaaaaaaaggctgaaggtatcatcgaggcaagttatatatacgatcgatacagtacagctttgccaactcgatccaactaaattactcaggaacaagttatacacatacacccccattctcccgtcgtgcggtgaattcgcgatcaaag

SEQ ID NO: 4790 - DNA, 716 bp, Oryza sativa
ccccaaaacgcacgacatcccggctccgccamcgctccaccttcccaaaaataccctcaccgagatgcccctccgtctcccgtctcagctgcygatttctcccaaccatccgcgtaattatccgcagcgtcgagggcatatatggaaaccggcacgccatttcgaaatatttcgccaagtggcgcacggcttggtagtttcccacataccaccctaccctattcacaaatcccacaaaaactccctatacacagagtctctctctccccaacgccccagattatatgtaataataatatcattattatctgaggggttaagtgaaaaagcgcactttttcctatatcatccctagctagccctttcgtgggagtaaagaaaggaagagaagaggaaaaaaaaaatctcgctttcgtccgcgtcgcgtcagggggtaggagaggaggaagccgaggctccgcgagctcgcgaaaggtaagggtttccgccttatccgaatcccgaatccgcccccaaattcctccgcttcccgcgcggatttcgccgccgggcggcgagatccgcacgattcgcgccccgatctgctctgacccggcgctcgcctcgccggattcggcccccgttttgcagggtttccgccgccggggtcgcgcgggcgttcgagcggagcggaaggggaggagacaggagagggagagggagagggagagagagcg

SEQ ID NO: 4791 - DNA, 2000 bp, Oryza sativa
tatggagatttttcaaagatggcactcgtcgtctcctgagaatggagaaagctctgtgcgctcacactgccaagataacatgtatctatgtgagccagccttactcattaattgtctctggctccgatgactgttcagtgatcttgtgggacctgacaagcctggcctttgtgaagcagctgccaaggttcccagcatcagtgtctgcgttacatgtgaacaatctcactggtgagatcctgactggtgccggtgttctttttgctgtttggagcgtcaacggagactgtcttgctgtggttaatacctctcagcttccttcggatctcatcttgtctgtggcaagcactacaaactcggactggcaggacacaaactggtacgtgacaggtcatcaaagcggtgctgtgaaggtatggaagatggtgcactacacgtctgatgaggcagcaaacagcaagagcaaatctccaccgtccacccttggagggatgagcttgaatggccagactcaggagtacaggctacttcttcagaaggtgctcaaggctcacaagcacccggtcactgccctttgtcttccacccgacctgaagcagcttctgagcggggatgccagtggccacttgttctcatggtcactaaaagatgatagctttaaggtttcatagcaacagctcaacagaggatagtcaggattcacctgcacatatagagagccttagttaagttatatacctstggtycctttctcacccagaattctgacaagcacctgcttgtgctgccaaagaaagaactcagagttggcctcggcatgcagaaacattctacaatatggttggcccaggccccagcccattcagcaaaatctggssygaagacacagtacaacagaaacacactggaagggataaaatggagatggcgttgtgctgacattacaatcttattatactgtgaattatctaccggttctacctcatcttcttgttttttcatgagaggattcgtgcggggtagcaaccagcgtgtgtaaagtttgtataggatgcttttggttagtagtggtgaggggacgatggtgatgatgttgtacggtgaagatgttatttttcgtcttggggatgtaaggaaaggggtgttaggttcctcttctttttctgttttgtttctctattttgtccccagaagtggtggtgttcattcattgactgggtgtaatttgagcacccttctgttcacttcagttcatttgcacatacatgcaagagattttgttcaacgcagtgatgcaccttatccatggaccatgtagtatctcactcggaagtctcatctgttgatgcagctacactaattaattaagcattaatcgtgggaagagtaacgatagtcttcaccaatctccttgggacacgtttgtgtcggtgaccactgtagtacatggcgaacagcaaactactagtactagcgatctagaaaatcctaaatcatgtggttcctgtacagtttattggtgagaaagcacgataaggataatgacgaatccgtgatgaatcctgagacgtagactttgaccattaagctttgaaatgatggctttctttgatttcctttgctagcttacttagctggcaaagcttaatctaggccaatctgccggatattcgcagccatttacgctttccacgtcagtgcatgatggagtattctacgcacgggatgtattaaaattggataagcataactgataatttgtttgttctccgaaattaccaaactgtcctttttaacgcaatttgataaacaccctagtgccgtataagcgcccatatatctaatttttgaacaaatcacagttttttcacttcttatttctgaatatatttcactctgtatttcttcctcaaaaatcatgatgtgcacatgttttttcataaataatatttttagtacatataaaagtgaactcccacttgcatttgcatctagaaagc

SEQ ID NO: 4792 - DNA, 2000 bp, Oryza sativa
aagagaatgtaaaaaatgagtaaaaatcatatcttaattatttaccatcaattacaataatgtaaaaaaatgagtaaaaatcatatcttaattatttaccatcaatcacattaaaaattacactgcaaacaaaataatgtagccggcaacaggaaaacttgcatttttaggtgtcactttattaaaaagagatactaaaatggcaaccgtttttcttctactgaacagaccgctggttagtgagaggagattttgcgagagaagaaataatgttggtttttaagcttcgtggaacaaaaacatttagtagaagacatcgttggatgagaaacaccaaagacaacaggtcgagactcatatctcaatgtaaatcgaatgaccaaatattcgtgtcatttcatcaagtaaaagcattttgtaatagcaaaatctaaattaagaggctctcgttttagtgctaacgagaaaccataactagacacgttaactatagttctagtccatcaagcaagtagaaaatatattcctatcacctatgttgcaaataattttttttcttaaactactcatatgatctacgatccgattacatggttgtgttcgtaagaattaaatctttataacaagttctcacatgattatattttgatgaaaaattacaaattacttttataatatggttgtgtttagttcgtgtgccaattttttttacgtatacagacacacataataagtattaaacgtagattaataacaaaacaaataatagattccgcctgtaaactgcgagatgaatttattaatcataattaatccatcattagtaagtgtttactgtagcatcgcattgtcaaatcatggcgtaattagactcgaaagattcgtctcgcgatttacatgcaaactgtgcaatttgttttttttcgtctacatttaatactccatgcatgtgtccaacaaacatttgatgtgacgaaaaagatggaagtttgaaaaaataaataaatctaaacacggcctatatctaaattatttttagatttcactaaattacttgttatacatataaaagtaaattcaataaagtctaaaaataatttaagaagtaacttaaaacaaaaatgaagtaactttttcatgacattagaagtagattcgttatggaggtaaaaacatgagtctatctagaaattaaatttaatcaacacaaattatggaattggctaaaaatagtaataaaataaacagcgcacaacattatgaatatataagaagtaatttaataaaatcgaaaagtaatttatatatatgataaaagtaacttacatatataataaaagtaatttacaacaaagatatttcttttatcaaaatatagtcatgtaagatcttgttgtaaagatttaattacaacgaacacaatggtgtaatcggattatagatcagataggtaatttaaagaaaaatccataagaagaaaaaaaaaagacatgtatcatttggtgtactagtaggcaaccatgtatgagatgagtttctggttaagacaatatagcgtgcagtctctatgtaatcacgtccgtttttataacttgcttaacaggatctctatatcactacgtactcaaaaacagcaagtgcgcacttgtcgtacaaacttcaaatttatatcatcacgaacgcacgatgcaaagacaaagttgtcacgtcaattgtttcattttaggcaatggcattgccattttggaagtgcatagccgcaatccacgcctatataaaccccacaacacttgcagtatccagcaaacaaaccaagctaaacaatcacccacttctatagttagttaaggtagcaacacttaattatttgcaattaatctaattgcatatataggatggcttacactaatctctccaagaaactagccgtagccttggtagcactggccgtcgcctgtgcccacgcactcgcggcgcgcgaccttgtcgacgcggccgcc

SEQ ID NO: 4793 - DNA, 2000 bp, Oryza sativa
cgactcttttagtagcttaattattactagccctcaaaatattgtcttttgttcctagctcaaaaggcaaattaattaagtcgatctagatgtttgtgctgctatacacgagaatagatattgttgtttcactgcaagatgaacataacatttgcagatatttttatcctttccaactagatgtacacaattagtattaaaatttcacctgttattttcgcatagagagattaatggaaacgctatgcgttgtcggaaacgacgatcgagttaataagctgtggcttgtgttaggaacatgtcgcatctatgcttccaagaagcctctcatggctagttaaatagttagttaattactatcttaattaatttgatcatgtgcctctccattcatcggttcttacaaagtagtagtatatactactcctaaatccactcccaaaaaattccttcatcagcttctagtatactggacaactacttctctgaatacttgcagatgcagagagtctctgtctgcagctgttctatactccactgagctagtaacaactacttttgatctgttcaccaactagtagcattagtacagtttcttattcggatgctctctaatctctgcataataagtagcatattatactgcgagcatctaatcctaatcaccgtatttgttactcaacttccaccgtctttgtccaaaaaataggccacaaaaagagccaagcaaaagttcaggttttcaggagttctttgctgtaagctaatgagtgagttgggatgtcatgacagtgatcttgagcaagcacacacaactgaaattaaaaagaaagaaaagaataatctaatagtatgagattatacttgcattcacacaacatcctttttctttcagttccaagatgcatatgattatctgcaagggattaagtgcagatctgataatcaagtgctttgctaatacggcaagctaatcacatcttatctccgacaaagagacaggttaatgctagatcccaccgtggcaaaaattgtcagcttgtggtatgaatgaaatgatgattaaaaacaaagttgtgaggcagctgggagcattctagaaagagccagcaaatgccaatttgacccaccaccttctgaaagctacacaccaaattgcaaagtgcagaaaaagaaaattttgaacatttcttctcatggtcctcttcaacaccaacaggaagagatggaattcatctttgtctccatggccatggcgtgtcagggcacattatgaaattacacccctacctttcagcaaaatttcatccaacagagttgctgttgaccgttgacctttttgtgggtcaactcaatcaagaccagtcaaactaagcagaaagattcatagatcagtgaatgtagtgtatgaagttatagtggaaacttgaaagtatgccaatccaaatttgtcaaaagagcattgctactcatactatttttctttctttttttcgcatagctcttaccaacaaatctctcaaccgtttgatttaataattatatgggagttcaaagtaattctatatttactcacatcataccacatcaatgtttgtaatagatttataataaatcttttaggacctttgtagttaaaaaaacaagtctaaaatcaagaaccaatacttttgggcttttggcgagtacaaaagtggaggtcttaatcaatcctcttaacaatwatwatttaatataaatatagggggtagagtgcaaaaaggactcaccttattagtcatcttccttagccttaagcgtaaagcaactcgtctcatcttcagagaagcaaacccaacaaaaaaaaaaaaagaattttcaggttttcttctcgctttcaccggagaaggagaaggagaggaaggtgttgatcgaatcctcctccaatcgcgcgcgattcgatccccgttgctggccgctcgctcgctcgatccctcatccgatctgaatcccccgatctg

SEQ ID NO: 4794 - DNA, 2000 bp, Oryza sativa
ctgcggctttgccacgatgggttgctctcctcctcgttgtcgycgttgtagttgatcctcccgttgccatcggcgctagctgcccttatggggacgcgtcatcgctgcatcaaagcctcggtgggagacacacacacacacagagagagagagagagagagatagtagagtaagcgagtgcgcgataagggagagagatgcgagcgagacaagggagagagaaatacttgaatgagtggatgggaatgattggcggggagccggttttttctcccagatccaacgcccggcttgaagtgttttcactaaatctatattttggaaattgctaaaaaaaaactgtcgcaawttttttttgggtaaargctttcaaatataactatggcatagtttgtagtataactataatataattacactatagttacattgtaactacattgtacttacaatatgcttacattctaatcttgatataacttagctataaagttgcatattttttaatccttacaagtcacattgtagttatagtataattattgtagaattaaattacaactatactacaattatatttgaaagttttttacttaaaaaaattgtggtactttttttttataatccctttttttatatacaaaacacactcctggagacacaggaagtataatataagaagcgctaaaaagataaatatttccatatagggtatgtttagcaaataggatatgggaggtcggattgggaaatggaaatagatgaatggctaggattaaataaagtgtgaagaatggatggctaagatgcaatgttgccttttggagggtgggatattatttctcaatcctatttgccaaacacagccatattggaagctagtatttgttttaactcctctcctagctatccatatgcatctggccaggagaatgaagagccggcggccgatgtaattgatgatgtaatttgaccggttgagctttgaactgaattwaccaaactwccaatagttaataagcttgaaactgtctcggcagctgcaggcaacagagagcgtgttgatatattcagcaattaactgcaatactgacattatcaacttcccttttaattagcatgggtgctagctcttgacwaattaatcagacattcagacgttatattgccataacacacatggatgcctgaatatgcggagacgaaagggaccaagtatactttacatggatagagaagacatggtcaatctactcgttaacgtacattcacggttatttttgttacaacttgaatgtcatattaaacttgtattgtatatttgtaaagagatatattttaatttaatttaattatcttatcatttttttaaatcttcttgagagataaaaatccatctccctatctttatcataatatgagcctgttcactttgatgccattttctgataaagttgctaaaattttaactacgtttagtttgttgctaaatttttagtaagcacatataaaatcttgccaaaatttagcaaccttgttaaaattttagcaaacataccaaaatttagcaatgctaaaacttggtaaggttgaaaatggtagtaaagtgctctgtgtttctattcacctgataacaaagacagccaagacatcatcaatctaatgcatgcatcatgcatgacaggcactggaataatctaattaattaattagtcggccaacctagctgttgactgggaattaagatagcttgaatccatcaaattaaatagtttctttcccagatgcaatcattaagagttcaagaccagttcagacttctgaggagatgaacaagtcactagctagctcatccttttcttattgaccacttcagaatcatttcatgctcagaggcctatatatatggatgctctttccatggacaaaagcatagactacagctatacaagaagcatcgaccactacttgtacacaagcaaaagttccatcaacttaac

SEQ ID NO: 4795 - DNA, 2000 bp, Oryza sativa
ccgtccgtaaccgagatccaacggctgaaaataaatcttatgcttcgaaggagaaatcaaaaggttgcgacacaatggagctctttcttgtggcattcgttgtgctagactgccagtgcagcagacgatgatggcggggtgtggcatgcgcgggaacggaggcagcaggcgagcgtggccagggactttatcttcagctcgccctttttttagtcgccactaccaatcttcatgttccctgcctctttttacgatctactcctgctgttaaatatggccctgcgcactgttcaaagcacggcttcccgtgcagaaatggagaagtttgtggcaatttgtcgcacttggacctgggkttttcccctccaatggtaagctgggtgatctatctggtagccaggcaaaagaaawtgggaatagtatttgcgagcgttgaattaggtggagactagctagcatgtctgtgtttgcatttgcacgattagattatttgatctataacttagtatattgataaaawttactaaaatggagtactacttgatagaatgtttgtattggagtaaactttagcaaargaaagatcagaattgaacattacgcaattcaatgatggaacaatcacaagcaacgccccctaactctgaattctaagcttttactaccgatgctacaatgtttaaatcgtggagtagtaatatcttttattttttccgtgatggctacaggattgaatttactctctggaaaatacacatgaaattccctcacttccaagttccaacttgtcctcagcaagctaccgcttgagctttcattgacttctatagctgcaagttattgccagtggaggagttgaaagatatggtggcgattggtccggatccgactaccgagttgccgtttcaggaatattcacatctacggtgcaggctagcactagcagattcctttctggatctgattttcgggacatttgtggtagttttgatggctcctttttcagattccgttaccgataacactcgagatttggcagaaacaaaaggcaaggacagggagctggcacgtcactgaccgccgtcccctatacggactgacgagcttctgtacgtacctcgaatccaataaaaacgggaattgattttgttcaccgagactttcagaggcgtaattcgattcaaagcgcccaatttacactccacgaagtcttaaagtctagcgccggaagcaatgtctctcatcactaaaaacaactgatcttaccagacaattcatatgcaaactccccccccccaccccctgagttagtcaaaaaaaaaaacaactgatctgaaattctsgaatagtttgagccacagcgacaggraatgcatgacacagtcttgtaatttttgttcgtatttcctaacatggcgtggactattagtacgtcggtaatggaccatgcatagtgtacgcaaataccgtatagtaacttttcaatagtagtacaccacgcgaatcagccggcaaaagccctgtccgacccgggcgggggcgtwtctatgtccgagccccatgaacaacagctcgatccatccacgcgcgcgtgacggctcggcggctgtcaccaacccggtcgccgggcggtctcgctcgatctgggttgggatacataccgcatacgggttgcagaacgcagatagtactaccagcacagcgcatcgcgatagataaaggcaagcaaacaagggatggtccaaaccgagctcgggccgcgctgccatctcgcctaaataaaaccgcgctacccatcgaccgatcctactcgcacgcgcacacacccaatcaaatgctcctcctccgccgcctcctctcgctgagctgagctgagctgtgaaatagtgccaccgagtgagcgctgagctgagctcgaagcaagagaggaagaggaggaggagggaagagggggggcgaagatgattacggcggcggacttctaccacgtgatgacggcg

SEQ ID NO: 4796 - DNA, 2000 bp, Oryza sativa
gcaccaccacatcgatgcgagctaactaaacaaaagagagggcggtttggttagtgatttcattaggcggagctaactaactaacaaaaccggttcgcacgcccaatgatcgttaggacgattgggcatttttaaaaaccgtgaagtcaatctgatgcagacgtggtagcggaggagctcgcagaagcggacgaaagcggcagtaaactggcatttcttgtgctctgctggttaaccgcgtcctcccttgacggggactccaaccccaacccccgttttttttaaaaaaaaaaatcatagaggaacctaaaatgctccatgacaagtacggcgagtttatttaattttctcattctcgtgttttcgtgacaggtgcatttaaatctcaatcatctgcgtgatttgattgagcgatgcaggggtgtggaggaaaagtctgaaacgggcgtgaccggccaaacgaacgagggtcgggacgcaagcaaagccgccgcgtcaaaatccgacgcgcccccataaactccacgcctccacccccaccctctccgcccccgtaaccgcgcatcctcctcctcttccacctctccccaccctccctctccgctcctccgcctccgcctccgcctccgcgtgctcccgtaaccgcgccgccgcagcctccgcctccgcgcggttcctcccgcaagcggcttctccgccgcgcgcgtccgtttctctcccgatccccgccgcccgggggggtgccgtgcactcgtcgccgtcgctgggcgcctgccgtgtcggcggcggccggtgggcgagattttgtcgccgcgcgcggggcgggggcacggttggttttgaggcgagattgattgccaggtagctggcgtatkgtcttatctacgtttgtcctcgcttctcatctcacctaatttacatggtttgtttcggttgaattgttcatcctttgttcttgtataatgggcgacttggagaatttaggtcaaatcagtcggatgagcaatccgtggttaataccggtttgatggcactaattgtagcttacttggaggggtggagttttgggactaaagcatcttaggcgtcagatttgccgtcgaactttcaaccatggagaattatatggagcaacattaattttcctcaggcatactgttgctgcacgataggatttttgttctccgcgacctgttaggcatcatgttaattttatttattttataattgcttagttagaaccgccagcccttgttcatctaggaagggatacatcgcgagacagaaaaaaaagctaattacacagataagttgatttgccctggaacttgatttggtttgatgataaagtaacccgtacaagaagtatacgaaccatttaggacccaatgagagcaccactttgttcaacttcaatttctatatctttaatcgctatcctcaatgattaatggcaactcctaaaaatgattggttgcagtggttcacattttagttccgaaagatctgtgctgaagtggtaccgtggagtagctttgggcattttctgtggtttatcagtttcatgcgttaagttaagacctaggtttgatttaatgaatgccatgttctatttattcacaaaaatgatgtttcattaatcgtttggccaagccttcattattaatcagtttttgtgaaatttaatttgtcttgttcttggattgtaaattttaattatatagatctcattcgactgaccttggtgaagctcttcacaatatcttgcaaattgagttatgtatacaaatgtgatcatcaatttttccacacagtagaatgatattaatttatgatctcttgcaggttcacaatgaatacagaaggcctggattcttgtgtataggttctctcttctgagagacatcactgaaaattctcacagaatgttggagggtcaatcttgcttgatctcaaggtctttgccaagctcctgtgatcaagaatccagattagcatac

SEQ ID NO: 4797 - DNA, 2000 bp, Oryza sativa
tttttatttaaaacatcatatttttatatatattattggtcaaagtagtatttcggagaccgtgtcaggataaaagatgcttatattttaggacggaagggagtagcattttggcttcataccgtacgtgcggtgccgattcaccggtatggcgggactcacgggttaatagcagaaatcaaggcggaaaaaattaactagccacccgagcactccagcgattttttgacgcgaccacaatactcaaccttaatttcgtcatcccacacatgcgcatgcatcgatcgcgaccgatcgatcgacggtgtgcaggcgtacgtgcagctagctacattcatgcatggcatgcaccaggagcccgcccgcccggccgccggccaagcacatgcatgttggccgccgctgtgacttacgaaagtccacgcacgcgcggtccgcgcgcctgattctcgcagtggtagagagagtcgtggctgatctgatcgggacgtacgtacgccatggcccggcaaagctgccccgaatcacgatgcttcactcgcgggagccgacggggcgtcgctcgttgatcaggagagagttgacggggggcacgagtgattggcggatttggggatgcggccggggatgaaacggtcgatcgatcggttgaccgggggccgggaggatcgtcgatgtctcgatgatgcgctaggcctagctaggagaggtttttcaggggagacgtctctcgggcctcggccctcgggatgcgcaagcttagcggtcaccatcgcatcacgcgcgcgtgtggtaatcaaccgaaataacggccaatctcctgtgaacttttgactttccattttgccaatagatcagctagcttgctcaggatatattccggacacggaaaacgtaaagcatcgtcgtcatgcaagtaattgacattgttaatttggtatctacatattataatcatgtacagttaccctctgttgcatatcaacacaactgtacattaattgtattacctctatcccataatataaggcacgatcagagttggcacggtgtccataactaatatttagcttataatttctcatatactataaaatttgtatcaacaaaattataatcatataaaagtaaatttaaatctcaatataatgatatagtttttaacaaataaaattcattccatattatactaagtgttggtcaaatgttttaaaggttaaatcttgaaatacatgcacgccttatattatgagatggaggaagtattaataacatgggagtggattctaaatcatcgaggggatatcccatcgttatttacatatgttatctaaatggtcatgaaaaaaaattttaaaaaaactcaattagatagattaatatgttatagatcattctacaaacatacaagtttctactagttgcaagttgcaacaaaatataactcatgcggccttgggagttcagggtgcaatgacgcataatatgtgtatactacattcaacacgagctacatccacgagtagaagttaaccaaagatgggctacagctaaatggtaaccagctttgctagatctagccaggcaggcagaaactgatcgaaaggtagtacataataccggtaactgccatggtcccaataacgatcgaattgaggattggacaagtgaactacacacaaaaagggccgacctactactacgtaattagctaatcaatcttttcggctgtgcttaattaacgtatgttgaccctagccacgtgcattagtagcatgaatgtggaactatccaacagagcaagcaaagcagagcgatttgtctgcatatatgcatgcatggaaggatataagccgtcgtctgctgcctataaatagaacacctcctttccctagccacctcacacaccatctgcttgcatcttcccaatctttgcaaagcaacaacaatcctagcaagttaagctaagcacccagttagctaagctagctatagcagcc

SEQ ID NO: 4798 - DNA, 2000 bp, Oryza sativa
tgttaccaggtcagagattttactttacttaaataccacatagcaatgtgaatacgtgtggtgaaactataccactttgatttatggacaaagttactgatgatagttacactaaaactaaataatgcaatcaacatggcctcagtaacatggataaaaaactactaaattattattgccgaaagtaattgggtgacttcgtcaagatcttactgttgtacgtgaagtgtgaacagtaccgtaccgtctaattttataaaggatgcagcgtgagacgggtatattaaccactaactcgcactaggacggcttatcaaccatttacaataaagcattaaagccttcttcatagtggagaaatgtgaaagcacttttaaagaaattacgccaaactatataaaattcttacgttgtaagaagccccaaatatgtatgattcactgattcacacagcattggatgatgatttagatctctctgatttaagttaggtgactttaaagacactaacatgtggaagatatggatccttccttttcctcgtaataaaccatcacataaataaaactaaccatcctaaagcctcaacaatcgtgaaaaactgtagatatagttcttggaaaattcatatctttctttcggaattacaaaactagaaaaaaaatactcccatcgttttaaaatataagtatttctggttatgaatctggacaagtgtttatctagattcatagttaaaagttgttatattttaagataatgtagtgcttattagaaagacattacatcttttccacaaagacttttctttttttactatgaatttgaataagtatttctctaggtggatatcctaaaatgaaatactctattcgtctcaaatatagcaacttaatacaacattagacaccacttattaatatgaatctggatagggataacgaatctagacatgattcatggcactaggttatatctattttattttagttaccgttatagtaccttctctatcttaaaaaacaaatcatgttcagatttatagcactgggatgcatcacatcccgtagtagtttatttttatgggacgaaaagagcacatcagaatcatgtgctttgaaaaagatcaaaaacaaaaaaaaagaacatccaaaggcaaattccttcttgggtacaaccatgtactctagtcctacaaagtaccacataattcttgccacttgccatctcttccctctccctccccatttgttcgattccccatttggccttttcctagaaccatcctccctcccccacaaaaccccccaaaaaaattacaacaaaagcaaaatggatttgaacaaaattcaggatgaaaccttgaattcaacactgcaccctcctactagtagtagcacctctaccagttacttctcaatccgtaccaaaatataaacacttctaaaataatatcaagccaaatattttttaactttgattattaatagaaaaaaaataaaaacaaatcaatcatgtaaaattgatatttactagatttatcattaaacaactatcatgctccatatgtaactttttttattttaaacatcgtacttttatagatattattagtcaaagtagtatctcgaagactaagtgtaaaattgtttatattttagagcggggagagagagctacccatcttcatcagctaatgatccaaaagaggcaccaaaaagaagaaggaagaaaaaaacacgaaacgcgcagtcgcgtctcacccccatttgccgcacgttgcccaactcctcctcctcctcgtcatcgtctccgttccgatccgcgcccataaatacgcgccaccccgcccccaacctcgccgtccttgtcccccccaagaaccccccgtgcgccaccaccaccaccaccaccaccaccaccaccaccgaggaattctcgctgtcgccgccgccgacgacgacgaggagaaggagtatcgctcacaatcttccgggccg

SEQ ID NO: 4799 - DNA, 2000 bp, Oryza sativa
ctagttcagttagcacctgacttgctgttaatttactgtagtttcctgtcgggtgcgcctcttgagattagcatttctcgcatgcttacttaccagctggtttgggtgaaaaattcgggcaaaatagtttttgggtacctgaaatttcagaaatttgaagctggcatatggaatcctcaccgtatcgctctatgcagtattcgtattttggttttgtaagtcgaaattttttaactttaactacattcgtaggaaaaataactaatatctacaacaataacaaataaatacaacatattttatggtagattttaacgaataatttgacgttataaatgttggtgtgtttttcaaaaaactaaaaaagttagtcaaagtcaccttaatttagaaaaatactaaaacacctttacaatacgaagcaggggagtagcaacagggccgggaatggatggtttgtagctaccagcaagcgttcatggccggtttatgaattcttgctcgctgctgcccgcgcacgagccccttgcagcaagccgcattatcgttcgttccaacacgtacccggctgaaccaaccagctgccggtcgcctcagctcgaccaacctgatcgacttccattccagtcaagtcaaagcctctctatctcccagcaactagccccgtttctatatatacatctgatcatatgcatgcagaattatattgtctcttctactgctactgatcgatcgatctagctaagacgatctctagctgtaatttgtgctaacacatgtgtaatgaggtgtccacgacggcgcagctctgcaagtctgcaggtgtcatcgcagcctccaccacggctcatctccgagcacttgccggccggtgatccgccgtcgccgcttagccggagcagaaagaggaggagcttctccgaggaagaggacgagctcctcctcaagctgcacgctttgctcggcaaccggtacgtacgtaattaattaattcccccaatatcaacaatattccgctattaattcaccgtttgttataattaagcaatgatcaaattaatattgatgcatatatatcaagttggtccctcatcgctgggaggctaccggggaggacagacaaagaggtcatgaaccactggaactccaagctgatggatagtactatagagcatccaccctcgctacatgatgatgaacaccgtcgacggcgtcgccgtctgcgaagcgaagctcacgacgaacgtggtgcaaagcatccgggccacaattcatcttcttcctccaaggacgtcaatggcgatgaatgtacagtcgccgacgacgcaagtagctgtaaccaccaagatgataaccgggctgttgcagaattgaacctagagcttaccctctctacgccttgcatctacttgttacttggacaggatcgtgaggatggatcgaagagcaaccagggtttaatttgatcgatcctaaagtatactaacaacacattaattagtacatcttgcataagcataaatgaaacgatggagccaatgtgtcatttgctaattaatgaatccagcgagatcgactgacgatgagcaagttggaagttactaatcccactgtcccataataaaccaatcttgagtacattgtactacaataaaaatctgcacattgtatcacattctggtataaggttgatatattttgaaacaggtggaatagctacaagagaaggttggaatttagtaagttgcagttacaaattcaagctcatcatgcacactaaccttctctagaaaagagtaatactatacctcgatcttcccatgaccaacctaattcaaaccggccaacggagtttctttcttctaaaatgataatcaaaggaagaaataattaacatttcgattgctgagctccccaagttcagaataaattaacgtcatttcgacataaagagatcgctctcggtagtaagctagagatagagagagagagagagagag

SEQ ID NO: 4800 - DNA, 709 bp, Oryza sativa
  misc_feature (1)...(709): n = A,T,C or G
gtkgsttttgsyttggnncccaamcmwttcccgggtcccmttttgggkccaatttcccaawkgtttwraaaccccggggrgacccckgtcgaaaycstttsgggggttycmccccccccsrttttttttttttttgaggrggatgatcycggtygsgcccaccgacgttttcccccyggatttacaatgstttctttcttcattytgsttytgsttttgsgctgccmtktaaacssgaactgaaatcsctcggattwtccgtaaaactccgccaaaaaaaaaaaaagaaaaaaagtttgaggtggggaatggataaacgtggagaggctgggttcccagatgctggggttacaggatgtagaccgggaaaaagaaacaaagatggatgcaaggatgaaaaagatggtcaccatggtaaagaaaagaaaagagaggagataatcacgatggagacaattcagcggtggccactgggccgccttcgccatatgccgttcccatttgcatcttgactatctcttatctgtccatgggaatcgaaaaaattttcaatactgtgtttcaatcatttttagtgcacgtttgcttatgctgaagttctatatataacgaacatgtgcttcaggtaatggcagtccatgtgtgtttgatttgctcaagtgtggtaggtgcagggagaagactgagaggcgagctgcgcagcagagcc

SEQ ID NO: 4801 - DNA, 2000 bp, Oryza sativa
atcgccccttcccccacgttgcccgtcgcaggccaccagatctcctcccgcctcgacccgccgcccgacccgcttagacgaggaacaaaatgagagagagagaggaggaagggagagaagaggggagagagagggtgatgatgaagtcaccctgacatgtggggtccacgtgggtcccacactggacttagccgtcacgttggataaaattggggtcaataccacctaaggacctaaactgacccaattttataagttgatgaatgctatatatttggttttttggttggaggacgattttataattcgataacaaaataagggaccttacgtgcacttgttcccaaataaatagacctagcttgggcttagagccttagacaaaaattgttacccaaagtaacaaccaggcccaagttcataatagcccactaacgacgggtctacagcccatttatactccagtttcaatagatggaaaaaaaagcaccgaaggtccatcaatttgtcatcgagttacaaaatcgtcccccaaccacaaaatcaaatacaggacatccctcaagttataaaaccattcactttaggtccttcggtcgtttttgaccccggttttatccgacatggcggctaagtcagcgtagaaccccatgtaggctccacatgtcaaaataccaggtcatctctctcccctctcttctccccctttcctcctctctctctcacttttctcctctccgcagggcggctagtgggtggggaggatgtaccgggacgaggcgggaaagaagatccggcggccgacgacggcacgtgcgacctcggggttagaccatcggagaggcccgggaggtgtcggcggcggcgacgacacgtgagaagggaggcggcggcggctgcgatgcttgagagggagaggtggccggcagcgaagcaggggtggtggcgggcggagcgggcgccgcggcaggcgagcgcgcaggaataagctgtcttcggcgtcgttcccactctgctcaccgccgcctgttccgcccatcgccgcttgctccacccaccgctgcctagcgctcacacactcccgccagccacctcccccctccctctcaagcttgtgaagaagagagaagaaagaagatgccgcggagcttggtcgggaggaggtggcggtgggagaggtagacaccggtgcgcggatccatccacccccgccctcgggcacttccggagttgggcggcgacggggcgtcgaccgcgtctcccttctcgggccggtggtagggatccttgcggagccgggcgggcggaaggcggcggcgacggggttatcgtcgcggttgatgccaatggaggagccatccggtgtcgaagcagcgacgccaatgccctcctccttctcctgcctcccgagcctctccgaccctgagctcgcatacgcggcgatgccctcccttctctcccgctgccaccgccgacgtcggcggccgtcggtgcggtgccaccctcctctcccacctaaccccaccgactggcctacaggtagagaagactaagagaaaggaggaaccgaggaagggtgagaagaggggagatagagatgacctgacattctgacatgtggggcccacactgactcagccgccccgcctaacaaaacagaggtcaaaaccaccgaagaagtgaatagttttattagtgagggatgttgtatatagttttgtggttgggggacggttttatatcttgacgagggagggattgtactttttcctcggtagatccacacctccgaaggaatcgaggatgtcgtttccttccccacctcagcgcggttccaggcggaccgcgggtcccacgcctggccgccgcgggagctgagcggtgccacgtcagcgcgcgacgcgagctccaatccacatacaccttctcttccctccacacacacacgcccgcacactcctcgccgttcgcctcgcgctcccctcgtcgtcgtcgcgcaa

SEQ ID NO: 4802 - DNA, 2000 bp, Oryza sativa
actcctccgttgcttcctctcgctcggccggcctccttcctcttcgtcacggcggccaccaccctatcaccacctttgtccacacacccgtagaatgaagaccaggtcaactccgttatatagtcgtcatcttgtaaacttgtaacgtaggagtatgctaaatttgtctagccaactcatctcatgtagtttttttaaaaaataatctcatctcatgtggaaaaaaaaaggaaagaagcaaagtcttccattctatttctatcatgtatattactaatttaaggtgaagctatggatcgacatgtagctgtcgagtgtgcaagttaaacttgaaaaatagattaatctgatattttagaacaatttttatataaaaaattttcgtacaaaacacaccgtttaacagtttgaaaaacgtgccacgaaaattcaaaatttaatccacttcttgtagtggaaacgaacgggagagtgtggaaacggactatagtccataacagccaaattagaggcaaaacatgattacatatctttttggcaaaaacaaattaaattgtttgccacccctaaccacactgtgaattatcctttgctaatttcagccacaaacggattaacaaaacgagctatcatcaaccgacggcgaagcggcgaaagtgaacagtgaacagccccatgtatcctatgaatctcttttgaaaggagttaattcattccatttattcattgcataacaacatttttcactaaaaacaaaaaaaaacaacatttttcactgtattatgtacgtgcatttgccatgtttctcatatgttcatccataacatgccaacatggtatacaaatcatgctggcgttaactttggttgatgaggtctccctctatttcagcttcatgctatccaaaagtagtaacgtcatgtccttcatcactgcttctcatgcgctttcgaggacgtcccgaaaataagtgtagccataagtttccgtgtccaattttgatcggttcgtcttatttaattttttttataattagcaattttgttgttataagatgataaaacataaatagtactttactcgtgacttatgtttttatttttttttatataagatgaatgatcaaagttaggcgctgaaaaccatggctgcacttattttgggacggagggagtacacaactatcaatcgcagtgattaattgagcctaaatctaaaaaaacaaccagttgcattttactactgttttagcatatgtcattatatttaacttgccacatagaactcccggtaacgcatgactcatatatacacrgataaaatagcggcaatttggcaaacacgtacgaatacatatccatattttcttttggcgaatgcgaatcgcatgtttgccacacctaaccatcgaatccattctcactttgctaactgtagccacagaaattaacmaaaacgaaacttatcatcaaccgacggcgaagccgcgaaagcgaccagtgaacaccaacctgacccagaggcacccaacgcgcgcgctacattgtgccgggaaaacggcgcggcacgcatgcgatcgaagccgaccccgcgacgcgtacgtacgtgcgccgagacgcaaacgaaaaaccccctgcctgcgcggcgcgcgcggcagggcacaatcgccatccgccccgagcagctcgcggccgcgcragsccgagggcgactttttccgaggcgaccggacccacccccmaacccgtcgtccgccgtggcggtcgtatccgcccgaatatgccttcctttggcgccccaccttctttactctcccggcacccaccctccttccggttgctcgatcgtctcgctctcctctcctcttctcttcgtctctcctcctgacccttttccgctttccttttccccctcctcgatycgcggcgcaaccgaacacgaaagcgagagagagaggagttcagccgctgccctgtycccttaacggcgccgggccgrac

SEQ ID NO: 4803 - DNA, 2000 bp, Oryza sativa
tttaatttcaatttgtaggcatgccattgtttctttggaattgttgttggatcttataaagatctttggaccagttattcgttcaacattgtcagctcattcagcagttggagttgatattcaggctgagcagaggtacgtgcattaatgttattcaagggaatgctatttaaaggacgccgcaaaacctgcaaattgcaaagagacactggatgtgaggtgacaagtgggttctgtccctgcacttcagttaggaaccattgttttaaaaaactgcagcgtttgtagcatcctataacctattgctctgtctatgtcaagatgaactggactgttgctgacttcgctggtgtgtattgtacacaggttgcaacgttgcagtcggtgttttaaccatttgcaaaagattcagcaagttctacaccccttaattatgtaattcctttccttcccctcccctccctgtatgagatgctttatcctttactttgggtgtgtttagttcacgccaaaattagaagtttggttgaaattggaacgatatgatggaaaagttggaagtttgaagaaataatttggaactaaactcggcctttatcagactgttgttttcttaagcttgctgacagttgttcgtgtgcaccattttttttttgctacccacgtcatttgttggagctagctttcctgacattctgtgatggtttcatattttgttggtgcaggcggggtggtcaatcagcacaacttgcccaagaactgaacctgtctttgcatgacttggtggtgatctgaaacaagcggggaggttcattcatactagtacaacacagtgagagtagataactagacatcattctttttggcaaaaaacgcgccagcgccatacagtttttgtagcttgttgccatagctttgcaattgagctgtgtaattgtgttttgacttggcttttgattcggcgtagtcccctgttgtacatgtgagcttggctgtgcataatctgtaattaacatttgttacatggacagccccggatgagggagaagcaagttcaaaaatggttgatgtcagttcaacgtggtgattcattctcttctttcatgtaatgaaactgttgcccgtgtaatctggaatctggtgataattcaattcaccatcaacgaagtggttgaagttttgaagacagagtttggyacggtttgaacgcattacccattccccgtttgacttcmaattcaaaccagctgggtgctgatgactgtcttgtcatcatttgattatttcctaagccctgtttccttcgttcytaagaaaacactcktctgtaktwtttttttaccctgwtwttagctgcattctgctrttcttgtggcaarccaattctggctggckatggttttgctcagttactragcgggtacgtcaggacaaatttgtgttccatttagaaacttccaattctttaaacttagggtggtgacaggtttgtcaggtcaatcaaaacccgccgatygtactacaccgtraattaaatcagatccccttcgctaatactactatcaygagrgacaaatytcagctccaaattaagaacgtacytgyaagcctgctaacwsrwwygskgmcaatmttgkkscawwygatkcrgtwccwymayyssrkcmrytcctskwtgcsggssramtrgkctgcmactcwcaagwctsrrcygcscasyggtcayctggccycacctrwmrgcykktgagcaagtacgcgaagaatcccacaggtcagagattagcaccagcggagacaggaagtaccactaaaataagccccatcctgaacaaatccccaaattcggcaaacccactaggttacgtaaaagcggaagcccggaggccggagcagttggtcgccaccgtcacgcgcgttccccttccctcgccggagcagagarascwcygacgcggccgcttccggaggaggaggaggagttggggtggaggggagct

SEQ ID NO: 4804 - DNA, 2000 bp, Oryza sativa
ttggcaaaaagatgcataaccgttgtctcaagcttacgacatgcaacactcaggaattctccatcttcctcacacttttgtacttgagcccacagccaaagctaaaatgttgccctgaaaattacctgcatataggaaatagatggggatttgtaaaaaattctatcattcctacacaaccacagagcccaacataaggcagaggcactaacaagtatcagtttactcttttccttgtccaccccctgaagccaaccatcaaaaatatcatatatgcttctaggaaagaataatccaaaagaaaactgaactgctctccaaataaactttgcataatgacaatccaaaaacaaatgttgagtagtcttatttttttaataaaaaacaacatattaaacacccattccaatttcgtcttgctagattatccttggttaacacaactcccttaagcaagtaccacataaagatcttaatcttaagcggcatcttatgcttccaaatgaacttatttctgtcaatgtaaccattattaattaaagctaagtacattgatcaaaccgaaatctgaccattctgatgataattccatctaaaacaatcaaaaacaatcagaagaatcatccaactggatatgagtaatagaagcacacaattataccaaattggtagattctgtccaactaaatctctcttaaagaaaacattaagcggaacagagcccataacactagcaacagaagcacttttccttctgaaaatagcatataaagatggatacttatatctaaaggccaagttttctagccatttaccctcccaaaatcttatctattctccatcattcacaatataagaaaccatacttaaaaaggtatttttttgactttcataagccctgacgaaaaatgagaatcaccttatttcctatccacttgagttataaacttattataaatatactccctcttcaataagtcctgccaaacaccattctcattaattaacttatataaccacttactcaaaaagatatttatttcgaatatctaaattatgaacacccaaacctccctggtctttgggctatctggttttggagttgacaaattatatctacataaaatataccgtttaacagattgataaacgtgcgaatagaaaccgaaataaaacctatatagtcagaaactaacgaaaccataataagacctggaacagcaaaaacagagacaactcgtacgatgaacaatgaaagcatagtcggtgagatactacgggtctgtatggcataactccagctccaccccttctaaggctgaagctctgccaaacagtttcagctccaccaaaactgggagtgaagctaggtgaagctctctcacaaaatgaactagagttgtggagctgagttacagctccaaaactctactccagaccctactcctgaagctaaatttaggagttggagctgtaataaatagaccctaccaatgtactcctattatacgtgtatagtactccctccgtcccataatataagagattttgaagttttgcctacaatgtttggccacttgtcttattcaaaaaatttatgtaaatataaaaagcgaaaagttgtgcttaaatactttagataattaagtaaatccttaaaaaataaataataattataatttttttaataagacgaatgatcaaacaacgcaagcaaaaactttatattatgggacggatattatggcctatgggacggaggagcagtactccagtagtcgagtcaggtccacagtgaggaggcccaggagaatccgagatttgcgagggctaatcgcgtcatttcggcgttcaaaaaaatccaaaacccaaacagtggcagcagctgctgctgctcgccgcccgaggcagcgtctcgccattaaagccaccgctgctgctctcgctgcagcacagccagtgtgcgtgcgtgcgcgtgtgagcgagaaggagagagagag

SEQ ID NO: 4805 - DNA, 1774 bp, Oryza sativa
ttttgcaaatggwaamcccccccccccggtgccacgtcagcgcgttgttgatgctcacgctccgtctcacctcaccttggaggggatcaggaagagagaagaagtagcggataagaggagattgaggagaggaagaaagtgatagccactgacatgtgggtcccacgctgactcaacttgtcacatcaactaaaactgggcataatactggttaggacctcgggtgatctggttttgtaaattgagacccattatatctggtatttcgttttaggggtgaatttcaaacttagtgacaacttgaaggaccaaaacaaagacggtccatagttcaaacgggctgaattttggcgggcctagagccattggacggcagcaaaacaaagaaagttttaaaaaatacaaaattccgttgccgggactcgaacccgggtctctcgggtgagagccgagtatcctaaccagctagactacaacggatcatgtcttggatatataggtaccattttataaccttttatattatagaaataagatgtacagagccaaaagcatgtccagtcccacataaaagacacaattgctccagatctatgtcttgctactccaatacgaagtaatacactaatactacactatctgcagatgcagattattgtgtattttaaagaggaatcttatctgcaaatgcagatagctacacgcaatcatgatgtgaggagcagcaacagatctggcgcctaatcgtttcgtcttgcgcatctaaacgagtggaattaaccatgacacagacaagtggacaaatctaaatctagctaatcaaccaatcacaccaaagcgcaaggagttcccatcggaatccagacaggatccaagtccatctcttgaattaatcacaaacttatttaaatataaatcaaaataatactccatccgtctcaaaacaagtgcaattttgcactattcacgttcaacgtttgatcattcgtcttatttaaaaattttgtgaaaaaattgaaaatatttagtcacacataaagtaatattcatgttttatcatttaatagcaataaaaatagtaatcataattttttttaaataaaacggacggtcaaatgttgggcacggatatccatagctgtacttattctgggacagaggtagtaataaacttaccggccatgttagatccaatccgagatcaaagcgagaccaacatgagataaggttaatacactaccctctttttgtttttttggttttttggctttgtacggatcgatcttgacttgactcgcacctgcagctgccacgtcagagccacgtcggattccaacacgtattccggcgtgggcatcggctctttctagagcaaaccccaaatcaaatcttgcacgaacacccctccaacttccccacgtttacaaatccaaccctcaccctataaataataaatagcgaattcttactctttttttttattaatatataataaaagaagatcgaagcgaagcgcacctctctcctcttcttcttcaattgatcaggttgagagggacgacaacatcagatcacgagccacgcaatcgcaatcgcagaggggagagagagaagagggatcgaatcgaatccagtcgaggaggaggagggcccctcgggccgatccgatcgagaggaggagggatccgagctgaacgattcaacccaaggctcgcgggatttggcgcgagttgagccataccgatccctctgccttccgacggacggatccctg

SEQ ID NO: 4806 - DNA, 2000 bp, Oryza sativa
aagaacaacaaatcaatagtcaaccaaattatcgattatcaacaataattcaaattttatcacaagttatcactagctagcatcacaaataatctccattaatttgggcattcaccaacactccaacaattcaaattaacggtattcaacacaagcattcaacagttaaaggtagaagtacaatcatccaggcaaatattcagtataaattattactacaatgcttgcatcaaccaacactcagtgagagatgggtcaaaaacaactaatagctatatactaggtcaggcatgagttactaacgggcaaaaaataaaatccacatgctgccaactacatcgtctgggtctggagcaggcatgcatatggtaaaaataagagtaaagtgcacgagaggtccctaaacttgtgcagatgtgtcatctaggtacctaaattcttaaaatgcatttttgatccctaaacttgtcatgtcaggcatgagttactaacgggcaaaaaataaaatccacatgctgccaactacatcgtctgggtctggagcaggcatgcatatggtaaaaataagagtaaagtgcacgagaggtccctaaacttgtgcagatgtgtcatctaggtacctaaattctcaaaatgcatttttgatccctaaacttgtcaggcatgagtaactaacgggcaaaaaataaaatccacatgctgccaactacatcgtctgggtctggagcaggcatgcatatggtaaaaataagagtaaagtgcacgagaggtccctaaacttgtgcagatgtgtcatctaggtacctaaattctcaaaatgcatttttgatccctaaacttgtattggatgttatttaggtccaaatggattccaacccactttgtgtgttgatgtggcttgccatgttggcgcctatgtatgattatgtatctactcacatatcagtcatatattgaaaaaaaattaacaacatattttttctcctctcttttttaatttatatctttaaaattaaaaacatctttttctcatctctttcgtgtcattttaaattttactttttctatatatgactgacatatggatcctttgacatgtagatgccaccgtggcatgccacgtcagctcatagagcggttagagttcgtttggataagtttgaggaaaaacaaaaagaaatacaatttcagagtttaaccatttagatgatacacccatataaatttagggaccgcccgtgcacttcactcaataacaaattatacccacacacatacccatcagacctagtatccgtggatacctagacccatgggcaaaattgctatccctattaatcctatagaataataaagccttagcttggtggtgagcgcttgcatttactactctaatgacttcggttcaattcgccgacacgctttggcgctgagttttgaattttgatcctgcttttagttatagtttttgttagggtgtatttgtaaaatagatttttgcaaaaggttaaaatgtcaaaatgtcagtacgcagctcacatgcatagaaaatgttgccatgaaggttcgtcgtcaggtgtgctgaaactgtccccatcccttcattttccttgacagtgacagagccacgaatatatttgagcacggaggaggaacaatcaaaattgataacaggaaaatagtgtaacattacgatattgtgtcagcaatagagagtgttttcccaagataatggcatcgtatattttcacgtggagatagactttgatcgtttcagaaaacgatatctacctttgacgttagacgagaagcctgaataaattccatgcactaaattaaatgagtaggcatcggctctgctgatctataaatatatacgagctgtgtccgcagcaacaagagcacgagcttaccywrctaggtccagagaaaaaactgatacaacgatagtaacaataacagtagatagtgtgttactactgcacggttcgtcgcaaaca

SEQ ID NO: 4807 - DNA, 522 bp, Oryza sativa
tttgagggggtaawggttttagagttaaaggtgtgatttagactaacggaaaagtttgagggtgttaaatggacttaaacctattaaattttaattaaaaggcttaatacttagacctaaatctttttatgttcgtacaaaaattttgaataagatgaatgatcaaacgtttgtaaaaaagttaacgggatgacataggagtacataaaaaatggaggtagtatttactcaacttccatgactgcgtcccagattattgcttagtggattgtggggccattccatactccaggtgtgaggctcgcctctcctcacggcatcacaacatgcaaccactaacacagcacagccacgagagagatcgatcgatcgatcgagagtgtttctgatcgagaagaatgcttctgacaaatcgatccctctgaaatttcgttggtcagagatcaatcgattcttcaagaaggaatcgcaaatcgcaatgcatgcatgaggaagcaattgcatcgatcgatgtcatcagca

SEQ ID NO: 4808 - DNA, 2000 bp, Oryza sativa
gttggcaaacattgcgtacaacgtggtgtatcagatcaaaggattggggaggagatgtcgataactgaataaaactctctagaatacttgggccaatcattgccactgctaccggaaacatggtcgacccagcagcattcgatatactagtactactctccacgcttgcaagttgctaatacagttgacttgcttttgttgtcaatcaaagcatcaggcataaacatggtgcaaaatctctctctctcattcactgtcttctgaaatctgatcctgagaattcattctttatgttacaacttgacctctccaaaattgaatgtgcatgaggcgtgttactgttagtctgttactgactacagcacagcaacacaacatttttcagaatgaatatacaacagcatgaattaagagcagcgcagatgaaagaggtgtctttcaacgatcctttagtaaacgcgtggatcgctatcaaggtgctgggttttaatttgcagatgaagttagagagagcaagctggccaaacctgccgacacctacagataaacatggagaaatggtagggagaatgacacaagtgaagaagaagatgggcatgatggtccagccagcctttacatggggcctgaaatcctgaaattaatctcagagttagaggaaccaaccaaaacaatagctgtgcgataaggctaatgagtaaatatgtggtctccatctccatggagacggaggagacctagctacctctccccaacagaatttgcaggcctcttgtaaactgctgctgctactacatgtggtgtgggtggtatggtagggccctgattgtgttggtccttttggccattagcacagagttcgccacgtagcaaatgaaggtaccttgtctaattattgtgcttttaatttccagcaggaactaggaaccacccctaaagccgatgaacagtgtgttcccttttgcaacaaaaaagttcagaactccgcaattgtttttcggagcttttttttaattaaaaaaactgtttttcagagcttgaaccatgttttacaagcatcatgctggtaaatttgcttggtcactgacggagtgtacgcagcagtattgtgtattgcaaggcaaattgtttgtttttgagcgaaagaagccgccttggtttggtagtacaattgttcatcggcgcacgaggagagataccactcaacacgtggtattaaaaaccgtagtactgcattttcctggattgaatttgggcaaaggcgttagtcaagagggcattataaatggtagttgtcgctgttgtttcccagcacctctcgctcggttcgtcgtcgcccgcccctacttgcttctttcctcctttcttcctcctcctcctacagtggactcgtggctggcagcatcgtctcctctcctctcctctcttcttatcctttttaacttctccttattgttgttgtcgtccttcttcttctccagtccacacacacaaaggcactctctcttcttctctttctactagctgagtgccaagcttatggaaagagtggtagagtaatcagaaggagatcagataagggcatagagagagtcagagagaggtatgtgtgtgttccatgctcctaggattcattcaataaagattccattttgagttccctgattttgatgcgtgtctgtatacggcccgattattattttatttttgtcttcttacttgatgatggcctttgatgatcctttgttcatcatttggcacatgggcgcatgttctagcttgttttcacttctgctaaaccatttctctttgttaatgaaatcatcatttgagttaccaaaagcttatgatcattgatcagcaaagtaattactatggggaaaaaaaactaattcgaggtcggcttacgtgcaggtggatctatagatagctactgctctgctgctgctattaagtcagtctgtgctacgatcgaggagatgatgggagcagcggtgacc

SEQ ID NO: 4809 - DNA, 2000 bp, Oryza sativa
ccatgaaaatcaggttcttaccgtttcccgatcacactttcactcacaagatgttgagataaaagccttaaactatgcaatgccatggttatggtgttcggttgatatgggtcttttgtttcttcaggctattgttagttgtgcaagtagatgtgttacattcgttcctggcactatcatcgcctaaataatcacataactgtttctagtggataaaaaggagcaaaagttagttatgcaattttgtctggtcattttttttcactgtccacacccattgatgatgataccatgaaaggactggcttgactatctgattctgtgtgctcgggcgcccacagttttggcctcgatggtgctcttatctagtttatccaacgaccatgatggctgtagaacagtgaggtgccaactcttagtgatcaggtcctggacgttgcctattgcctcttttcatctgaagacatactagactaggctacaagccaatgtatctttatcatcagggcccagctttgtttgccctgatggtcctcgctgcatgtctgcatccatatgggtgaccaattatcactcgattttcactgatactgtgataagttgtcctttcgtcttgtctaattgaggttgcgctactgcctcttggccacgcataagctgcgaccttgattcttacaatccgcgcgctgtggttgatctagaaatctgtaggagttagagatgaattcctgagttttgagtttctggcccagaggcttatgaaagctatgatggcatgtttagagctttcgataagtggggctgtggggattgggacccagtattgcaaaattgagctaaatcagaacaatttccaaaacaatgcctctgtccactccaggcacaaacaattacaaatacaaattttaacttccaagaagatggaaacaatatttttttttggcacacacattggtggaaactatagtatgatgttctagatttgcccgcgctgtgtggtgggtagtgtggcctagtgggtacactgccctacggccgcaaaccgggccgactgaactgtaaggcagctgcccttggtttctttcgcgcccagtgatttgcatttggaccgctgatgcagcagcgcgatgcacgtacatgataacatagcggggccatgcccctctcctgtgcttgattctcacgcgaatgctgtgggggacggacagcatcggcgtgttgctgtgtctaacgtacgccagcgcttatcgcctgctccatcctgtggaagtggccgaatcggattccctctcctcttcttacgaagcaaccaaaatcccttgtcctgtcatattgtcgtactcctcttagaggagcacgtaaaactgttggttctcgtgaatcttgcatatgcactgtcactctcgtactagggtgtcatgctgttggttccggtgaatcttatctacatatgtatatcctgtctgcacaacttctattccttgctataagaagagaacgattttactaataacagccgctggaataatttttcatgttgccgtgtgcaacaaaaggggaaaaaaaaacagcctgataaacaaagtgtaatgtcaagttgcagacaactagcaatgcagacttaccttcagagagttattgcatcgtccagttttccgaaagctcatttcattgtggctgatcataagtttcattgatttgaaaccgtgattgtgaagcctcattctcttttatggaaggcaaaagatacatttaactcttcccaaatatttcctacccttctctttccttatcttgacctgtcgtcagcaaatgtgtcattgccaaattccagccctgcagcaagctcacgccaacttgcctgttaaatagtcccctctcttgcactgaaatgcaactcggggagaacaaggaaaaacctatatatacacactcctccatttctggtcacgccgcaaggtttgctccaacaccaacagggaggtaggctgcagcttatc

SEQ ID NO: 4810 - DNA, 2000 bp, Oryza sativa
gtatcagagtaaatttcacatcactacatagtctatggttcaagttgcacaaatccataaatatttttttttattttttgtattacagcaaattacttattgtaccattttgtatcaaagtaaatttcacataactatatagtctatggttcaagttgcacaaatccataaatatttttaacacttcgcatttaaatacatatattttggtatcaaagtttcataaaaatatactatcagagaatacatccacccatgagattacgtggttgttccacctaggatccgaacttgagtacttcatccgaggtggaacatccacgatgcgacatccacattctaaatataagtagataaacagccacgccatctcgccgatagattcattcattaatagcttagttttgtgaaacttcagtactaaaatatacgtagttaagtgccagatgttaaagcgcgtgtgattttttataacttgaactataaaatataatatgtagttttgtaaaatttactctttctattatgtccgagtgaatgggcctcattaaggcctagtcccacttgttccggcctataacatgtatgggccacacggaggaagaattcccgttcctcctcgtgggctgttagatcgtaccccagcaattggtgggttgcagcgcatggtgtctgtgtctcaaattttttaattcatttttaaaagatttaaaaaataaattactgtttcaaaagatttgcagaaataccatccaacggggaatataaatcattctacggtagggcggattaaacgattggcacaaggcgagagcgtcatggcaatttgaatgcggcccctatcactaagaggggcctgcttgcaaaattttcataacgcgctccaatgcatcaccaaactattgttagtgtcatcaaactargtcaccctacggaaagcaagaagagggcgcctgcaaaaattatcacggtgcgcctctcccgcgaggtggcatgttatataaattgccttatcgtaggcacaatttatatgcctcgcttaatggtaggatgggaggagcatatttttataaaactttgaaatgagaatttacttataaatttttgaaaaatgaatataaaaatataaaaaactcgtctcctctcctgcgtctcgctctttcaccagcacggttggctcgcttcgctctttcgggttgggtgctggattccatcttgtatgccgtttttcgacgatttttttttattaaattttgatcaaacttcaatgtttcaaaattgaattcctgaaaaccattcgaaatttcactcggaatatgcttccgtcctatgttaaaacgtcgaaatttttatcagttttcgtaaaatgatccggtttctctgccacaaagcctgaggcctcgagatatagcctgcactatttttttctccatggatcaccatggcctttctcctctaatctagctttaagtggcactcaagtcaccaagccttgagaaaaaattagcacactccgaggcagcatcccgatctctcaaagaaccgcaaaccgagaggacgccttggcgtacgagatccatcgtcaattaccgccgccatttcgcgccattttcaatcaaagattcctactagtattagtagtgttttttttttccttcagaaacatagcaagcaagcacagttgcagtatgattagcttcagagcaacaataaaccagatgctaaaccatccagaaaagatcattatatatcgcgagcaatcttggatcttgtcgagacttcaaccccatgatcgttcgcttcgctctgagcctctgacctgtcgcggttttcggtgcaagatctcgagagaagatagcataaactaaaccgccacatgcatatttgcatccgctcgtcgatcgatagcagcagtataaatcatcgtgcattcgttgcgtttgtagtgggtagaagaagattagaagacgatgatggtgagctgctcgaggatgatgata

SEQ ID NO: 4811 - DNA, 784 bp, Oryza sativa
cccataaaaaaaaactcaactttaggaggggatgtgacccctcctagtacaatgaatctggactaccatttatccagattcgttgtctcacatcccctcctaggttgagttttttttgggacgggagagtaagaatcactcatatgagaagggctcactcttaaccaaaacacagcaggggagtctcccatagtaaaaacactcaagtatcatattgtgatatagtagtaataatatttaaaactgtacaattgaactgacacatagtaacaaattacctgtagcagtataccactatacttgtatagacatgtttcatctattgcacatatatgctcattattaaccatctagcccatcgttaatctagtaccacctattttatatactgatctcaaaaaagtatcgacaatagacatatgttgtgctctcttcgtaaaaaaaacgaatctggacatacactatgtccgtgtatgtccagattcatttatagaagtgggttttttttttgacatagggagtacgagcctaaacaattctactctgatatcgatgtcccacaggcgacaacaaacgaatttgcgaagcctccatatcctgcataccataaataaatcaataggataatcccatatagtttttccccgattgaattttcgtagctgcaaacacttatttataggcagagagagagagggagagagagagctgtggcttgggcaattacgccaaagctcactgaattcgatcgcctctctctctcgttgctgccttctggcaaacc

SEQ ID NO: 4812 - DNA, 199 bp, Oryza sativa
csccstttttcsgagaacggsacgggatttctcttttgcgarmgcgcgagcgagcgaacgctaratctgcgaacacggggtttgggtccctcttcttccscgatcgcttcgggttgatctggctgatgctgcttcggcggaggccscgctgattaattgctggaggggagagagagagagagagtttgcgtcgatgcgg

SEQ ID NO: 4813 - DNA, 2000 bp, Oryza sativa
aaaaggaaaaaataaatgggtcccattcgccagtcaatataatgccatgtcatgtctgtgtggcatgccacatcaacgccacataagatcctgaagggattgtggcgatttgggacctaaatgacacactatgattaggatttggatatgcattttgagagtttaggggtctaaatgacatacctctacaagtttaaggactgtccgtacactttactcttcatattttatcatgctactgtgatttctcttaatatgtaaaacatgagatagctgcacgttataccaaagatacctttgtttgtataaaagggtaagttgatcctttacactaatacctagttgtttgatatactgtgaactatcacatgttatgtcaacttattctgaaattcgttttctttttgtgaacagttactctgccacaattagcaaggtggacatcaaaataccggacagtaccttgccacaccaaatcaggagcaagtgattggagaaatatgaagcattttcttagaagttaatgttatatagtgcctagtacttctttagttacctgcatgctattcgaagtacagctcctgttaggaagacctatgacgacttgcacatttgtgtgcctacttgggttttggttgttgccaatgtaccctactggcacatctctgtctgattctgcactttaatatctgaattactgatagaccacctcttctaaacttgccatcaaaatgagaccatacaatatcttcgttgcatggtacatttggtgatgtcacatttcttaatcatgatttaaaaaataaattggaaaattcggtttaattaatttgtgttaacttcaacagtaattgaaaaatgtcttaaaaagggtaagcataaaagaaattttaattagttaaacatatattacatgtctgtggtatataaaatggaacaccattagtgattacaaattaaatgctactcctatttttttttaagttcagctctcacatgaaagatatatagcccatacagaggtatagctctcttggatggttggactttttttagctcttttcagtttagtttccttctgttttgtggtataatgtccgggaacctgggtgatgggtgttgatataggttgcctttgtagggcgagctttttcaaagctttgagttaattaggcactaatcggcacaattttataggaactgatcgctggacagatcaacatgtttgactaattacatagtgtattgatcccaaggcagatcagatcgaaggcacacactcatatatatgcccctaattgtgtgtagcaatacaattgaactttcaaatcgatttaattagtgctgtactctcggagaaaagaaattatgtaatgctactactagcagctagtactagtactagtagctttcggcaaacagtgtatgcgtcaaattttcgattaaaaaaccttgcaatcataaatctcctgaaaaaaaaaaattaaaaaccttggtaaacttcgtcccaattaatcggattctcctggtcgatcgatctcagtatctcaatgctctgatgcgcaccgccacgcacttcattaatttcatgtctcctctaatttcctcctgaaccctaattaattaaccaaccccgattccctttttgacgttgcttaagcaaagctgactttggatttctcatttctcaacccgcatgcacgtgaatcccttctttgtttaagcattcctaggctaatcaccgactaattaattaattaattaatcatccttgattctgttaattccagtgttagagatccacgtcgtgttgatcatgtcgatgactagctgagcactgagccagtgagctctgccactcgtagtagtcgatcgccggcgatcgatcttgcctcgccggagaaggagagaagacgtcacgccggcggcggcacatgaagcggcacaacacggcggaggtgccggtgccggtgagctacggcggcaaggtggagaagacg

SEQ ID NO: 4814 - DNA, 2000 bp, Oryza sativa
aaaggaaaaaataaatgggtcccattcgccagtcaatataatgccatgtcatgtctgtgtggcatgccacatcaacgccacataagatcctgaagggattgtggcgatttgggacctaaatgacacactatgattaggatttggatatgcattttgagagtttaggggtctaaatgacatacctctacaagtttaaggactgtccgtacactttactcttcatattttatcatgctactgtgatttctcttaatatgtaaaacatgagatagctgcacgttataccaaagatacctttgtttgtataaaagggtaagttgatcctttacactaatacctagttgtttgatatactgtgaactatcacatgttatgtcaacttattctgaaattcgttttctttttgtgaacagttactctgccacaattagcaaggtggacatcaaaataccggacagtaccttgccacaccaaatcaggagcaagtgattggagaaatatgaagcattttcttagaagttaatgttatatagtgcctagtacttctttagttacctgcatgctattcgaagtacagctcctgttaggaagacctatgacgacttgcacatttgtgtgcctacttgggttttggttgttgccaatgtaccctactggcacatctctgtctgattctgcactttaatatctgaattactgatagaccacctcttctaaacttgccatcaaaatgagaccatacaatatcttcgttgcatggtacatttggtgatgtcacatttcttaatcatgatttaaaaaataaattggaaaattcggtttaattaatttgtgttaacttcaacagtaattgaaaaatgtcttaaaaagggtaagcataaaagaaattttaattagttaaacatatattacatgtctgtggtatataaaatggaacaccattagtgattacaaattaaatgctactcctatttttttttaagttcagctctcacatgaaagatatatagcccatacagaggtatagctctcttggatggttggactttttttagctcttttcagtttagtttccttctgttttgtggtataatgtccgggaacctgggtgatgggtgttgatataggttgcctttgtagggcgagctttttcaaagctttgagttaattaggcactaatcggcacaattttataggaactgatcgctggacagatcaacatgtttgactaattacatagtgtattgatcccaaggcagatcagatcgaaggcacacactcatatatatgcccctaattgtgtgtagcaatacaattgaactttcaaatcgatttaattagtgctgtactctcggagaaaagaaattatgtaatgctactactagcagctagtactagtactagtagctttcggcaaacagtgtatgcgtcaaattttcgattaaaaaaccttgcaatcataaatctcctgaaaaaaaaaaattwaaaaccttgggtaaacttcgtcccaattaatcggattctcctgggtcgatcgatctcagtatctcaatgctctgatgcgcaccgccasgcacttcattaatttcatgtctcctctaatttcctcctgaaccctaattaattaaccaaccccgattccctttttgacgttgcttaagcaaagctgactttggatttctcatttctcaacccgcatgcacgtgaatcccttctttgtttaagcattcctaggctaatcaccgactaattaattaattaattaatcatccttgattctgttaattccagtgttagagatccacgtcgtgttgatcatgtcgatgactagctgagcactgagccagtgagctctgccactcgtagtagtcgatcgccggcgatcgatcttgcctcgccggagaaggagagaagacgtcacgccggcggcggcacatgaagcggcacaacacggcggargtgccggtcccgttgagctacggcggcaagtggagaagacg

SEQ ID NO: 4815 - DNA, 2000 bp, Oryza sativa
acaagggcctagataactgatgcaacattgcagagatcgtatttatgggaaaatattaggaagatacgattgtcgcgtaacatgagggctcaatccaatccatggttttcggaatatctccttagaattggaaatggaactgaaaacactatcagagatgattacgttcgcttgcctgatgaaattgtgattgcttatggggatagtgaggattcagtacattaattgattaatcatgtgtttccctcgcttgatgatgaaaagaatgcaagctctgcatcttatatgagcacacgtgccattctatccactaaaaatgattatgtggataagctgaatgcgaatatgattgacagatttccagtgcaggccaaggtttatcatagctttgactctgttgatgatgaccctcacaatagctatcctctggattaccttaactctatcactccaaatggtctcccaccacacgagctgatagtaaaaatcaattgtcctgtgattcttcttcgcaacctcgatcctaataatgggttgtgcaacggaactagacttatggtaagagctttccaagataatgcaattgatgctgagattgttggtggacaacatgccagcaaaagggtgttcatcccacggatccctttatctccctccgatgatatatctcttcctttcaaattcaaaaggaagtaatttccaatacgtcttagtttcgcaatgaccattaacaaatcacaaggacaaaccatcccaaatgttgggatctatcttccagagcccgtgttttcacatggtcagctatatgatgcattgtcaaggggtgtgtcaaggctaacaacaaggattttggaaaagccaaagaaagaagttgaccccacagggaagagcaccaagaatatcgtgtataaagatgttcttaactggtgagcaaaggtaggttcgcatgatcaaaattaattcgaaaatatattttagaagatagtaaattgttaatccgaatgtactcaccaacttcctcttgttttgtaaagcacgtcatcactatttaggtggaatattatgtgattatcttctccataccatcatgttctagatacgtcaatttgcaccgggattggataacatgagactgtgktaayacttatgtctcactaaatatttacttttgccatcggcaaattttagtagttgttccatgtatatcttaaaagtagacgttaacaagatgaccaacaattgttatcttgttttacatggtgaaaccattaatttgatatctatatcatatcatattcatattgttatttgagtttatattcacgtctttatgctaacaaaaaaaattactaacataaaattttaaatgaattacaccgtagcgtttagcacggatatattaagtagtgttagaaagtcttacgtataaaacggatggagtagttaagatttcgctgccttcacatagagatgtagcagtccctgcgcgtaaagccaccatccccatcgctgtcgccaatttatattctttcttaatctcgacggtttttcctgtttccaactagaagcgcgtgtccctggctccccgccccgcactctaccgccgaagaagccaggaagggagtaggaggagcaggaggacagggtcagcggtccagaggcaacgcacgcgattgcggttctgccttcgcgcgaccaagtcctcgcttttaccatccgcccttgctttctactgttatatatcctcttgctatgtgctgctcttccttgttcttcttgcctactactaattcttccgatctgtccgcagaggtacgcgcagttatttctggaccttcttgatagttaaggtcgatcttggttactggaatttataaggaatcgggatttggtgtgtgtattcttggcaagttggcacgggggatgatctttgcccaattcagtttcatttgtgcgcagaaacttgcttgctgcggaatctgacccaaggagttttcgag

SEQ ID NO: 4816 - DNA, 2000 bp, Oryza sativa
attttaaatgtaagtattgtattattgtgtgtaagtacactacagcgacatcgtaactttcaatgtctaccatcatattatatgaagatttgtgcagagagaatgaatagattatatcgagattttcaatgagctgttggaatgctttgggcataatttgggacacatctctttctcttgagctaatgatggtgaagtctaaatgcctacttcacggccggtgttttatggaaatatttttgttaggggcttggaatatctggaaaatgaggaatggttatatatttgagaatatttaccattctttagcctcttggagacttgatctcctccttttgttgtttagattaaatgagagagaaagatgtaatcctaaattggactagaatgttgtaattcttttgtttttattggcctttaataaagcatttttaacagcgggggcctctcctactgtgtttctttaaagaaaagattatatcaagatttttgcagagagaaggaaaatagtctagattattgcatcgagatttgtgtggggagaaaaaaatgagagcgtatagaggttataatataggagtaattaagttaaacaattgaaattcgaatttgctaaaataatgtcgacatattttttttttgagaagggtacaactcaggacgcacactaacacacaccacaacacacgcacacacacacgtgcgcgtccctaacacacgctagtaatgagattggaagcactaggccggaaacgtgcagtcccactgaacgcgcacacgtgtatgtaacctattaggtagccgggaccaaccgaagtcagtctcgggtaaagaggggaaaaatccagttccatgttaaccaagctaatattgaaggatgcctaagcccacgccctgacacaaaatgaatatcagtgagtcaagttatctaaatgcactaaaattacatgtgtaatttaaagatttacatatataatttggggatttatattataaatatactaaaattacatatataatttagtagagacttacaataatgtaaatgcatactgactatttttggatgaaaaatatggcaccataaatgtagctactcccttgaaagttttcaactaaataaatttgtaacagataagggaaaaaggcatccatcctgaaccgttaataaacaaacctaaccatccatccatcctgaaccgttaagggaaaaaaggcagattgacaagaaaaaaaggtaggcaatatatttggcaacaataatgataaaggcaaattattaatcaagtgcctttaacacagtaccacacatgtaatagacccagggcacacagtagtacagagatgacgacgacgatgatgatggcgacgacgaggatgacgatgataattcatgagagacgacgagagagagagagagagagagagagagagagagaccgttgcccccacacatgcaatatagttaggccatgcatatgcgttagttgtcgatggatcgatcagagattattgtacttgatcgcctcttccctgcacctcaagctacctctcttcccttcgtccccccctctctctctctctcttaaataatgattccgttgcttgcttgcttcaaccccacactttatcatgcatcagattaaactgtcatctctctctcgtttggttgtaaattgggatcgttttctctctcctctcagtgcctttaaattttctttaagctttcttttctttgtttggttaagctgctagtcatactactttaatccgttattatgtgtggcttaaggcacaagcatcgaactgcctccttctgctgctgtcgtctcccgatttctgagagactgacataaccaccgcttttatagcaacagctagctgctgctgctgccgcctgcctttgccggccgtagacgatttctctcctcctcctcgtcgtcattgaggctggcagcgccggcggccgcggcgaaggtgactcgccgacggcggcggcg

SEQ ID NO: 4817 - DNA, 2000 bp, Oryza sativa
gaaatttcgcttgcgaattcgcgacgcaactgatgacgagctgggtcagtgcaagtcgccatcggatgatcaaatcgccgggttgccccccagccatgcctgatctctgaattttgctttcagcttctccgcccacaggaatcgaatcaaatcggagatgttcttgcctgcaggctggcaatggccgcaattgctgcattgcattctgcatatattcagtaggagaatgggcactgcagcccaggtgctcgggacactgttgctgtagatcggattggacattatcaggacaggaacatgacgtgttcattgtctgatgatgctactgttcttcagattttcagacccttcccctgagcagccgcgaatctaggatgaaaattaaggtggggcttgtagtaaattattattaacttctattgctaatcaaaattagatttataatttttttataaaaagagacaacatgttgtgcagtaaaaatatatatgctacaacggtttgtaggttactttttccttaacttcttctaagtaaaatatgtgcagagttttattctgcatatactcctaccgaaacactgaaaaatctatatgtacttctaaactaaatatctagtctagtttaagggaagaaaaaaaatactatcgatcaccaatcttgggaagcataattggttagtccacagcccgatatgggccagcatggcgttacgatcgtcttcctcctctagcagcaatcgtgcatccatgtattatctctccttgctgctctttgatgattctccaagctaactaacaccacagagagaagggagacatgggagttcaggttattggaggtttgggcaagtcctaagggtagattcgcccctgcccctgaggacgtcaagtcagtgggttcaggatctgaatatgatgctggtgccctttttctttatttcttttcttccttagttaactcgataatttgaacaacaaaatttgaaatttacctgaaaaaattcaaacaccaaaccatgggtggaagctggaaatacagggaagcatccggagattcagatggttttgcgctttgaggcggaatcggattgtgcgatgatcaacttggcctcttttcatgcctctgaacctacgagttcactgaatgcagccgattccggcaggtgcagatgctactactgatctggaacagtgatctccaaacgaaaagacgcttcttttttcttttcatccatatgggcaggtcaggctgtccatttcttacattcttggtgtcacttcaattcactgctgttaattacaccagcacttatgaacagtgcattgctaaattcccaattctgaatttcttcctcactttatttacaaaaccagctctgaatttctgcagcaagagcmaaagaatatgaatcacctactatcgataatgtggtagggatgaaaacggtcggaaatgataaaaaaatatcattttcttttgttatttctactatttttatagaaatggtcgaaaataggcatgaatgtttcgtatttatgaattaaactatttagtgtcaacttcaatacatcactgacataaattccaaagaaaataaaattttgaaacggtaacgatagataaagacattattattatattagttttgtgaaacggtagggaaatttccgtaatgttttcaccccggtgttgttgcctgcagctgcagtacaactacaaactgggccgcttgtcagcaaacctgagaggaaacgattgagatgggcttaaaactaggcccacatgacgacgtctccctcccaactgggcccactatgtaggcccatgggccggaccatcaagttggcccacgaggcccataaaggagaagccggaatcgcccataagtaagagtagtagtcaagagtttcggatacgcacgccacgcgcaaacccgatctctccaaccttgcgaaggcgaagcccccgtgagatctccggccgccgccgccgccgcc

SEQ ID NO: 4818 - DNA, 2000 bp, Oryza sativa
ttgcatcccgaatatttgtggaaaaaattgaatgaatagtgtattttcaaacttaattcgtgaaggagatacatgtgggtgttgatggttcttttattttccttaaaaaaaaagttttgcatgtaatgagatgtgacacgtcataattatcatgtaaatgtcacgtaaggatgaaattatcatctagaccactcgggagacgaaatgaattggttttagcattgaaagatgaaaagaagctttgtatctggttttgaattactctcttcgtcctataatataatataacaggttactctctttattgtaaaaattaaggatgtaaaaagaacgcgaagtacaattgatggtacaaaagagatggtataaactaatttaaaaatgatagacgtagaataaattagtacaaaagtgggtgggtaagtgagaaataaagaactccctccgtaaaaaaaaataaaaggccaacctagtttataccatcccgctgtctagattacttgagtagcaggggcagggtttacgattccgacgaaatccggttggatttcgcgaaatttcggcgaggctcgaaagtagaaaccatctaagatttcgaggagtgtcatccaaattcaaatttgaattgataaaaaaagaaaaaaatcttataaatactatgatattcatagaacttattgggatataaattttcgaaaaaaatgatgtattgtgtgtatttactaaaacttacatcaggaaagaaaaaaataaagaattaaaaaaagaaacaaattaccgatcggaatttctatgatttcgatcggaatttcgccaaaaccgatcggttttcgagaacttgtcggcaaactcagggatttgtattcaaaatttggtttatgaaatttgttcaggatttaccggtttttcactgtatttcatgaaattccgaattccgccggtgcccgaaacggaagggcctgtcggaatcgtaaaccctgagcaggggtcacattttctacaggttggcttttttttgggtaaatagccaaagtgatcctccaggtttcatgcaaggatcaatttagtctttaatgtttcaatctgtccatattagtccttcaagtttttaatttaattcaaacttataattgaacccacataaccaataactctcttaataaatgacacttataccccctcattcacatatataagagaaaaaattgcatgctatgaattctttttatagataatacatagcaatttatgtaaaacaaaaacaaattatgtacttgcaagtgtattcgatagccatgaggctcaagttcatatgcacatgttgaaataatgggaagtatatatgcaatgttgtttattcattttggttttcttttttctaatgtatagttgtacacaaattaagggcaaaatggatattttctaatataattgttgactagaaatagtcatatggcatattaagtgggcccaaggataattttaggccaaaacaaatacttagagcaagttcaatagtatagcccactgctaacttcaatctatagccaatctaatagctaatttatacaatagttacttactatattgttaatatatggtcccacctgtcatacacaccttgcgtcttggagtccttactgcaactggctacaaatctgtagcccgttgctcatctctctcatcgtttatcgcattaaaatatgtttataactggctaatagcctgttattatacctgctcttagaggacctatgtgaacaaaatgaaacctgaaagactaaattgagacttcggtaaaacttaagggactaaattaactattcacccctttttcttatatttaatacaaatttatttcccataatcaaggaggcgatatcgacttttttttttcccaaaaacgaatgggaggccataatcgagacggcgccgtgcggccaaaccgagctccgcagcgaagaggagtktggggttgaggaagtcggaagtccgaaggc

SEQ ID NO: 4819 - DNA, 2000 bp, Oryza sativa
ttgtattacacctagggttaaaatcttaacatcaaattcattatattttagccgtaacaaaaaaaaacaaaaaatctgacagttttaaggttgcaattttgtcagaattttatcttttttgttattctctatgtagaatgaatttgaagatgcgactttatacgtagatgtaatactattgaaaatacatgtatgaattttcctagaattttttgtgataatttttagttggtgtacacggtgtgtacacgcgagggcctgtgtgcataggatatgctcccgtggccaataataatttagtactggagtgttttacttgatcttgttgttgagattttttttatattgtttagtgtttggaaatgaatatctgcaacggtgctcacagatctatgagcaccgttgcagatattctagaataagatacgattgactgcttgtacatggtttatatggctggtgtctgttgtccgtctttaccattgaaaagaaaaagacataatacaaacggtggaacaacagcgcttgatatgttattaccaaaatgtataatacgaacattgaactttttgtcattttttttagtaacatttacagtcaacaacgtttactcagtatccttatatatagtagcaaaagtcattttgatgcccaataaatattcctcatttctcggtatgtcatttaaattaaataggtatgacaaattttcacatgcaagaaaggataagagagatagacttaaaagaaaaattttcaataggtaaaaactcacgctaactcttctttaaaatctacgtgtattgagccattccttagaaatttcataggatttgagaaactacaactctttttttgaaaggattcatataagatttgaatcttgtagaatttctcaacaaatcatttgtttcaaatagggcctgaagatgtcagtttgccctttgcagtattgttctctccaatcagttaccacaacgtttgacaactgtcacatttggcgcgagctcaataacgaagtttgagaaatcacacatgtgctcacatttactcctatttattctttcagtggtaggcgacatacccgtcgacagcgagacgtctatggtgacttcatcaatataaaaatatgccgaccgattccttcgaaggtgctcatagggatagggtgtacgtgcgtttttaagggtgggtgtgcgtgtgttgcgtgtgttctaagcacctacgtttctaactttgtactgtgtttctaaaagaaaagctagtgcactactgtaacaaatcagatcagttcatactggtgaagcctgaaaggtccaagccgcaggatcttcttcccctttgggtgacattgacgcgagcccgctgaagtctagacgttgttgcagtgccaatttgccattagcactgacccaacatatctgatcgttgcgtgcattgaccgatgccggaggcttttgtggcgttgtgggctcgttagctgctgcatcctgcatttcagcattcactgtaattatctgatcgcgccaagctcgttggatttgctcaacgtctgaaactctgaatccttgtttagaaaaaaaaaaaaacctgttgtattgcacttgtaacactgaacttcattgaaacccatcgatgattttctgttagaagactcagtcgtgtaagttcagttctaaacgggctgggcttgtaatggagagagaagccgcccagttaggcccaccaggcccatttatcgttatattccatgacaggccgggcccacgatcggctaagtacacccgagtccgagtcgatcgagtgctccgctcgtcttctccgattcggaagctggccattggcaacacgccaaaacccagcagtatataatcaccacgctgctcctccaccagcagcgaacgagcacgactgcacgagcaccaaccgtacgtgcagcaacagagatcaagcagacgagacgcgtgcaccaacgagctctccctcccctgcagctagcc

SEQ ID NO: 4820 - DNA, 2000 bp, Oryza sativa
caaaattacgtagattctagcacgaaattctgtaggtactgtaccatccaaattggaataaaagctccttggctaccaattctaaacatgtagcaccaatgcgcatagtatgcatgttattccctataaaacatcgtacccaagaatggagtaaattgaaacacatgaagataacctataatgttagacaatttcttatggttaaaaaatttatcattacggcaacgttcagattgaccaacaaagcgcactagcttcaaatgaaattattattttttgggccctaggcactccctttagccatgatactccctccgtcccacaatataagggattttgagtttttgcttgcaatgtttgaccactcgttttatttaattttttttttgcaaatataaaaaacgaaaagttgtgcttaaagtactgtggataataaagtaagtcacaaatgaaataaataataatttcaaaattttttgaataagacgagtggtcaaacattaaaagcaaaaattcaaaatcctttatattatgagacggaggagtattatgcatttggtgactacccataattattctctttttttttctagaacacaataattatgacgacccacacttctcattatgtgccaacaataatgccgtacactataatgggatccgaagaaataggaaataattacttatgggagaaggtgggcatgtttggttttttatgtttgttttttccctttgtgcgcggtatggtgggaggggatgtgcagagggcgactgtgtgaataggatgtgcagacactccacatgttaaattttaaggctgtgttcgtttccacaagaaacacggaaaatgaaatattccattagcgcataattaattaattattagctatttttttaaataaagtggatcaatatgattttttaaacaacttttatatagaaactttttgaaaaaaaacgtaccgtttaaaagtttgaaaagtgtgtgcgtggaaaacgagggagaggggttaggaatcatgagaaacgaactcagcctaagtctcaagtttgtttgtggctagaaaccaaataaacttcatggttttactattggtcctttacatattaaaggtttcttcgaaacacgtgattaagaaaacgaaggaataagaaaaaaaatatagttgtgcaatacagaaaaagaaaagaaaaaaataatcgtttgattgaacccataaaaaaaacattagaattggataagagagatagatccattcgaaacttttcatgagactgaatcttatgttaaaaaatccttcaaaacttatgtggatagagggcatttcttagaaatttcatatgatctaacaaattgttatttccaaggatcatataaaaaaaatccaatatgatatgtttttacttcgaattaaaaatggtctaattaggggttctcgagatgtgaacctgcagtgctatccttatcctctgtcccaaataattatactcgtctctatccagttcagtttttgaaaaaaaaaaagatcactatccagtcccaatcagctgctacaacatttgtcaactctcacgttctgcacaggctcaataaccagtttgtctggtgagttaattaatcagtgctgctcgaagtagactaaaggtgacatcggctggccaattgctgaaactatatcgtttaacgtattagcagaaaagataatttagaatttaaacttttacatacatattcttaattatttaagcgttaatattaaaaaagaaaactacaatgaaacaaaacctttaaaattaatctcaaaattaacttgtataagacttaaattttgatatccatgcgacataatatagtagaactagcacactaccggtagacggtagtactacaactctacaagccacagacaggaaacaggatttctcctcttgggtgacactgacacgagctaaccgaagtctagacgtcgtgctgtagcagcagttgtaccatagca

SEQ ID NO: 4821 - DNA, 2000 bp, Oryza sativa
aaacatgcccaccttctcccataagtaattatttcctatttcttcggatcccattatagtgtacggcattattgttggcacataatgagaagtgtgggtcgtcataattattgtgttctagaaaaaaaaagagaataattatgggtagtcaccaaatgcataatactcctccgtctcataatataaaggattttgaatttttgcttttaatgtttgaccactcgtcttattcaaaaaattttgaaattattatttatttcatttgtgacttactttattatccacagtactttaagcacaacttttcgttttttatatttgcaaaaaaaaaattaaataaaacgagtggtcaaacattgcaagcaaaaactcaaaatcccttatattgtgggacggagggagtatcatggctaaagggagtgcctagggcccaaaaaataataatttcatttgaagctagtgcgctttgttggtcaatctgaacgttgccgtaatgataaattttttaaccataagaaattgtctaacattataggttatcttcatgtgtttcaatttactccattcttgggtacgatgttttatagggaataacatgcatactatgcgcattggtgctacatgtttagaattggtagccaaggagcttttattccaatttggatggtacagtacctacagaatttcgtgctagaatctacgtaattttgaaaacgttatttcagttgacccttttattggcgggcgggagttggggggtttgtcccatcacatcttttttaagttcttctaagacttgttggatgtgtgtccatgagcagaggccggagatatagcccttttctattatgtaagaaaaaaaaccataatatcaaattgtagccaacattaaaaaatgggtccaggctagctatctcgttagctaaaagttgcagtcaactaaccaagtttagcaaggtgtggaggctagccatcccaagtccttcctcagtactccctccgtaaaaaaaacaaatttaaaactgaatatggtacttcttagtacaataaatctagacaaatatctatctagattcgttgtactaagatgtataaaatctagtgctagattgatttttttatcggacggaaagagtacaaatttgcaatctagtgtcaacgactgtaccatctctatgaatttgcagttttttacaacagctcaaatgaaatccaacagcttagggtattatttattaagtaggtgatagcctagtcggtgacctatttttccaacaacgctgttatagacaagagtattgtaaccgacaaccatgttgcataatattgtcagaccacacttttacaataatagatttgttatacatgagttcatggtacatgagttttgttatgtatgctaagaaaagttaacgagaaactatatacttccatagaaattggacttctgcaagactgcaacggattgtgctgaataactgaattctgagagatgggcttcggagtccgcaggtccatgttccaataaaccgagcccggtccggcccaacagtccattatcatctggcctgtcaaccctctgcaaccgggcctctcccgactcggaatctctcaaaactcggagtccgaatcgagcgaacataccttgcgatcgatcgagctcggatcgcaggtcaccccgcggccgagctccgattcggacctggctgacaaaacccagccgcatattactatataagcaccacgctgctcctccaatctctcaaccaaaccaaagcctgcagctgcagcgaacgagagcaccagcacgagagccaagcgtacgtgcagtgcagccaactgatcagactgagacagcgcgcgtacacggccgagctcctacaggctacagccatgagaagcacggcgaggcaagcggcgaccgcggcggcgttgcgctcattgtcttcctcgtgctgctctcgccgtcccctactgccgccgccacagccacaacgaga

SEQ ID NO: 4822 - DNA, 2000 bp, Oryza sativa
gtgaaatataatattacatatggactacttttgcttcacattgtggatgcccttatgacctagtcataagaataaaaaaacattaaagtctctcactctctccttccaacacaagcaaaaagcaactaaaaaacaatattcttttcctcatggaattctctttacaaaggccctactagcttagccttgctacttattacctagttaggcaatatacattgctgttgcccttaaagccactactactatggctgattctcctgtgcaggctgagcttgtagcattgcaattgacaatcgaggtcgcaaattttttgaatattgcaagtaccacctttctaacggacaacataacaattgtggacatcataaagaagagaagttttctacgagaccctggatattggagtcttagaccactgctgagccaaatgcaacgagtgatcttccgcacgacttaatgcatagtatcatttgcattccaagagaagtgaatcgattagctgataagtgataagttagctaatgatgtgagaatgcaacatttaggctgtccaatttataactgtcaaaacatctcgcatcctgcctactccagcaattaccttttttgtgcaaatgctttaaagaaccagttcagtgcaaccaattgcaccataaggaatgcactcagttttagtatggaaataaattttatgagttatatataaaaaaaagaagagaaacacacacaagacaagcttgtgacaaaaggtgttgatagctatagcacaaattcttacagttgggggcttcccctgctacgttcttttaaaagaaaaaggagcagctatagcacaaattcttaatctcatgattgattacattctttactctcggtaccgcgcgctccgattcccaattmccaggcaaacacatactccccgtcccataaaaaaacccawtwtattmctgatgtgacacattacatactcccttcattcaaaaaataataattcttagcatctctaggtagaattagtggagagtgagaatgactataataccttaatcattaaaaaaataataagagtgataggtagacagagggtattgaaggaataaacttctcgttctacgtgttgagggtagttatgatgcagaagttggttttttatgggacaaaattcaaactctagaagttaagtttttttttgaacggagggagaacctctgtccagattccctctgtcctatattcattttttcagggacggagggagtactccctccattctaaaatatagtaacctagagtaggataagaagtatactaatactaatttagacatatatcttatttatattcatattaatagaatacgtcccatccatttcaagttactactccatctgttttaggttataagacgttttgacttttataatgtgaagcttagtgagtactgtattctgagacggatggagtattagttaactttggtcctgtttagattccaactcttttcttcaaattctctacttttccgtcacatcgaatttttctacgcacaaacttccaacttctccatcacatcattctaatttcttcaaacttctaattttagcgtggagctaaacacagcctcgaaggaggaagtgtttgaaggcttgctcggctagcagtccgctacacccctcatcggggaatctccgcccgcgggccccacaattccacaccgattgacacccacagtcccacaccacctttgctgcacccacctcactcacacacttcacaggggaaggccaagtgacagtagtagtacgcagccaaaccccccaaacccctcggaaatcccccccgctctctcaaactcgctctctctgtctcccccttctccctcaccaaatcccctcctcctcctccgccgcagcattgcggcgtacggatcggccggcctcatcggccgctgcggcgcgcgccggccgtctcggtcgcgaggcggktggggcggcggc

SEQ ID NO: 4823 - DNA, 2000 bp, Oryza sativa
ctttttgtcacctattagaagtaaccgatgtagtgttcgtatctaccaatctgtaatatgtccagttctccactaatcccgtagttctaccgtccaagaatttacctagaacattgtatatacctgaaataaatggagcttttggctgatgaaccttgaccaacgagatcttcgaaggtaggctgcagttcttgaattgttgaattattattatcttcatcttcattcatctgtaactactgattcatctggtttgttattaccgatcgtaatgccgttgttttgtcaaaaaaaaaaaaggagatcggtttgttattaccgatcataatgctgttcttttataaaaaaaaaacatggatctattggcataatctttttgcgccaggtactccgaccattactcggttaccgacgaaagccggtgagatttggataaacttcgccaaaaatttaaatttccgtttgatctctcaaacgtgggctggtttaggcctgtttagttcctacacaaaaatttttcactccgtcacatcgaatgtttagacacatatatagagtactaaatattaataaaaaaaattaattacacagatcgcgtgtaaattgcgagatgaatcttttaagtctaattgctccatgaacaatgtggtgttacagtaaacatttgctaatgacagattaattaggcttaataaattcgtctcacagtttatatgtgaaatatgtaatttatttattattagtccatatttaacactttaaatatgtgaccgtatatccgatgggacacatgtaaaactttttatccctgttctaaacacaaccttgcttcacagtttcttgatctctatgggtaggggtgggcagaaaaagatcgaaccgaaagaccgaaccgaaaagaccgagaccgagaaattcagtcctaggtaatgaaagaccgaattttgttcggtcaattcggttagttttctcgggtaaccgaatagaccgaaaagaccgaattatcaaaaaatatctaaatacaatctacaacccactatgtttaataggattaaactctaatttttcacatccctacttcttttaggcatgtaacataataagagtttttactcataagtgcttacgaattttttttgtgatttttgtgttgaaagtttccactatttctttgcatatatgaaaatgttgttgaatttcggtcaggaccgagactgagaccgaatttgtcggtcctaacattttttcaccgaaattcagtcttcactttttaaagaccgaaaagaccgaaagaccgaagaccgagaccgaaattttcggttagaccgaatgcccacccctatctacgggcttgataatatcaataaccgtaattaccgagcggttgcgtgacttgctgttgcatttgtcaaccctaacatagtactacctccgtttcaggttgtaaaactttctagcattacccatgttttaacctgcaacggaggaagtaacatctatacgctgaaatcccttaaaaaaaaagaacatttatacgctggaaccgatctgaaccgtccgtccacccaccgacccaccaacggtgcgatttccaccgtccaccaaacgcgagccgcctccaccctccacctatcgagtcaaagacgacgactctaccagagcacgtggacccggtccacgaacggaacgcccctacaccgaatgggccgttgggtgtccacgcctcccacacccacaccccccttgcctttttctgcaagacacggaaaccttctggaaccgcgtggattccccgaaacgcccctgcccccacgctccacccgttcaataattctaggggtattatcgtagtttcgccacctgcccttccgccgcgctggtgtatactagggcacgcgctcctcggaatcgccacgagcccacgagccagaaaaaaaggaaaaaaagagagtcgtagttcgcctcttcttcctcctctcgttctcgcggcggcggcggag

SEQ ID NO: 4824 - DNA, 2000 bp, Oryza sativa
aacgtagttgtactaaatggcaatccccgtgaatttgtgtaggtaacgttaaacccacaccagctgatttattgctttgctaatttgctaagtaacttcctctggctataactacacgttgtttgacttttttttttatttttggtgccactttaccacattttttattggggcaattgcaaatttaccactgctttgaatcgttattgtaagactgccactagaaaattgcaaaaataccactagaactatcattcgagtggtatccttgcaaaattgaaaaaaacagtggcaaatttgcaaatgcgccttttttattagaataaatctgcaaaataaattttgttggttatggaagtaatttccaaggcaaaactatgcatgtctttttcttgaagttaagtattttccaagtttatcaatgcttgaaattttaacattaagataaatttaggggtaattacaaatttgccactgctttgaatcgttattgcaagactgccactagaaaactgcaaaaataccactaaaactatcattcaagaaaagttgagttatgttggtgtttggggggcgctgaggggggggggctcttatgggcgagcattcgcgtggctcgctcttctcctttctctttccaccttattttctttctctccaatgctccattgcacacgagaggcaccacctatcagcgcatgcaacatagcaagaagagaagtcgcgggcaagtggcctccctctagcgacgacagcagtgaccgtcttttccaacaagctttctccacctccttccggcaaactccctcatcctcactctggcaagcttcctccgatggagaagagaaggggcaggcgagtgtcctccctctagcaacgaagacagcgaatacctccctctagtgagcccctcctactccctctaaccagactgatctggcaaccaagccaactcttttctccacacccacaccctytccccccttaccattgccaccgtgcgtcctccccggcgccgaaaggcatcaacatgtcacgggccctatttggccggcctccccccgcctttgccttgtttttgcccctgccaccaaacattgtcccacmacccacaaccaaccccatggctatgggctatgacagtgttgtctgctcatatacgttggttcgccgtctcccaaatcatccttctaaatctaatccctmacttccttcttcccacatccttaaacactggcctcggattgggtcgtgatacgaccatgaagtgttcacgcgaattaggatttcctgttatgctgctaatgccggtgactccgttaccaaccaaattagtgaatcattagcccttctagataaaaacaagtatactaccttcgtcccaaattaaatgtcatacagtttgcttataaagtttgaccattcgtcttatttaaaaatttagtgtaaatataaaaagataagttctacttaaaagtatttttaataataaagtaagtcgtaaacaaaataaataataattttatattttttaagtaagacgaatagtcaaatgttataaataaaaacttaaaactataattatttttggacggaagaagcaaaacaccaaagaatatcgtagaccgaagagcatcttcctttgacgaaaattttaaaaaaggtgaagttccccgacacccgagtcgcgacgggacaaggacagggataggacgagagacggtaactcggcgactcgcgagagtggccgtaagctgccgtgtcgctgctgccacgggctccacatcgatagccatgtgccgtatgcactagtaaccgcccacccacccccttcaccccagaaacgaattcagctttgcgcccttgctcctggcccgacgtgcgtcacgctggtttataagcggggcgcgcgcgcggtgcacgggccacccaaaccaaaagcagcgcgcagacgcagagctacacaagaaaccttgagccaatagagcaacgaagcggcc

SEQ ID NO: 4825 - DNA, 2000 bp, Oryza sativa
gctcacccttgccgccgccgtgccctaggaggagatgaatggagcctgtcgcggatcggcagcttgtcggccaaccacgtgacctccgccgcctccacaggttgtcatcgtcgtcatcgcaagcctccgccgccatcgccgtcgaggtagatggcbtggggaggaggcagtagtacatgaggaggaggcagtaccgcagtagcacatgagtggggaaatttggtgtggaagagaaggaagaaggatagtagaggctgacatatgagtcctatttgtcatagatttatagtggggatggtagatggagagactgttggagcgagttactagtgtgactagctaaatcagatggagagttggctaaatgagtgtttggagagttcaatttgaagaggctgttggagatgctcttagcgtcccaaaatataacacctacaactagattggatattttacagcactacggatttaaataaacccctgcatagattcataataataataggatgtggctaattcgatctcaagatgctaaattttggtacggaggtagtgatagcttacgacatatttcctccgtttcacaatgtaaaactttctaatattgcttagattcatatatatgtctatatgaatatggacaatgctagaaagtattacattgtgaaacggagggagtacctaatagctgttatgatgcccatagttaagttaacacatgaattttgtgatccatttacaccataattaacataagtatcacaccactattttacagatcaaaaaaaattaagcaagtgcataattggctggaattatattgatgaactaattaacgaataaattccctagcttaatggagacactagtagcgtcaccattcaagattcaacaatcaatatcagcagtggaggtggagctagcgaagtgatgccagccacgtttgtttggtggcatccaggtcggcagctaaatgcatgcagctaccccaatcttcctgcaaatggtatagcaaaaccgcaaccaccaaaaccacatgcgaccacgcgagacccatgtaccggaccatcctgcaaaaacgtctggaaacaaaagactacccaaaatgagtaatcctccctccccataatataaggaattttgatattttacttgtattgtttgatcactcatctaattcaaaaaaatttgtgtaaatataaaaaacaaaaaattgtgcttaaaataatttagataataaagtaagtcacataaaaaataaataataattctaatttcttttaawtargatgaatgatcaaatatagtgtaagtaaaatatcaaaatcctttatattagaggatggagggagtagaattgaaaacaactaaagataaatatgagcaacctggtccagtaatgcacaagcaagaaaagaaaataaaaacaaaacaagagtgaacaagtcaaaatctcaacctcaactaccccaagcctagagagactagcgaactccatcagcccattttaaacgcagtttacatgtctaacatttgattatccgttttattttaatctttttataattattattttttattagatgataaaatataaatagtaatttatgcgtgacttatattttttattttttaaaaaaatttaaaataaaatgaatgaatgattaaagctagatacgaaaaactgtgtttaaaatgggacggaggtactccctcgtttcacaatgtaagtcattttaatatttctcacgtttatatgttcatattgatattaatgaatctagatagatatatatgtctagatttattaacattaatatatatgtgagaaatattagaatgacattgtaaaacgaaggaagtactcttttatctcgctcgtgcgcgttagtttcgcttcgctcgacataaataaaaagaaaattataaaaagcggaggcggctggagtgaagtgggcgagggcgcaaaccagagagaggtcacgagattatcgccggcc

SEQ ID NO: 4826 - DNA, 2000 bp, Oryza sativa
agctcggcaacgataacacgtcttctacgatttgggagctgttgtgtcgcttttgtgtttagcctagcagcgacgtcttgcgtttgggctccgctgtcgttgttagatctgtagcggtgggttttagccggttttcctttaattaaccgtgcaattgtacggtttttgggtccggtttttcttataaactgggtcaattctcttcttctaattagaaacgtggaacaaagttccgtcctaggtttcaaaaaaaaatattaagggtaaaagccatgtgaaatgttagaaatattagctgaaaacgtcgaccatatactcctaattgactgaggcagtagaggctagacataaacaatttgcagaggttggtttgcctttgaccacagcactcaaatccgggggcgccaccgggaaaataaaattcagccacaaatttcttctaatttttattttgaaattgtttcagttatcctctccctgtcaagattgtccagctaaccttccaaattatgatctactcactccagaagcttctgttgtcctgttaactgatagcatcttctcttctaatgttctgtggactgtgtttaatttagcactagcatttaatttggggcctacttgaatatcattatattatattgctaaaatttgatggtttgccatttaatttgtttgtaagttcactgaatcatgtgtaatctagatagtacwaagttagtggtaggtgtgttagctccctccaactgaagaagatgagacatgcaaggcaccctgcgtcatgtacaacccacaaagttctaattaacgttcttaactatatataaaatatcataacaataactccttaatgtgaaaggtaaatagcctctttgagtaatccacatgaagatgtgggatctgaaagacaaatgaggatgtagatctgaaaacaattgtaaataaattcataggataagaaaaagacaatgcttgatttgatactgctatggtcactagtcataagagaaaatgacttcaaagttggaatatgttttggattgtcaataggtgcttcaattggactctcagctgagccaccaaccttacaacttttgagcggctaacataatattcctttctccaaataagcaagaataaaaaccagagttcaaatacaattagaaaagattaacatttacttgctcggttttacgattccaaaaagaaaaaaaattctactatgttttctcgcatggttattacgacaacgtctaccacatcatgcatgcttttttttcattaacggtttgggtgggacaaatatactccttccgtcctcaaatataagagattttgatattttccttgtactgtttcaccattcgtcttatttaaaattttttaaaattattatttattttatttgtgacttactttattatccaaaatacttaaaccacaacttttcgttttatatttgtacaatttttttagaataagatgagtggtcaaacgttataagaaaatagtgaatattccttatattaggggacggagctagtagcatatattcgattaaggattttaagcagtgacagtgattatagaccaatccctttggaattatgataatagaaattgaattgaaaagggaaaaggtgaaggaaaagaggtgtgggtttagccgtttattgaaaggtgagatgggggtaggtaagctaatataagctctccactcctacaccaacacaacacaaactccgatcttgtttctctctctctctctcccttgtttcagtggctcagaaattttcctcttttcttattattgctttcctttatttaaggaaggagttgggctctctctctttctctgagtctgaatccccacgagacgagaaacctagcaaaaatctcgtctttcgccgcgctctccctcctctgattcctgctgttcttgatcttggatctcaattcccaaccaagaacacacagacagagaaaggaaggagaagaag

SEQ ID NO: 4827 - DNA, 2000 bp, Oryza sativa
ttttgatctgttgccatgcatcttcatggagttcagtgatgaaacttgacagtattgcttttcgtctagttatgtagaatcagcctatgagaatactaggatgtagcttcaaggcatgttttggttgattttctggggaattttaccctaattaattcctgcaaaaatttctattccaaacgtgcacttggcttccggtcacaataaccccacttatgtttttttccccctaatatatcttaaccaagagttcctgtcacgtcaaaatattttacaatatagtctaaaataaattaaaaatatttttttctataaaatgtgttacacatccttttttctttttgccttaatttgatgattttatatgttttcatatttgatttgattgtttttaatattaagaaatctataagaagtacaaatgtttcttttatatggcctagcaccgaatattcccaaatttccaatttccatcagcttccatagcggattggaataagttcgtttgttgttcctcatctttacatcgagtttatttggcatccctaaattgcaatactatactcttcactcttttatctttgcaagaccgttcaagtcaagttctaagataatatagatgtctgttttggctgatgtggcctcacatgtaagttgactcctcacctcttccctctcttccccatctctcttcctctcccctctcttccctcgcagcttgccggcggagagagggctggcagccgacgagcccatctgcatgaggtaccagtggaccacctcccacgaaccaccagtgcccgctcttctcctccgccatcacctgcatgtccagcatgcttaggtcgttcagcgtcgccacggtgtcgatcttgccatcttgggcaggcatgacatgctttgtgagtgcgccatggcggtggaggcctcccatcaccgccctgctcgtgtgccccatccttcatggtcgagggcttgccacgccgaggtaccaatcttcgtcgccgatagaggcatggggtttgttcagattgatgtcatttcaaaccatacaatttttttttgatagagttgttagatatgtgcatccatttagtttcttgtcaaactttggtaaatacacaagaaaacctacaaaaaatttgacaatattgccaaattaccaaaaattgataaggtttattttggctacaatctaaacaaccccatcgagccaaaggcaccggggcacgttgcgtggtgggtgatcgtccagaacttgagcggtcactcctccaacctcatgatgtagaacctgcaaagtagaggagagaggagatcaaaggaagtaggaatatttcgccaaatcaagtactagaattagagatgcagagggcatatactactcccttgacgttgttgatttttaatcaacgttgatcattcgtcttattcaatatttttaagaaaatataaaaatatttaagtcatccttaaagaatattcaatgataaatcaactcacaataaaataagtaataattacattttctttaataagacgaatggtcaaatgtatctcaaaaggtcaatggtatcatacataacctatgaaaaccttagaatcattttttttctgactacgatgcctcctgctgccttatgatctggtttgaatggttttgcaaaaatcatttattgtactgcagtttaggaatgccaactgaaaatcgacgtaaagctgagggacagcaagtggacttattcctagcggatcacagattattgaaggcccgtgacttccccgagaaaaggcccagcagcaacttagtcaagggccactacggcctcgccggcttctaggttcgtgtagatgcttctagaaccacaggatcccttaaatactctccctcctcttccatctcgcgtcctcttggaaacccctccaaaccctagccgcctctcgtttcttctcgtcctctccacgcccccgagatctcaggagcacaggaggaggaagcc

SEQ ID NO: 4828 - DNA, 835 bp, Oryza sativa
aagataatcttctgatttttaaaatataagcattcgcattcaggattccaatgggcaagaattcaagcattctaatcaatcaggtgcttatacggtgaatccagacaattcgaaatttgaccggaattcttttttcttatcctttatctttgctaaacatcataggaacatttacatttagagcgatgctggggatccacttaatttaagtggctccgacttgacgtacgactgatctaaacggcaatttacgctcagtctgtgtttagttccacactaaaattagaagtttaaaaaaataggaatgatgtgatggaaaagttgaaaatttgcgtacgtaggaaagttcgatgtgataaaaaaattagaagtttgaaaaaaaagttgaaatctaaacagggcctccgtagtgcgcgtgttcgtgctcgtgcaatcaagttggatcgagttgggagttggagttgacagttcgtcactagctcgatcgctagtcgtcgccgtgtgtgtaatgccatggtgctccttgatcggacgccggctagtagctagccagcagcgtgtgtggcgaacaacctaatctttttccttcgcacgggcggccggctgacggcgacgagccgccgacgacgaggaggacgactttgacgcccgcgtgtggtgtggaccagggcaccaacagcagtggtggtttatgcgttgccaactactgacgagatgctatataagcagcagcaatggccatcgcttcagctgcacggacaaattaagcgagggagtgagagctagctaactcaggctcagccaactgatcgcgagctgtgacgaggtgatcacc

SEQ ID NO: 4829 - DNA, 1284 bp, Oryza sativa
ggaaaaaaaggcgaaaaggcgcggacgcagcgttcctgccgcgatcctgtgcaatcgaggatgtggatggacacaagcgacggtttgctgtttgcattgatctctctcccgttgttcttgccgttaggtggcgcctagcgagctacggttggagctagctagccatccacgcaagcagcctagtatgagatatacggagcatgtgtgtgcgcaagcctgcaaggccatccagccgcagccatgccttttgttgacacactgaaaccgagatgttgaccatcagctgctgttattactactagcacactgctagttgcacatctttctcctttttagctgaagatttggtgcagctcgtactttggtaaaatgccttcctgatcccgcagaaagcgagcggattcggggtaaagctcgatgctgctgtagattctccccatctgcatgctctaacgaaaggttggtcaagatacggaaacgggagaggatctggatttcttttggttaactacctgatctcatctccctaaaaaagctagttagcgactctaagattggattatagtacgtacatttgggccttccctcgagttaacacgcctaaagaactcatctagaaagttcatcgcacatggcagcaccaggacggggagccggccgggcggcgtacatacgtcgccttagatcccatttgccaatttggatcatatcgatcaaagtgaactaacccagccagaatgcaagaggagaagtgagatcttgttatctctgaacctcttgtcgttggttcagtatgatataaattcaggccgatcactcgatccccgatttgtttcccttttttcttttgcgattggagtacggatctagttgggcgtggctagctgcctgcctggcttagctgtaattccgaattctgcaccggccatcatatgctggggcgggcgagtcaggcgcgaccgcgcgagatgtgcatgagtcgtggcgcgtcacgggagttgtttattcagggggggcggccgtgttgtgctcctgcgtcactcagctttttctctctcctatcctcctcggtctccccccctttcccactttgtcagttcgtcactccaccaccgcctctctctccccgcctctcgcctataaataccgcccccctcgcctcgccaccaacactcacctcaccatcatctcttctcctcgtgctcgtcactcgcgagcaaatacatcgccatctctcctcctcctccttgtcgtcatagtgcacgcaaagaaacacggtttgca

SEQ ID NO: 4830 - DNA, 2000 bp, Oryza sativa
agataaaaatctagttttttcctctttctcatgcaaatttaagtttgaattactgtatctatagcttcttttgaattatagtctgttctttttgaagtactagaaggagagctgatagtatttcattgaacaggaggatcaaaaacattttttaagaaaaaaaagtatttatagtgcttaatatttactctgttaaatttgagcaagtttaaactcatttagttttgtggacacaatcttgccgacatttttgggttatctgcaactgctttgcacttgggggcaaaacttttggatatttttctttacacttctcagaataaagcacccaacttggtgtagctattgccctattatcctataataaagatgacaaagctaacataatattctaatgattttatttatctactccctaagagggaccccaagtcatgtgactttttgtcaccatatatgtaatgtatactggatagtgggcatatgattcacacactgcacacctgtccccatgatctgtgtatgatcakgkggcttaattaaacmcaaagactttattaatgccttaatatggctgcgaaataaaccttttccccatgagatacttgtggctgatattkgttyckgtattcatyctycttttkggtttttgagatgactattwakgtatttwataattccagaatgaatcacatccgagtcagccatgtgattttcctgcttgtctgaaatcgatgtcttgtgttcgtagtgttcgtagcagcatgtttgtgaaaattcaactatgtatacataggatctcattcacttgtgtgattgttcatcgtcaacgaatcaacaatcgaccatacaacagattgtacggtggcttggctgtgtatgtagaaatcggatttttatccattacctaaaaataatgcacgattgctgcatagtacacctgagtacctaacagaaaattgagtaatctttctgttgctggagagattatattgagcatattgatttttcactggtttatggctgaaatgctggaagtcaagtgctgcggcgaccggcacccgagcagtttgtctcatgtgctgctgactagatattgatcatacctatccacgaaagatttcagttcccaacacctatatctttaagaggattagacttatgagacaagatcagtcctaattatatatatgttttaccttctaataacctgttttatagctaggattggtcataattatatatatatattacttcctaatcacctattttagtcacaacttcctccgtcacatgtttatttttcaaccaaccttatatacgaattcaaaagaaaaaaaatagaatacatcactttatcaaatcctgatgtaatcattcttcactttatctacccgtcttttgattttagaaactccgatgtaataattatttaaaaataaatttatcttggaacaaatctaggaataaaaaagtatgagtaggagtcaatatatactccctcccataaaaaagaaaaaaaacttatatagctgtgaatccggataaattcgtttttttatggaacggaggagtttgtatgtgacatgacaataatagtactatctttgtcacagttagtagtatctgaaagtaaattcgcttatatagttttatttaaggaaaaaaaagaactgaacaaggtccacaaagaaaagaaaggacgtgcctatatatagagtaccaacttgacctgaaagaccggacctactctgaagtagtacgcgccgctaccctgcctcttcttccttcccactaccaaacccgaccaaatattgtattgctggctcgctgcttgggaagataaaagtaaatctttctttgtattttccttcactggtttgattctttgcttgtttgggatcatgtttaggtttcttgttggatttgggtactgatctcgttaggtttcttggcccgtttccaggtgcggctctgaagggggaatttcgtcgaacagg

SEQ ID NO: 4831 - DNA, 2000 bp, Oryza sativa
ggttcctgcaaggttcaaaagatatcaataatgaacacaaatgaaagcagaagaaagtcatacgatagcctaaaataactgtacaaacacagagataatcatagcaatgcattagtgtcctccattgtgaaaaggtgcttgcaattaacagaacaaaatgaatttgaggcatcaaatatctaactacttgacctaaatccaagtttagtgccaacatcattttccatttcatatgaaattgtgtgtatgtagctctccaccttctcatatggcctatatttgcagatttgttctgttcgtgtaaatcctagtgtgaaccttaactgaaacttttgggacacatttaacctcagtttctgtgctgaattgactagcataggctattattctgcatcaacaagttcgtccttcacatttattgtcctaggtgtgacgattaaaggatgacaccacttttatcctagaatcataatacgctatggagcaaacttgtttggccatctctattattccatgcataaatattaagtaaggagcacatccagcaaatgataacagataaacccttcttttcctagaagagaacacgaaaggtaattgctgtctgttcatccaaattctaattccccatggttctgacttctgcatgaacctccaaacatcagttcaccaacgaagctaaaaaatcaagtacaacagttacagctcccaacaatagcgcctgacaatacttaaggactgaccatccagaggatgaaaatggacacaactgatatgaacttgttcagccaatctccattattccaggcaccacgactaaaaataaaggagaaaatccagcatctgataactcctcttatcctttaagatgacgcaataaggggaaattgttacttgttatccaaattctagtccccactgcttgtatagacgccttaaaatgtcaattcacatagaaatggagcaccaatacaacagtaatgatgaccaacaatcagcatccaactagactaacaggactgatctatcgcctcacctgctggcacaactagcggatactggcatggcaacactgggcgtcttaccacgattcagacccatttctaccacatgaacaaatctatcgaccgcagatgagtcaaagcgcagatgagtcaaagcgagcgagagagacagagagagagaggcgtcaacatctcaccttgtccccgacgtacggcagcttgggcccctcgggcgcgcggaggtcggggtcggggtcgccgcagcacgagtggtagtagtccccgcccatcgagagctcgaccgacacggagtccgagcaccctccaccacctcctcccccaccgccgctagggttaggattcaacccctcccccccccytcytcctcccccctcgaagaacgggttcgggggccgcggctgccgccgccgcctcccccatcaccgcctcctccgggaccgtcgccgcggcgtcgccctccccgccgccgtccgccgccttgcgcttccgggcgctcgcgtcggccgcctcccgcgccagcttcgcgtgtgtgggggcttcgattcggtggagctttccgcttctctcccctctccccgcggtgcgtgttcttctcttccgagatctcggcgaaggcgagaaataagtgcgcgtttttttcccctcgcggataagccctctgataaattcgtttttacgtttagatcctcagagtggaggccgtaagggtcactgacaggtgggtccaggaagagatgggcccacgtgtcataaggagaaagtgaaccgcgggtgagttattacgcgtttccgattggttagcccccccacccctaccggtttcctcacgccaccgctcgatctggataagcgtcgatgacatggtggggcccaaatagccacggggcccacattctgacgagcttatatacgctctccactccggcgtggaggcggcggcggccgatcagatccagtgcttctcgcggcgaggcg

SEQ ID NO: 4832 - DNA, 195 bp, Oryza sativa
  misc_feature (1)...(195): n = A,T,C or G
gggtgggcctttaatttmaaattccaaatnaacgcctttcattacaaattccaaatcaataaaacgaagacattttgttccggcttcccagctgagtggctcttgtcagtcaaccaactgaagcccgtgcacccccacgcgttcacactcgctctaatcatctccgcaatcgcgacggccctgcgacctccgccc

SEQ ID NO: 4833 - DNA, 2000 bp, Oryza sativa
gcgccgcatcaccacgcgcgattgcgtggcaagctagctagcgaccgctccgccaccgttcgtcaatcgtcacagcctcccccgcccacgacggcgacgcctcgtcgcgcgcctccagatttttcttttttacccttccccaccgctcgcgcgcgcgagagccagccagaatcaatcgcgagggttaggccggctgcgcgaracgcggggggcccctgggccctggcktggcgagacgagacgagataaggcagcgcaaccraggtgggattagcggatagggcttaccacttcccgacaccacccgcgaacgcgcgcgcggtgattccgttccacttgcgttactaccgggccctgcgagggcaactaggcaggcatgcaggcaggcggctgtccggatcaccggagaaacccacccgttgtttttctcctcccgtttattttctttcgctctctaatagtctaatctcgcgtacgtcgctgtcgctaaaaatcccgggggcggcgcgacgttgcgcgtggtgtagcggaactgcgtgcacagcacaggcacagcaaacaattctcggtgtggtcatgatgcctagtactactatagtaatccttcccggtcccggcgtttagcaatgaacttgacacgacgccgctagttcggcagcaagcacgttcacgcgccgtccggctcgctggacttgacgtgtggcgccggccggcggccgcgcggctgctcgatcgcgggatcgatccgttcgttcatggaggcaggccgaacccggtctgaccttagcttggccgcggcggcttctgctcctgacgccgtgacgcgtgcacactcttcggcaataatgagcctccgagtctccgacgtgtggccaggaggagagaaaaccgtagcgttcagagacggcacccggctcgccgcaaagcgtatacagcttcacgggacgcggcacatcaacctgttcagtggcgcgactccacgggcggcacgcgcgcgatacctgcgctgagccctacacgtgtgcgactgcgtggagaggagacagtgctaaccgaaataaaaaccgtgctactagtagtagcagtagtgaaattgaaatatggaaacatgattgcacagagcgtgtttactactcttattgctactagtacgtgtgtttgtagaagaccggcggaaagtgtgaggagggtgacaaggggaatccggaatccccaaatccaagcgcacggatttttggaggtcatgtgggcccaatttgttggcacaggtgtccgtagaactataacagctcggtcttttgttgcttgcgtgtacagtactactagtagtaaatttgtaatggtcgtgtcatgtcgttcttgttttacttcctgtgaagttgggcaaaacccgacgaaggatttttgctggtttccctggtgcagattgcagaacgaagcaacagtttccatgtcgtatagtggagtactaagcagttcgttagccaaacgaagttgaactaagcatgacgacggttgagataaacctccacacaaacaggcaattcccacaaacagcctcatccctttacctcggccaacataaaaaggatactgcatccgatgtggcattcttacccgaaacagagtctcccaaaataaaacaaaccatatcatctactggtagattagtctcaaaagagctaatctactcaattttacacgtcacagagtcaaaaaaaaaactagaaaaagccaaactgaaagaaacataaaccatagccgtgcaagcaacggggcccacataaaccccccaaaaaaatcacgcaatccatccatccctccatccgcagtccgttcccttctttccccttgtataagtagcggatgccactcccgccactctgccttacacaaaacacatcaaacacaccaagctcagacaagagaagagaagagaagccaagaaatcatcatcatctcacgcatttcttgctcgaattccagctcgattgagcatc

SEQ ID NO: 4834 - DNA, 2000 bp, Oryza sativa
tagttttagacttttagccgatcacttttctacgtaagctaggctcaaacatggacaagatgaaatttggaatatgaggaactagtttcttgttttgtgcttattcacccaaaaccaaaataaataaacctatgaattgtctatataaattaaggtacataaacatgagaatctttgtgtcaattgaaaattagaacacctcataatcgtaacacataaaacaaaatccatactaagcctttacttagtagtataaattaaaaaaaatgcatgaaaaactcacctacaaacataatctttcgtaggagaaaactagtctagaaatgtaagacgaagaaacgactttcactacacattcaaacgtgctagtttattttgcaccatgccgtacaggcgtacaagagcccacgtgctagtttattttgtacccatcactataaaatcgatgtaaaaatatggctaaaattaactttgaaagtgaagtttggcttagatttttagtggcacacaaaataagacgagtcactcgcacatgattaattggatattgattattccaaacttgaaaaaaaagtttattttcctttttttgaaaaaaaaatggcaacgcttattagtttgggaaacatgcatatggtaaacgagcggtagcaacatgcaaacccattttcaaactccggcttagtgggccacaagtctgcccacttgcatccctaacttttttgcattatgatagaaaagtttttttcctaaaaaatcaaaaccacaaatcagtaagaaattttcacctaaaacataaatactccatggtatattgtccaatataaatgatcaacagcagaaccatacttaaaaagaaattttacatataacgatataaagagaatctgcctatttcgtgatggaaagatacaaaccttcatgtaagtctatcaagttcagcacaataattttgatgccagcccatactcctgttttatctacaacgactataatttaggtatatcattgcttcgtaagaaaactttgccttcttctcactgtacttctttattaccacgcacttttcttccttagttttatttacagagctggacgttgccattactatctcattgccttgacagcctacctatctccttaattataacgggagggaaaccctctcttgatcttcactcaatcaccttccaattcacactacttaattaacttaggccccgtttgatctctcttttgggagttggatttttgttgcacgcaaaatgagaaacctcattagcacatgattaattaaatattaacgatcataaatttgaaaattgaattatttgctttttttaaaacaacttgtatatataaactttttttgaaaaaaaatacactatttaaccgtttgaaaatcgtgctaacgaaaaataaggaagttgaagaatagaactgagccttagtgtcaccgatcatttcccattcacaactttgctgattttgtttttattttagtatcgttacaggtgctaataatgctgcagattattgtttagaaaaatactgacttaatctcactatggtattttctgacgaaatagtttgggagagcagtataactgatttttctttatccctttgcatgcctaatctgattcataatctatattctttttctccacgtgactgaaatgccctccgtacttaaaccaccaaacccgaagaccaacctatctacgagaccaaccaccaaatccaccaaccgaaaccgctcacccgttagcccgttaagatcgcgcccagtacaagttgccccacccgcctccacgaaacggagttcgccgacgagccgaccgttgcgtccgcgtgttgcgactccgccgagccctagtttccgccgccgccgccgccgcgccctcgccgccacccccaccgatctcgatccccccaccccgcgggcaaatcgccgccgaatccggcctcggatccgcggaatccgggccgggtcagcc

SEQ ID NO: 4835 - DNA, 2000 bp, Oryza sativa
ttacctaccaaggagcctaaaccagtataatccttgtcttttgtttgcttgatgtcgtactacgtagatcctcgtatcaacggaccccaataccctctatatccggtctacgagtatcccccgtcgacactaacatactagttctgtaatgtgttaatcaattagaaatgaagggagtaaagaccaacaaagaattatcatcttctcatttagatcaatctcataaatacaatacatggatccagtgtaattagacaattttagggtgaaagattaaaacagacgaatttaggaaagatgtgctagttaattttgcttatcaatatacgccttgtattatgaaaggttatgcccaatattttaaataggagtatattttaggataaatttttaatgtcataaattaattcctaatccctctagttacatagtacatagttcttgacgtgttgggtaagattaaggttaaacttttatacaactttaattataaataactttcaaaataaagtaaaggcactagaatagcgtactatatagatttatcaaataaaatactattaataaaataaaaatgtatgtatttattatatatattacagtagaaaaggtataataaaagtatattttggagaccgtactattatttagaaagttaaaaattatgaaaccggccgagtgagaatatttcagaagtgacctcagattctaggttgtgttcttttcttctctgaagataaagattaagttttttacgtaaaacgagatagtattaacgtatgattgattgagttttaattattacaaacttgaaaaatatattaatatgatattttagagcaactttcatttagaaattttttgcacgaaaacaccatttagcagtttgaaaagcgtgtcataagaatcctaatcttcattcaactctggttggagaaaagaacgggaggcacacggatgttgctatttataactatcgaatggacagtacagtaaatatgagataataatagtaagacggttcaacgcatcgtggtccatcgagacgtgagacggaggccgtaatacggcgagtagtaattgtcatcgctgcaagattcatcgcttggcaccaccgcatgtttcatttccaaggacagtagtaaatgaaatttgcagtgttcagatctgcgaggagtcgcctatggccagccgttccttcagatcttggtgaggccgcaggtgacgtttatgatgcacggtacgcttctgatgtcctaagaagaataaaaagccaacaaaattgacggcgtcctattgcaaagaatctgatctgacgctttatatgtagattgattttctgcccaaaaacagggcaattggtggcacggagatccgtctcttcctaaacgtgaaattctgtcccctttccagtgactcaagttcacgggtagttgatgaaggcttgaagaatgagtaacccattcaatgccaaatgcaaaagtgtgtaatgtgaccaataggttcatgtaagaacaatgccgatctgagtttttatatatatcgccaacgaccttcacagctcacacgatcttttctccatcgttattcttgcttcttggctgctttatttgcacttgcatcgcttcttcttttttagtaactcagagcttcagacttcatccgtgtgattcactgaaccaatcagcctcctttgtttttgtccattccatgcatttaatttcccccacaataatctcatctaacatttccttgtgccctcttaaattctgttttcccatgctataaataagtaggcagactttctaccactctccaccagtaccaccactaaaaattaaagtgagctaagccaacactttggcggcagaaacttgcagctaagcattgtccctcctcatctgcaaaggcagaggagatacattctctcgtcctctttcgcttgatatcaagttatcaacagtgctctcctatccgtgagccgtgcacaactgcacacg

SEQ ID NO: 4836 - DNA, 1399 bp, Oryza sativa
  misc_feature (1)...(1399): n = A,T,C or G
tysgggggttttttttttycytttngggnaaaaaaaawtttggggggggggaaatttttttttttttttnrrawakggktttaargggktkaaawtttggtttttttttttttttttaamaaaaraamttygsatygtwtyrggggggtttttycaaaaaaaaaaaaaaaacaaatgctcccaggctccctgctttgcctggtcgatcggccgggagactgcctgtgttttcctcgtccttcctcctctagctgtaagcctgtaacctcgctgtaaagaggagcctgtgttcttcatcagagtctggaccgtgaagccattatccactctgaacagttagcccttcaattctactcccaatatttactgatgggatggtccagaaaataaactcccgcactgcgcgcaataacttttcaatggagttgcaaaagtctgctgcaacttaattttgcaacagtagttgcaatttacagctagctcgttgcgatgacagtgcttagacttgaagcataaatgtccaaaagaatttcaatcgagatgatggatcattggaccccctatatattacactggacctgtagatacataatgagcatatagggaagtaagtaaagtggccgccccccctatatgcgttttcgctctgcctaaatgcatcagactacattcagctagtcaggattccctgaacgggttgcatgtgcatgtttcttctcttcttcctttgctcggaagtctgtctatgtcatcttgatgaaccctagctagtgtataacaagcaagcagggttgtgtcgccgacatgcataaagcttttttggacatgcgggcctgcaggccgcagtaagaacgagccggcatggtctcatataaaatctgaactaaccttttgagataagaaatctgaagtagctagcacgaacggtcttcacttctgctaaacaaacaccggaagagatcaactaacagagacggcattattagtttaagtgattccaagtgttctccggatcaatcatattaatttagcccttcttgatgcatgtcctgcgtaattagcacatcacattcagctttctgctttctatacacccagttaggtcgaatcacacaacatgcagctaccaggatatatattataccaacacaaaataatcagatgatcagatggggcctacaagatacctatatataacagcaaagcggtagtgcactcaagtgtgagcaaagccatgctgtagtgggatctctctccatccattcctgcagtgccgccactgctatagctgcgagagctatagctagaaaaatatcaacgtaggaagtgggaggagaagtagatgatggatacagatcacactgagataattaaggagggagaggcagtagtggaagcc

SEQ ID NO: 4837 - DNA, 2000 bp, Oryza sativa
acgggatgagacgtcactttccgagagaacacggattgactggaagtttacaattaggattgctcctcattgatgtggtaatataatatatttgtcaatttatatgaatcatatgatggtgacattgtgttttgaaaagttgcttacactatgagtgagtccagtagtaataccagggcgctctatcttgtaatgaaaagcgagttcctgtcaacttcagaaatctataaaagcgagctaattaagatcaccatcatatgattcatatatgaagcctctgttcattacaggtggactattctagggtttacaaaatcttatggttatcacacagttatcgcgattatgacgtacggtaaccttatcagtttttgaaaccacaatataccttacgatatccgtgctgttatcacgataaacatcaaactataaggtgatggtaagcccatccaaaacggtttgataaattctagcctatttatggtccaactagtatgaatcctcttttctttcttttcaatcttgtgtttctccttaatctgcgcccttctgtattgaaacttcggttattgtacatttattttgttgtctaatctacctggagtatactcacatgtactagccaaaaccaacttattttgttgagtaattatctcagcttatactagctagccaaaagcaaattcatgactcttatccatgctttatttattgcatcacccgatcttgttagcataaaattcattttcagctgatgttggagtgtcccagctctccttttctcttatgtctagactttagagtgctttattatttcatttccttttttttcttactggagtgtctcttttccaaaacacggcagaccttatttggatagcgaattcgagtcatcatgacctataaagtcaaatgcaaatatagccaaaaccaactttatggcatgatagacatgtatacaacacaacaagtatagtagtattacgtacttaaaaaaaatctaaacaacaaaggaaaaaaacaaagaaaggaagtgatttttagcgtagctgtgtttgtagcgtaattgcgtaaagtcctttcaattttgctatatctcactcgaaagattttttcttatctctcactcgattttctcactcaaatttacagtgtattttcttgtaagttacagtgtaatttatgaaacttacactgtaacttttgtaagttacactgtaatttttgaatcttcacatgtaaattttaaattttgtattggatttggtctttttcttgaggatatggtaatttaatgttcattatggtgtttcttaattgctttttgctttttattatatctatcggattttaatacaaagattaaaaatctgtgtgatacgattataaaaatctttcgaaagatgtataggtactcccaagcccttttaagaaagtttttcaagacaaaagtttttggatgaaaggtagttatagggaaaaaggaatgtgcgtttatgtttatttgcattgcttattagcaaccaaaaactaatctataagtaaatcttttatatacgtgcgcttaataattcaaaagcaaattcatgtaaaataaaatgcgatgaagaaactttaaaaagttatcaaatttagattttattaaattttagtttacaagagcgctacgatgaaggctttaaaaagatgggaaaataaaacctttgacctttctggacttcaccaaacagctcacgctttcggcttcgtgccgtctcgtcccgtgctactgctaccccctcctgaccccacccgccactccacgctcccttctcctccccttcccgtgacacacagtccccactccaccgcctccgtataagtatcccttccttaccgccggccagccacagccaccgcctccccaacccamcccgatcccctccccgccgtacgggcgcagaaggaacccgtcttctagaaggaggaggagggctacctctctctctctctcttctgcc

SEQ ID NO: 4838 - DNA, 2000 bp, Oryza sativa
tacgccaagacacgccgccggatatcgatttcagggataggcatggctattcccctacggtgtccggataccgtcaggagatacgaaagcgctatctctgatctcgccgagcacggattcgaggaggaagactaccctgttgtcgactacaagtcagaccttcagaccgatatgtcgacaacacttagataggctaccacaacatacaagcctacatgcgccaagacacgccgccggatatcgatttcagggataggcatggctattcccctatggtgtttccggataccgtcaggagatacgaaagcgctatctctgatctcgccgagcacggattcgaggaggaagactaccctgttgtcgactacgagtcagaccttcagaccgatatgtcgacaacacttagataggctacccacatattgtactggtgtgattatggtgaataagagcaataccggcttcggctaacaggatgtagagttattacctgacaactcaggggcccgaacctgtataaaaatccttgtctctatctcttttacctcagtctcgcgtatatcctagcatcggcgatccccatactatccaaataccgtagtcgagacatcaaacgtcgacacaatgaatcatttctcgcccggccgtgagttatctttcaatagcagtttagtgagccaaatgagttatggccggtctccatctccgtcgagtcttccatataattagttatctttcaatagcagtttagtgagccaaatcatttgtggccggtctccatctccatcgaatcttccatataattaaaaaccaatgcatttcttaagaaaaaaaacgatgtatatatttataaaagcacttcctattttgtatgtagagtaggagcagtactctctcctcgtttcattatattataagtcgttaaattctttaagttttattaagtttatgaaaaaaatataacaacatctgcatcaccaaattaacctcactaaatataccattagatatattttgatgttatgtttatcttatgttaaaaaaaacattgctattttttcatataaagttgttaaatttcaaaggtactaagacatgraaaaaagtcaaaacgagttatcgagtactacctccatcctataatagatgtttkgatttttkgttkgcaacgtttgaccattcgttttgtttgaaaaattagtgcaaatataaaacatgataagtcatacttaaagtatgtttgataataaagcaaatcacaaacaaaataaataatagttctattttttaataagataaataatcaaacattaaaaaaactcaaagggatgggacggaggtagtatattattttcagggaagtttaggaagaaaaagaggaggagtattatttagagagatggaattaggcaggcgccattcccgcaatgaatagttaaatatctcatgattattagctactccacagcgttagcttcgtccacccaatttgactttccaatgcattgtgatttgagcgagttgtgagaaagagagagacactctagcgagtagtactactccccttgtttcattatattatactgtaatataagttgttttgaccttttaagttaaatttctttaaattttattaagtttatgataaaaatatataaatgtatcattagatatattttgatgttatgtttgtcttatgttaaaaaaacattgctataaacttagttaaatttaaaagtacgaaggcatagaaaaaagtcaaaacgagttataatatgaaacagatatagtatattatttataaggatgttaagaaaaaaaatacttgttggagtattatttagagcgaaatggaattaggcaggcgccattccccgaatgattattagctactccacagcgttagcttcgtccacccaatttgactttccaatccattgtgatttgagcgagttgtgagagagagagagagagagagagagacactctagcgcgcagcc

SEQ ID NO: 4839 - DNA, 2000 bp, Oryza sativa
tttttttcctcttcattttttttttggcsctgattccgtctctagagtactactcctagaggcaagaaaaagttctgttgggagttgcagtaaaaatgaagtgactccatctataaaaataaaataaaataatgaagtgacttgagaaaggaggccggaatgcattttgtcatgtcttattgattatttggctttaatttgaagccttagaaaacaaatgaggcaaagaaaaataatgtcaggataggacttaaaaatcatgattttaaaaaaacaaaacgataaaaaaaggtctagcagaatttagattttggttacggcttacaatttttttttctatcctagcccagggtgggaatttgttggaatgtttttttttcttaattaatgctgataacaataattcctagcccaaggaatttattcatgtgaaaataatgtacaattaggccctgggctgtttcaggaacgtgttgaaaataatgtacagttccagatgtttcaactttcaagttagattcaaattcctagcccaaggaatatctaatctaacgtggctacgtagaaattgacatcgtcaagctccaaaaatggtaaacttggtgattctggtcggctaataattgagacagagagcaacaacatcaacaaggcattcttttgtttttcttaaaaagaaaaatcatattcagggacccaaaactatagacaagatcattgcatttgggattaacaaaagcaatagaaaaataaaatcagggaaggtgatgaggaggccaacctttaatacagtcgagccaccagtttcctgccctcctcctcgcatccatttctgcagcacattgctgaaccccaccacgaacagctcaagtacacagtcacgagaactcgtggaaaaaccgggctaaatccaacgcctctcctgagtagaaaaccgctaccgctcggcatcttccttcttgtttgattcgtgagcagttgggttcagccttccgggctcagttcagtctggtgagatttctcttctcctgcctttttctcttcttctggtgcccaattcggttcttcagagaatcctctgctttggccctgtagatctgccttggcttgatcgtagtaaaccttttcctctctgtttttatctttcttgcaaagaatgtaagatttcagtctgctgcattttgcagagagacgagaaaagggctttccttttggcgtgttcttgattcttgctttcctcacctttctgcgctcacaaatgacatgttgacattttactggaacgaggtaggccgattgatatgtgctaccactttgtttatgcaacctctcggaaggaatacatcaacaggcacagcttttgctcaactagagtgatgctgtttaatttagaagaaagaaaaggctccatttgccatttctctcttttttttggtggcccctttcatgtgctctcatctgatcaaacacttgtttattgtgaaagggaacgctagatctgtagtgtgttgcatgattattggccttagtggagggttaggcaggattgatggttttaatgccataggaaggagctctccatggctttagctttcgtagttaagcagacaaattcctgtgtgtggcacacaatagtgttaagtgtccatttgaggggaggttgatggagaagggtgtggactgttgaggccatttcttgatgtttagttttcttgactgaaaccaaaccattgattgacttgcctacttttaaatatcttaatcaggtaattagtttgttgttgggcactacatctcctttggttggttgggtgaatctttacctcctagtccaatcatggaatgatagttggtttcatgaatgcacctttgaatttatcagatttttttttctcctttgcagatgtgaatggaagtttcatcactattccaaggttgctattttgattaactatagcttgtggcagtatttggccatcttgcctgataaataaccagtc

SEQ ID NO: 4840 - DNA, 2000 bp, Oryza sativa
agcttctgcaagtgttttgccccccaaaactttcagatttgcaatcatcggattgccttgggatttgagcatgaagagaaaaaaattgctatagaaagaaatttttacacatgtcacgcgtaagatcctagtgctaatcagccaaaccatagttaaatacaagttttatagttaaatacaagttttatataacttatattgtagtatagttacaatgcaattacagtatagatacagtggcttcaattatactataattatatctagaagtttttcactaaaaaacttgtagcagttttttaaaatatctatatacctaactaaaaaatacataaggattccggtattttttgtccatcacttttttaaggttaaggttttcgcccttttttttttcctttttaccgttcctccactttttttttcctttttccacccacctttcttttctccttttccgttttcttttcttttttttcgtctgttttttatttttttaggggtgttttttcctttttctccattctgtcttgatctattgtatctgtttttttttatcaaaatctaagcgaatccataaagctcgatataaacggtgacttttaagtagagattagatcctataaattaaagcagaattgaaaggaaaaaaaacatgggaaaaatcatggagtagtagtgaggaatctatttttgcaatcaattgaaggagggaacacattaggaggcagatcgaacgtgacagccaaaaaacggagagaaaaaagaccgaagaaaaaaaagaaaaaatggcgaaaaaaaagaaaatacactcttccggggtttgaagacggcagtcagctagctatacgagttgagcctatagctcccattgtgcgctatgtcaaagagaggtaggctaagcacagagatgacgtactaggctgggattgaaaaggaaggaataaatgagtttttctgttcgatcctccaaaattggttgagggtttttgatacacttgatctactgtttcctttttatcaaaatttaagcaactccataaaactcgggatataaacggtgacttctaaatagagattagttcccataaattaaagcggaattgaaaagaaaaatcatggggaaaaatgatggagtagtagtggggaattgatttttgcaataaggacggaacacattagaggcagatcgaacgtgacggcgaaaaaaaaagagagagtgaaaagaccgacgagaaaaaaaaggaagaacgacaaaaaaaatagaaaagacactcttacggggattgaagattgaagacggcagtcagctagctatgcgagttgagcctatagctctcattgtgggctatgtcaaagaaaggtaggccaagcaaagagataaggcactgggctgggttagaaaaggaaggaataaatgaggttttgaccaaaaaccaaggagtataatgtatagttatccaaaaatatttttatccattgttgaagacagttgtgggctatgctagctgggtctacagcttcacctgtgggctagatcaaagagaggtagcgggctgggttaggactgaaatggaacgaataaatgagcttttggtctaaagcaaatagtataatgtatacgatccaaaaatatttttacctgttgcaacgcacgggtattttttttaagtatctaataaaataaataaaacactatctcggcatcggaaaactaagcccaggtatcgatcttccatgagtcaaaaggccaccttacctccctagctaggtactatactagtctacccttctcaaccaaaccaaacttaaccaaacctccctcgatagaccatgacaacaaccactcctacaaacaaaacccaccccacccacaaattaaacacaccaccctcaatatatatcatcatcatcatcccccaattcccaacaccgcgacgtgcttcctataaattaactccccccgatcctcctcccaaccattccacaccttggcaatc

SEQ ID NO: 4841 - DNA, 2000 bp, Oryza sativa
gggtttgttcaaacccaagggttcccaacctctcaccgtcatattccacgcgcacgctttttaaactgctaaaatgtacgttttttaaaaaagtttatatataaaagttattttaaaaaaatcatattgatctattttttaaaaaaatagttaatatttaattaatcacgtgttaatgatctgctccgtttttcgtgttgggtgagcagcaagcacacccatttggcccattagccaattggcccatgaatgaattggacttcatgtcttcgtgaaccggtagaggtggaagtagagtggagtacattaatgattaaatatggatactttctaccggaagcattaaataagcctgccacacagttactgcgaatattattaggtgttgttttgattcagatacttaattttagtctatacatttagatactaatttaaagtattaaatataaactagttataaaactaattatataaataaaaactaatttgcgagacaaaatttttaagcctaattaatccataattagagaatatttaccgtaacatcatataggctaattatagattaattaggctcaatagattcgtctcgtgaattagtataagattatggatgtgttttattaattgtctatgtttaatatttataattagtgtccaaatatcttatgtgatagagacttgaaaattttagtctcatctaaatagggtcttacgctgtaaaaagaatgaactgattttaatttttactcatggtcacattatatttttacgtaatacttcctccatccacaaaagttacttagttttatcacaaagattaagaagaaattaaatcgtcttggatgatacaaaatccaaccaataagtatttagatgactccttggttctaatcaaatgtttaatttatctcttcatttaatttaagtcttcaatgcataaagactaaaataggaacaacttatttagaaaaacttaaatataaaatatgtgtaacttttgtggatggagggagtatttgaaaataaaggtgaatgagtactctctccgtctaaaaaataaactcaacctcgtaagggtgtgtttagttcacgcgaaaattagaagtttggttaaaattggaacgatgtgacggaaaagttgaaattctatgtgtgtagaaaagttttgatgtgatgaaaaagttaaaagtttccaaattttttttgaaagttgagtatttttttttaacggagggaataatgttgtgcagtaaaacccgtcagactgctgtgtggactgttgtcccgtggttcagtcaaagatgccatttataaacccttgccttaaaatatggagggatgtgtagctcagctcctggagctgacaactccgttagaatagtgcaggtatgtgaagaagacttgtatggccaaacgtaagggttagggtatgtactcctgagggttagagtaaagatggaagctttgccgtgacaacatttgcggaatgtatcaccgcgttaggttttgaagctgggaagggccgagggcagcgattttggttggtagtagtacgggacggcggcgaaaaaaaagraagcmaaagcagtgctcccgstcgccgcgctcggtttcgacttccaaaggcaccgccgcggcggcagcttccccgtctttattaccccaccacgccatcccttttttttcacactcccgccacgcctcccaacgcccccgaaatctcgtgtccctacgtgccggagcagctgcgagcttttgcacccacgctgtgagccccacccgcgtacgccgcggcctacgccgcactccactccaccccaccctactgcgccgcgccgtttcaaacccgttcctttcgtttcaccgttcccaccacgcacccctctatttatccccgcccccaacaacctcgctgcactccacactccacgcctccgcccgctctcgtcgcagcgcaccccgtcgcgtgcgacgactccatccccgtcacaaca

SEQ ID NO: 4842 - DNA, 768 bp, Oryza sativa
  misc_feature (1)...(768): n = A,T,C or G
ttawtttktttttttttgngagakgargccctmcggggggggscwyayatnntttttttgtggrrraattatttttgtwsccacccccgcsycycccccctttttttttttkgkktawwatytccccccccccttttwwaaaraaaaarrrgrnrtymtctctctccycytttttttktgnttrtngagaranacaacmccaaaaaaaawttttttttttttaaaaanggttntaaaacnccccmaaaaaawttttttttttnaaaaaccgttttttttttttwgraggatttwtwtwaaaargagwtwwtttwkkgnssccccctatttkgaaaaaccccnaaaaawawwtmyytkkgtycctttttaaamgggtttaaaatccccccccyyataaaaaaatttgngsaaaatayagggggkyccgggrccccaatttcccccccnggggtaaaaaarggscsygtttwaaaaacgggggttcccccgaaaaaaytsgggggaaaattttttcmcccattttttttytaggraaaatcttwwaaaaaawwtgcggggggragrraaaaaaarggsgktttttgcyctttraaccccccttttttttwaaaccccytttttttmcsgggraaaaargggggctggccatcgatcgctggagagcacagcggagggagatcgaacaagagacgaatagccagcaaaataattaaagaggtagctggagagaaggagagagagagagagagagatcgacgagctagctag

SEQ ID NO: 4843 - DNA, 2000 bp, Oryza sativa
ggtttttyccttactatgcttctgcaggcaatgcggctctttgtgggagagcctgtctggacgccgtacaaccgtccccatgaccatctgccagctaggtatctgttctttctgttccttgttttcctctttatctctggcttatttttccggttattgttgactcagtggaggttttgcataatttcagaaaggagtatgtcgaaaaaattatcaacaggggtggaactcaagctgtcgaagctcgttaaaggcatatcaagatgtgcttcctagttcggtgttctgttacactctacagatactgaataaactgtgctatcagctgttgcaatgggctcctaccgacatcttacatcatttggcagtattttgcacaaacccgcttaaaatctccctgaaaatacgcacgtcaccatgtcagagtgtttatatacaataatgacacttcagtccacagtcagcaagggactaatgacaatcattgtacttgtggtgtgtgtgatgaaaccacaatgatcaaaccgagtgtctgaatctctgaattgttttttttagcacaatgattgtgtaccaaaccctctgttgctgtgtgcggtggctggctcacctgatggcctttgtgctactcctgtcgtcttcaaagtatctgacggtgctgaccaaaatctttgaaatgatagtgctaatgctgttgattaccgaaaagttggggcacattgatggcagataacctagtactgtgggtttctatggaccagagaactgcaaggaagattgtattgtatgctagtgagattgaacacgttcatgtgtacttttggttgccacttgcccagttgcgagtccggccaacggtggaacaactattttcaggtcagagcagaacgcgctccgatggatcatcaattcatcattccactttttttttgtgaggcagcaaattttgcttgtgtgtgtagtgcgaaagcctcacactagtatatcaaccaatgagtagcaaatgaaaatatcttggacagctagttttcgattggttgcagaatttggggtttcaacaacttgtttctattctttattttggtttaatactccctcattccctaaatgtttgacaccgttgacttttttaaatatgtttgaccgttcgttttattcaaaaacttttgtgatatgtgtaaaactatatgtatacataaaaatatatttaacaataaatcaaatgatagaaaaagaattaacaattacttaaattttttgagtaagacgaacggtcaaacatttttaaaaaagttaacggcgttgggatggaggtagtaccatataactattgggtaagacctgttatagtttcggaaaaccattacactcaatttaaattcaaactttttatatcgtgtctggtagaatcatttttttttcaccaatgtttgaattcaaatattcctgtttgatttgaatgtttacccaataaactccggtaaagaacaaaaacagcacgtgagtcccacgtgagattgaaaaggaattcagataagctaagaaaaaacccagagagaaaaaaagaacaaacctttttttttctcctgacccctgcaatgaatatcatctagccggacgagatcgtgtgtgccaatcaccgagcgcggcaaacaaattctgtgacccaaacgcaaaagcgtcgtcgaggccggatgagattcggatcagaaaaaaggaaaaggaaaaaaaaggaaaaaaaatggcacgagccgtcgatgtcagctatcgattccggcatcccacttgcggccgtgccggcgaacctcagccacactcccaggcttcgccttccggaagcttccgccgatccggccgcggccacgaaccgcgcggtctagaaccttccattcctctcctggccagtacacggttgtttatattgcgccactctcgctgactcgctcgctgccaagctcgccggattcttttcttggattggagcagattggggggtgacg

SEQ ID NO: 4844 - DNA, 2000 bp, Oryza sativa
aaaggtaaactctagctacgaatctgaatacgtgaattatgctttttcttttagacggaggggtatcttatagctttattgtcaagaaattgatttaaatgtaataacaactagagtatattcgaagagtctctatgttggtttgcccggctagaaactgaaaatcaagtattaatttgatgggggaaaaatcctacacttctcatttggatgacttatcatttggatgacttatgagttctgtttataaccattgcaactaaagaaacatcataaatacttctatagttcaatgagaagtatgactaggatttgagtttaaactaaaaattaaaatacatgttcaatagaaagagctatgaaaaccatattctttagagctatttcctctgtttcacaatgtaagtcattctagtatttcgcatatttatattgatattaatgaatctagacatatatatctatctaaattcattaacattaatatgaatgttggaaatgctagaataacttaaattgtgaaacggatgaagtacatgacaagtacaactatgctagtatcttttaagtgaaaatgctttgcatatgaccattactatcgtatatatgaccacggcgaaggcgtattggacgtccgcgagttgacctttttgggctgtgatccgaatctaaatctcattgggtcttccaaaatcctagttacaaccgtggctaattaccatgtccggccgtgcgcgtccgtggaattaacaacaaacagattccgtgtgtgcatggaatcatcgtcttacatgagattttaatgggtcttcttcagtgctaattttcaattcttttcttagtttcttctattcatcagtacattgtataagtctgttaagacaaattgtttgtatattacagctgtgagagtataagtgggttttcacatgctattggaatgcttatggtcctcaattaatcatgcatagcttaattgttgacataagcacaatcgataattgataagctagttatatgaactgatattggtggttatactacataaaagagtaaaaaaaaaagaatttgctttacctagttatgtgaattgatcttgataacatctgctacactgtaaataatactagaatgttgagatcaagttgacagtcagtggattcagaatttcagattgacctaaagcttcggcagaaacagcatgtagttgtggccatgttgacatgatatggtgggtttggacttgtagatgggcatatgtacgtactcatagaggcaccatacctttgtcactgacaggtagactcagggttcatcggacccacatgttagtgacaaagacacatatctttaaaggtagaggagcctgatccggagtgttacgggcttatggcgcaggtccgatctagagcatcacttcacaccgtcgcccttcaccgtcggatcatttcgacagacgtatagcaggtctcatttttccataactgtaattgcactggaaattcgtatagtggcactggaaaaatactaatcataaaaatttttcaaataagacgaatggttaaacgttgaatataaatagtgcaaaactgtacttattttgggacggagggagtacttattctttttcatgctgtactgtaacaggagccgttcctacggctacgagcgaatgcagcgccagacgcagacggtccatctgtcccacactcactgtcgtccgggccccaattccccccccgctccgcgccaacgccggtggggcccagaccaccgccagatagccccctccgttcgtttggccctccgccttcccggattgggattatgcagtcgactgcaccgtgtgccattgtactgacatgtgggcccgcgcggcgcacgagacacacgccgccctcctccttccagttcactccamtccgctactttttccaaccgtcgccccaagcgaaccccgacgccgggccccccttccccagcctccgcatccgattccc

SEQ ID NO: 4845 - DNA, 2000 bp, Oryza sativa
taaattttattttaaaatagtgcattatttgaaaataatagtgcaaagtaaagagtacaccggtttaagttatatgatggtagattctttgttgtaaaattatgattatttaaaaaaatatatccattatatatatatatatatatggtagaaagaagaaaaagggaaaaaaggaaggaagcgtatttactaccatgtaggtacgtatatactccacctgccaatgcgcgggagagggataggtggggcccatggtatttagtttgttttaagatcgattttatctaacggtgtataatattggacccaccaatttaagtgaaaatcaagggatagatgttttgcttttttttcttagaatttctaggattttctctattttattagagcgccacgtggcggcttgagagcgtttgtaggaagttttatggtcttttagtatataatataatataagaaagatagatagatttccactacctgtctttccttttccatttctctccaaatattttatttcagattttatgtactgagatttattctataaaaataattttgtggtgatgaatttctctgaagaatgatctccacatgcatgtttaattttggatgactatttaacaacccctagcatatatacgatccatctaaagaaaatcgtcaatgtataggttcttttttcctctcttgtactccaactttaattgtagttttagctcagcaattaatggagctagctttaccatctccataatttcccagctgactgatgaactataatttctcaaatataaattagtaaatttcacaaaattgcatataatttgattgatatattgcaaaagatatgtatcacaaaactatgatttatcaccaatttttcaaggaaactatataattaaggcattgcaaactatagattaagcataattttatcagaaaactacagttttttgtaactttagaaaaaacaattgtgctacggacctataatctaaaatatgtaattcattgataacttcctcactaaatctatttttttatacaatgacttaaatttataattttacaataaatttgatattaaatttgtagttctgtgatttatataattaaatctgtagttttcgatagtttggtcaaatgtttgtagttttgtatattttagtcaatataacgagacagcggaagttttacttacgagtttcgacctatggagtaattagaaatgcatataaattgaaccgacaaataagttagtagatacaaattctgtcatgtttcctagctagcatcatgtaatataaaacattatgctttttttaaccattctggcgtaatataatatacaaaacttctactccaccttacatcacaaataactaacttacaagatttagacatgacaaaaattcaactacatcacaccccaattggacacacataatttatgcaaaacactgacgacattacagaacatgcactacaataaaatctgcatgattggtctaaaaattcccctttttcactcaggcagttaaggaaagaaatagaaaatggaaaaaaaataagaaaaagacagaggaatcgaaggaaaaaagaagggcgcagtgggcggagagcgagacgcagagagacgaatgaaaccaacccaaacaaaaacaatcagaagcagacgaacagcgccacggaattcatcgaaaaaaaaattatcgtgctcgccgaaagccggccgctttgagaccatccaagaaccgcgaatccttcctcccttcgacgaccttaatttcctctgccatttgagcccgccaaaggtcgccgtttcttggctctctctctttttttttttctctaggagagattttccattttttgtggccaagaaaagggttcgattttttttgggggttttctcgtgttcttgggttcgcaggcggctccggtttcggattttttggtaggagagttggttggtttccggcgagggggggagcagg

SEQ ID NO: 4846 - DNA, 2000 bp, Oryza sativa
cgtctctctctcatggctaaacaaacatccctagaggccagcatgacagcttagtgctaatacgtgctagctttggtagtacaaaactataaggagagtagtgacagtgacatagcataaacatatatgggcaccgaataattaaatctgccggaaaaaaaaatgtgcgagtggccgtcgccgtcaggaaattgccatcatccgtgacccatcgtgcggctcatgcgcgccgcgtcggtctcaccaaagggaggagacttaaactaaacccgcgactatttccacgggaagtgctaccctgtgtgaggctgacatgtggggtcccaaaagattgacccacgaagtctgtgtaaaagcgcgtagcaaatgggtgaagagcagggtcggaatctcgagcagccgcaggtcgccgcatctgaacctctggttactccagttgggccgaggttttgtcactgagatgtggggtcaactattccggatggcccactgtcagtgactgttaagacagaatcgacagatgaaacaaaaagaaagggaggactcgcaaatttcttcgcgccacgcacggtcgcctagccaccggtcaccgacacgtggggtcaactcgtggggcccactcacgcgagtccttaccctacctgctgctgcgtttcgccgcatcggaacaggtcagccacgtggggccccgcgccaaaggcgtgacgtgacgtcctcccgccccgcaccgccacgtcagccggatgcggcgttccagcgccgcgaggagtctccacgtgcgcgcgggggtcgccggtcgccgggccggaggagccaccaccaaccaccgtgatgagcgcgcgcggggcccacatcgccatggtcgagtcgccgccgatcgtcaacgcaggctgcgtcgcatggtggtccagcaaggtcacatgcatgcgtggatgaatctagccgtgaaacatggctgcgaatatgcgataggtgctgcaaaaattgtgcatggtgctgcccatgtgaaacatggagatgcgaatctcctgtcaggaaaatgaaatcccgtcaaattgtttgaatgtgaaaaaagcttttaaagtaacctcgaactgtgtaattagagaaaaaaacatagtagatgctggtcgtatcatccgttctctctccgagcagtattgtatcacccgtaaataaagtacggaatatgtttaatactagctttcgtagagaaaatttctccgtcacagtttcgtcaagacattttaaagaattattctacctgctggccaccttgccataaacgaaagttgaccaaactttgagtatatattcataaacaaatcaccaccataattaaatcaacggaatcacaactaatcaatgctagtgagatcagcgagccgtaaacctatatacaacaaacagatccacggctcggaatctccatggcctgtatttaccaccaagactccgggacccagcaagtgggccccaccacatgacatccccgaacccccggtcccacctgcatgcatgacatccccaaggcccgggcccaccacatgacacatccaaagccacgtgggccccacctgccaggtgcgcgccctacatattttgacggctcagatgcggcccaggcccacgccaaaacagctgacgtcatccatgacaaaatacaaccccaagcccccctaccccacatccgaccgcccacacgtcccccctgccccctcccgatgcgcgacacgtgtcaaacccctcctctccggtcaaccgcacctcaccgggctgccgcgcggcccagcccagcaacttgcacgtgcgtcacggcgacgcctcctaccccaaccagtcgacacgtgtcccccctcgcgccctctatatataggcccccccacggcggggtaatgttccattccaaaactttcgaaagcttccattagcgactaatccagccttcgttaagggtgattagaatttgattaatttcaaggcctcagatcggagattga

SEQ ID NO: 4847 - DNA, 2000 bp, Oryza sativa
tttataagtttgagctctaccaaatagtcacttaggttgtgttcgttagatggggttgagagttaatctcccgtgcacggaaaacagagtggtttattagcatatgattagttaagttaactctttttattagttattagcatatgatttattagtatttttctaaaaaaggaataatatgatttttaaagctctttttctaaaaaagaacttttgcaaaaaaaatgcattatttaggagtcgaggcagttggctgggtctgtattatttgtggatctcacgtcgctaattttaagttttaaacataggaaactgtgtttgtaagggaacttgttgagcatttggattgggttagtggatcatctcgatctgtgctgaatcctgaagtggactcgcttcctctcctcagtttgtttaacctttcgcctgtattaatttcagtacaaaaataacatggggaccaaacggtgccttggcttgccaggcatgcaacacggataattttcaagttttaattaactctgttcaacaataatagtactacgtagtacaggggcttggttggtgagatgcagtgtccactgtccagttcaatttgtagttgtgttttgacttgaacggtgtctttttctaaggccaaactctggaaggccgtagcactgaaatcccaagatccaacctggttacattatgtcatgttttcacactgataatagtacctgattagactatcaagacactattagttagaacggggaaatctcttgcgttttgtttggatttgcagtaattttgtacggttcatctagtaggagtacaagtgctagaatcttggggggcctaggctaagcataagaactttctgctctgtgctgtgctgccaagtgcaaagtgcaatgagatgatgaacagtggcagccattgaggctgaagtgaggttggggatccggccatcttatccggacaatctgtatggaggtgactgccaactaactgcgcaagtggggtagtgtcctggtgtggccatcgacattgaccagctagctagctcacccccaattcctggaatatatcagcattactgtacaccattagtacttagctgcgcttgcatttcggtacacctgtacaaaaaaatcaattagtttctcgcacttgctcgcacgaaaacgatatgctcccaagtgagagtcagtgctgccatccaaagctccaggaattgactagtgagctgcccacgtcgcggcatcaatgtcacaccacctccctaaccataaccaacctgactatcaccaaccacgtactagtactaatgacgtagtgtaatcatgagccccatttaggtagtagtactaagcgtgtaatagtatggtttgatagcgagagccacttctgacgaatgatgcttgcgccgctggtgctcgtgggggcggtgggccagctgcttgattctgaaggtcacttctattggaacggtaacataattttatattggataattttttcaaattttatgttattatttaagtaaaaaaaggatcacacagctgataatcagccataagagtgttcaaatcatcagattacaaatttaatttaaacagttttcccggtttgtgtgctgtgctcgcatgcatctgttgttttgggccgactggttgtgcagacagaactcggcccaactaatggcccatttaagttcacatgggttattacacgaaactcaaagcccataatcatccaattcaaaggccctcgtttttcgcttatgcttataacttatcaactaaaatttgaattttcaatcttaaatttgaagctgattttgaggttttctcatcgaagtttatttttcaacctttgcttttaaatcgctaagaacaagtatataaaagttttattcacaaattacttttcgtttgcaaaataacgatggctccaatgtactaacgcatggtttccttccaatgatggacggacagggcatgttcttgctgacg

SEQ ID NO: 4848 - DNA, 2000 bp, Oryza sativa
tccttggccgtctcttcgaccttggccttgccctgcttcgactgctcgtgcacctcggcgcccctctcgccggccgcctcggcggcctccttggtcttgtgcttggcctgctccgctctcctggtcgcctcgccggcggcgcccttcgccgcctccttcgtcttctcctttgcctgctcagccttgctcgacgcgcccgacgccagtcagcctccagccgcctccttcgcgtccccggccttcttgctcgtctgcctccctgcctctgcacagtcgcgcgcacacacacacacacacacacacacacccacatgttaattagctccaacacacgatggcatcaggcatggcaagatgccgccggcragcgcgcgcggcggcgcgcggcgagtttcgacgtaccggaggcggtgtgctgggcggacttggcggcgtggccggccttgcgcgcggcgtcctcctcctcgtcgacgtcggcgacgtggtgcttcagcccgagcccctcggtgatcttctccttggcccagcccgtccacgactcgtcctccttgctcgccgcgtcctccgtgccagcctccgccttcgtcgccacggcggccgccgccaccacagcaaacagcagcagcagcagcgtcaccgccagcctcctcgaccgcgacacgatcgccattgctcgtgacgtacgtgaactcctccaaacaagaacagataatcgctttcgcgtgctagagaatacgagaagtcgcgaacccaacagtgcggtgatcacgctggggtttatggggttttatgggggagatgggtgaggacgcgtggagaggttggcgatggcgaggcgggtggccgcgcgacgggtgtccgtctcgggtggcacgtcgtccgccgcgggctggcacgtacgcagcgcgagtagaagcttttttgggttgggcaacttggaatttggatgatgaagagggttctaggcgtttcggctcgacccctttgacgttgcgtgtcgcggaggaggcagcacgtgtggtccgattttgggtcggccggtgtccgatggtgtgatggttttggtttggtatctcctttggttgccaacgcacgcagggagatggtatggtagtagtaaagaaatggagcatgttgaagcatgtttgtcgtcatggagcatcgtcagcacatcacggcaccaggctagaaaagtgattcgtatcactcgatcgtaaatcgtaatattagatatcttaatcttaattattttaatattttatttgttttatattataaatcgctttgaattttcttaagttcaacttcttcaagtatgattaagtttatgaaaaaatttagtaatatctacaacacaaaattagtttcgttcaaactaacatttaatatttaatcttttttataatatgtttgttttgtgtcaaaaatattgctaaattttctataaatttgagtaaatttaacataagtttgattaggaaaaatattcaaaatgacttataatatgaaaaagagagtagttgatatcttgacttcctagttcctaactatcgaaataattggggttaagattttcggtattgatatggaagtagttcaagtgaacttattccgctgggctagggggaagtaggacggcccggttcgttcagtccgtatcagcccagattccattgtggggccgaagttgtacattttatgatgggccgtgccccctgataagttgggccaaattctaactagcccatttctcctccaacaaaaaaagctggtccaaaacgtgacacggcgcgaggccgaccgaccgaacctgactgcgaagcgtgccgaactcagctactcctattacccaccgcggtagaaagatctgccacgagttgccgtgtccacgttccactcttctcttctcccgattttactcccaactttttttttcctctctctctctctctcgattttctcatctccactgctccacgcttccagggaagaacgtagaa

SEQ ID NO: 4849 - DNA, 2000 bp, Oryza sativa
gattggacgagcatatatatggtaagaactttctaaaatccgtatggattcgaatgaggatgtggtatttgaagtatccaagctaatgcgttctaacatggttttgaatctcctgttttcttttttaaaagtttccatcatattactctactgatttggctggaactggtttgttttatttggttgcatagatggtcgatgataataatggcaatatcaaagaactttaggccctatttagttccaaaaacttttcgcaaaaacatcacatcgaatctttggatatatatatatatatggagcattaaatatagattaaagaaaaactaattgcacagttaggggggaaatcgtgagatgaatcttttgagcctaattagtccatgattagccataagtgctacagtaactgacaagtgctaatgacggcttaattaggctcaaaagattcgtctcgcagtttccaggtgagttatgaaattagttttttcattcgtgtccgaaaaccccttctgacatccgtgtgacacctgaaaatttttatttcaccaactaaacaggcccttagcatgacaatgtgaacgcttgttctcgttgcaatgacatcatttttccgcttattaagtaaattgaattattgcattaggacataattatttttactacctaggcagagcaccatcactattaacgtaatttaatattttatttattagtatttttctaagtataatacatttttgcatcgaaatcttagattgttagataactgctatggatatatgacaccaatggtaaaagctcagccgggcacacttgtcgtgccatcgtctgacgcctctgtcaagtgtcaacgacaacacctcactgatcgagctcaaggacgaagacagcccatgcatggtaagcttcatcatctctgtgatgcggcagtgacatggcatcccttctggctctcaagtggtggcccacgctagctctaacctctaataagtagtattatcttcgttccgaaataagtttattttcactcctcttatatatctgaaaataagttcattttaaagtaattgttttattggagtttgcaaaagtagaaaataaatgcattaggagtagataaagtgataaataattgcattgaaatttgataaagtaggggtattctaatctttttggttttgtattggtatgtgtgggatggataaaaagtaaacttattttagagcggagggcatacgtatgagaatgtatctctagtttctaaggtaaatatctagctgaacttacattttggatagctttcaccaagctactaataattaaattctcataagaattgaaaaggaaaagattaagggtttgttcatttttctatcacattcaacactattatttttttatattactaaattttgataggatatataataaactaaacatatccttgtcattgtcactctaccaaaatttggtatttctggaagtttcttttcatacgaacactattaaatgttggtaaggctacaaattaaacaccaaagtatgccaaaatttagcattgtcaaattttagtaacgttaatttcggcaataaactgaatacgccctaaaaacaaaaatatatagtcaaatgagctaatcattgacgcatatagaagtccaacacaaaccaccttaccatcaatcaatttttaatcatttgaaaagtagaagtcttcagctgatgaattcctcatcccctcttgcctcttggcactttcacacacaacatatatatacaaacgtgcctatatatactaatcacaacccccagtgctcctgcaacagccagcatttgtccaattggcattcttaactccaaaaacctgcaaccttcttggagagcttgaccatcatcagctagttctcccaagtgccaaccctatcctctgatcacaattcacaaaaacccccatggttggcaggatgctttcttccccagagcctacactgtcaacc

SEQ ID NO: 4850 - DNA, 2000 bp, Oryza sativa
gagtccacttcttaaactgtcaaatgctagtgtaaaagttctcgttcacgaaaaagttagtgtaaataaaataaattcattttaagtttataaaatcaatattatattagttaattaatattatattagttatatgttaatggattgccttatttttgtgtgccgctcaaaatccatcctctctttcaaacatagcctaaggttgtacttgatactccgtctgcccatcttctactttcttttttttattagtatacactttctaaaattgctaaatggttatatatgaaaaaaactttaaaagtattttaatcttttttcaagtttttagttggtacctgattaattagataggtgctaatgagttatttcattttatgtgcacggcttaattaaaagatcccatctcttctcagctgaacgcagccttaagtgtgttcgctgacatatattctcaaggaggtggagaacacgagtgaatttatagtctcgatgctatctttcttgtgttacaaatgggcttggatcttcatattgtatagttttcatgtgtaccatgggaaatattaacatggaaaaaaccatgtcacaaatactatagtttcgtaggaaaaaatatacagtgcatgtagtgaaaacctgaaaactgtcgttagatctcatgcatccatttttaaatctaacgttagttttcaggtttgcattacatatacactacatatttttcctagtttcatatgcttaaagtggtcatctataaaagtacatattattattatttcgtcatgtttgtcccaaatgtggtagaacgaatgaacttttatggcattacgtctgcaggtaagcattacgtaccaccccaaatgtgtatagaaggaaaggaatatacatgtcgtcatactacaagcaaatgcttttattcttctttacttataattagcttgccaattatctcgctgatgacaatgcaagtttgctaccgaccttgtgtttgcaacgtgttaagtttgcatattgtttgagagttctatagtacaagtaacacataaccctttttctcaccatcaaggatgtctttatttgggggtcgtgaaatggcagcgtataaattctgaaacggagatagtagcattttacgttatccacgattagtttcctacgatatccatcaataaaacccatgttaacaagtgtacatataaccatcacataatttcctaaatttcgtaggatactatcaaaatcaagtaagctatctatgatatcgcaaatcagacggaaactttactggttaacatagcccataatattagccacatacaccattcatcataaaaaaatatttttaggaacgaacttagacaattatttgtctagtttcatcgttagaatttatcttttcttgggacgaaagggtgtacatgctttccacttcatctgaaacactttccttttttaaaatttttaatgtttattacaattggatactacctccgtcccaaaatatagcaacttttgattatgaatctgtacacaaagctgtccaaattcatagctaaaaatgtttatattatgggagtaggccatttacgactataatgtataaatttatatggaaatttatagtccgctttggcaccttggcaccagggtttcccttaccgtcggtaaccgcgcggttaccgcggttactgggcttactgcgggggtacgaatataaataccgtggtaatctccttaaattcaaataaaattaaaaaataatttaaatttttgataaatgttatacggtttttcacggttattgcggttcacgaaaccgtgcttgacaccttccatccaaagccacccctctccatctcgggctccgcagcagtaaccgctcattaactttccgctataaataagcggcgtcttcctcctagacgaggccgcaaccaccaaagccgaggaggagatcacgagacgagagagaggcagagcaatcgaagccccacgcc

SEQ ID NO: 4851 - DNA, 2000 bp, Oryza sativa
ctttttagtatcagagtgagctgcgtgctcgagacatctggccatgcttcatggtcgtaattatctaactaaaatgcgactgaatggtgggatgtgggtgcatggttttgttggtcgcacccttggcagttaaggaccggttcgcgggatgccctggaagaacttatcgtacttaccacaagccagcgtgggcaacggctgggcttgtagtgtagctttcctctagtcgacgcatccaggcaagggtgggcgtgatggagtttgtgatgggccctgcgacggcctatgcggcttccggattcacctaagcacgagaggggactgcccgttgcccgctggggacgggggtgaaacctgaaggtgtggtgtgcttggctagaagggggttatgcgaagggtcctgtcacggcctctttccggtatgtcgtggtggcatgtcggcgtacggaaacgtgtcttggggctgtgtcttgtgggtacagttgtacacctctgatcagagtaaaactattcgaatagccgtgcccgcggttatgggcggtcgaccagattcaccgtgattagtcccatcttaataaatcgacccaatacactgtagttcaggtgggttggttgggcctgttcaacgtggtgtagcgttgatcagtggagatttaatgttactttaattactcaacagttttactgtcttgctaaataaaatgttttacaaccgcctttatgcaaatagccacaaaccatccttgtatccccttgcacgtctgcatcgttggtgtggcttgctgagtacggtggttgtactcagccttgctattattcccccttttcagaagtgtggtgcttctgagctgaagacgaagttagaagaccaaggctcagaccccagttgagttttgcctgtggagtggagctgaagccccgctaggatcgccttttttccgctgctgctgcttttgtttcggtgtgaggactaagtgcctcttctgtaagtattttgcgctttatttacgtttggaactgtttattacttgtcgttttgtgtaccctggctggtcctggacagggatttaatacacaaaatagtctggaaatttgggctaaatttctgggcgtgacatccaactaccgtgacggtggcaagcattcgtcgacacccccctacctcgatggacctcaacaatggtggttgtcgatgaggcaagaagatgacaaccgctggcttgggctgctgcctcctcttcatctttgccatgggcccatggtcgttggatccatagagatcccattctcgattggctgccttgccgatattcccaaggtatcctccattgaactcctccaaatcccactacccagctcaccaagcttcttcctctccaccacccccaagacactcttctcctcctcattacatgtccccatccgctccctcttcaccaacgtcgtgcccaccacgtctcgtagttgacctcaaccttgagaccatgatcctcctcgtcgatttggatggacgaggagctcgttattggtgcgtactggcctgcatcctgcaggagaagagtggaagagagagagaggggcaataagtgtagggatatttttttcctaatatgtgagttccacattatttaatttttttctctaattataagtgtgacgtagatgtcacatcacctaacactgatgtcaatattgaggaattagctgtagaaactcgataattcgataggggacgcccaattggactttgtaaaaagaaaagaaagatagagagggaaagagaacggaacagagcggagtaggaaacacacacgcgtctcttggcgttgcgttgcgtgcgtacttattcttgtcgcggcgtgccatttccggcggggcggtgcactgcattattgttgcctcgctcgctcgatcgatccccttctcctctccaaatcccatccccaaatcccgaatcctccatcgagatcgatcgacgtcgagcggagcgaaggggggat

SEQ ID NO: 4852 - DNA, 2000 bp, Oryza sativa
atcaagctccacgcccttcttggcaacaagtaagcaaaacaaatttcaacgtgttgtcatctgctccggttagctcttcctggggttcttggtgctgattgattggttctgcaggtggaacacgcacatcaagcgcaagctcttgagccagggcatcgatccgcagacgcatcagccggttagcgccgggaccagcgttgccgcggcaagcgagctgactacgacggccatcactgtcggcttcccgtccctggcggtggcgccggcgcgagggagctcgaggaggaaggagggaaaggctgggaggggtcttccttgtagtcgtcgctagtggcggaggggtctctggcggaggccgagtcagcgacggaggtgagctcgagctccgtgtcgaggagcgccgcgaagtcgtcgttgccggtcgatggcgacggggaggacagcgacttggcggtgaggcttacggccgagggcaaagggcgtgctttggttggctggggtggggtggatgcgcctccgtgctcgcccaccaccgctctgctgctccacccgtcgccgcgctcgcccatcgcctcttcgctgccgcactcgccctctgcttctctgcccgcggccgctctcgcccgtcgccgcgctcgcgctcamacccgccgctccgctaccgcgctcgccctctgctgcgccacccgcatctgcgcgctgctccgcctgccgccggcctccctcactgaataagagaaggagagaagatagaaaagagaagagaaggagaagaaaagagaagaaaaaaaaaggtacagctaacatgtgggtcccacgtactttttaatttttttttgctgactaggttgccacgtcagcgaaaccgcccatatatactgcctagggaccttgagtgaacagtcttgtatagtttaggggtgaagatttctggttttgtggttaagggatctcaaaaaaatctcgctgttaagttgagggacctccggtgaacttattcccttgttgaaatagttagttgacgaggtgggccggcccaccgcacaaatgaacgggccaacgggccttggtcgtaggcccgcatagagttaagaaaaaaaaaaccaaagttaaargtawaaaattaaaggtaaagataaaaggaggaaaagaaaaaaaaaagggaaacccggtatatttggagataacgtgcaaakktgggaagggtcaggtcagtcgaggcggctctctcctctcctctctctcctcttcttatctcctcccctcgcgtgggtgcgtctccccttcctcctctcccatctcctcctcctcctcctccgccgcctccgcgtccccgtccccccctccccccgcgctgctagggttggtggccgccccctcgtcgccgccgcggttgaggtccggccaggtgagccctcgcgttctctctctctctctctctcttcctccggccgcggtccgggcttgtgggtgccggccttatctgtttgggtggggtgggggtgggtggtttctcgggttgactccggcgagcatgtgggatggggtggccgccgcgggcgcgtggtcgatgtaggggggtgggtaacgggaggcgtccgccggcccggacggccgggtggatgggaggtgcctcgaatcgaatccgcgcgtgatgcggagggggagagctgtggtctcgtcggagaaatggcagcggagccatttcgaggcgacgtgtgctccgatttttgttttttcttattatgtatataatgatttggagttttggacgtgaggtcttcttccgttgtggggggaagggaacgttaggttttctcgttgcggcgatgcgcggatggcttgtgaatcattctcaccgccatgtaggccgtgggagaaagtgttgttctcttagtttcattttggttatgtgtttgaccttgatcgattttggtgattttgcagggattggattggtgggcaggtggctcggggttttccttttggggtaggtcggt

SEQ ID NO: 4853 - DNA, 2000 bp, Oryza sativa
tgctgtggtgatggaagaggaggtagcgttgcggtggcggacaatgaggtggcaccgctgtgaaaaggggatgtggtttcgaggtcggcggctggtgggaatagagagagggtggggaagagataggaaaaggtgggagaggctaatagtgggtccgtgtgtaggctaggttatatatgtatttcttttaattgctataaggtccgaatataaaagttcaagttgattttgtaataagaaatatcataagggttgaaaaaaaagtagaatcacatatgagggttgtctctattgtgggcaatgtggtatttgtatgatcttatcgtacatggcgtgtgagacgactgcctcccctacatctcaagcagacaaatatatgtatcacctgttttaatcagaaaaagaaagtgtatcattgattctactcttttggaaggtagaaaagaaaacacgagaccgaccctagatttttttaaaacattttagtgtttgtaaaacttattttaaaaaacttattaattcagaaataaaatatatttatcagtgtcaggattattgatgccgatgttttatatctcgacaccaataaccttaacactctcgtccttcgtggtaactaagtcgctgatgtgaagaggttgataaattatgttgagaacctatttataaaatatattctcttgaagagggtgaaaaattaaaagatgtggtttaaaataggctatttagtgcaatcctttctcatagaaatatgtaagaaaatatatttacattttgaactttttgaagaaaaagtttgacactattctctttggccttacccctatactccctccgtcccataaaaaaatgaatctagaaccgtatgtaacatattctagtacgataaatctggatttatgtatgtccagtttcgtagtattaggatgtgtcacatccggtattaggttggttttttattaggttggttttttatgggacgaaagtagtatatctcagctgctagggaggtcgacgtcaaggtgttacacctcgacactaggatcaaaggctccaagaaaaagatgtatccctaaattaaatttatctagtatctatttataaaataagtctaataaaaaaatatgcaccagctatataataaaataaagagtaaatttcacaaaactatagatactatgaccaaactatcacaaaactacatatttaaggagttgtatcacaaaactgcatatttagcaccaaatttatcacaaaactatacatttaagatgaagtgttacaaaactacacgtttagtaactaaattatcataaaactacgggtttagaaccaatttaatcacaaagtaataatatttatagctccaccataacaatggtgctagggatttaaactccagaagttgtaattttgtgataagttcaatattaaatatgtatttttgtgatacttaacctaaaatatgcagctttgtgataaatttggtgctaaatgtgtagttttatgatacaactccttaaatctatagttttatgataatttagtcaaaataccttatagttttatgaaatttactctaaaataaatacatagtactctctccgttgagaatatagaatacagcaaccgagatagtgatcatatcgcccgcacggccgcacccaggcagcggcagtagcagccagagccgtccgttgtgttgtgtgtcacctttccgcgccgcttcgaggcgcacgccgcgttgcgtaggcagcggcaacgcatgcacagtcacacacccacacccaaacagaacaaaaacacacagcacagcagcatctttaatactccctcsgcccccctcattccttcgcttctctcacctgcttgtttgttcgtctctccctccctccctccctccgactcgcaccgcacccaggccccagcccacgcggggttcggattccctccgccgccacccgcgagagggagacgccggcgccggcgatcggtgaccg

SEQ ID NO: 4854 - DNA, 2000 bp, Oryza sativa
tttgtttaaatatttgtttcctaaactaattgtccgatttacgatccgatcacaccgttgtattcattgtaattaaatctttccaacaatatatcgtatagttatattctgataaaagaaaaacatatatttcaaactattaaaactcaatggttcatgcgtgatatggacatggttcaatgtacgcatttaccatgtttcataaaattcacacaattaactacacatactttctctctctcctctagattgcatgcatctagtgaccttcaaaatgatttttctcctaaactatttatctaatctatgaatccggatcatatcgttgtatttgttgcaattaaatctttacaacaagatatcatatgattatactatgatgaaaaaccccatatgtttcggtttgttaacactcaatgtttcatacgcgataacaatatgtttcaatgtgtctcttcactgtgtgtttaaaaaaaataatgtttcagtgactgattttttattttaccatgtatatctcaatgtttcaccggtagtcaactgaaatatttaaccgtctgaagcttgatgttattgaaacattttctatatcatgtgtaaaatattaagttgtactaactgtttaaacattataaaatacttagtgaaacactaaaagaaaaccaactgcaacgcttataaattaaacaggtgaagcatcgtaaaatactagtagttgaaactttataaaacgtggtgcaatatttaaaaatcactaagaagataaatattgttttcaatggaatataaccatgtgtggtcttgttgtaaagatttaatcataacgaatttaacggtgtactcggatcataaatgagataaatattttacaagaaaaaacattttaaagtttaaaatattttgttcttgggctgcgtgcctgagcgtaaatctacctcatccgcatggagagagcctcttcaatccaacggacgcatgcaaatttgcccagataagatggtgtagctagtgcccgatattttcctcccggatcgggtgcccaacgcggagttctctccttatattttatcaaaaacttgagcttgctaagtgtttacatggcataatctttacaaaaactttctttaccaacatgtcttaaaaaaaagaacttttaaatcaactttctaatatttaaatctcttatttatgtgaaatgttatagactttatttataatcattatccatcaaaactttagagaacacaaccttaaactcgattatccattattcatcaaagtttaaaatcgaaaaaaaaagtgagtcttcaaatgcagctaaaaaactgcagcaatatcactccctccaaatcagcacatgcatgcacaatcggagcacaacttttatctgtactattataaaattgaagatgtttttctggtattttgttacgtaattcgtatatgagtctgaattttaagttcgttcgcttttgaaaatatatatccgtatttgagtcgatttttaagttcgtttgcttttagaaatgcaaaggagtcgtatagaaatcccttaaaaaaactcgcatgctaactttagacgatcagattcctaactgcagctcattattttctaagaaaatatatatccaaacgaattcccacagtgaattttactttaaataaaccgtataacagtaataaaattaaaatagcatttatctgttgtaacgcatggacatttcttctagtcgggaaaaaaataaaatcggagcagaattcaaatcgtaaagtctgagcagcacaacaatcgtgtgctgtgctgacgacagccatgggccacactctcccattctggcccaactatcccgctccggcctaataataatggggcttcacgcagcccacgatctcgttacggcccaaggccggtggggagaaggggcataatggtcttttgcttcacggtccccggccctaagcctctcacggttcgggttctccctcacacactgaacacc

SEQ ID NO: 4855 - DNA, 2000 bp, Oryza sativa
taagtcaaaagtttacatacccatttcaaatttgaatttgaattcaaatattaatttatagacccaaagtttataagtcaaaaatttacatacccgtttcaaatttgaatttgaattcaataatttatatatatagtatttttcaactttatttttttaaaaaaaagattatggtgtagtaggaagagaagaaggggaggaggaagcggggagaggaagagcgtacagggggatgggggtgatcgctgtgggtgatcacctgcccattagccacgcccccttttagcggctaaaaaaacatctacaagtacaaataaactcatgttatatatatctttatatatttttttgaaggaatatatatctatatatatctatctctattattatactctactattataaaaattaaatatgtatttgctgatactttggtacgttatccgtgtataagtcggttttaagttcattcgctttttaaatacatatccgtatttagtcaatttttaaattcgttcgcttttgaaaatacagaaggagtcgcataagaagtctctttaaaaaaaatcgcatgctaacttgagacgatcagactcctaattgcagctcatgattttcgaaagcgaatttctacaatgaattttacctttactaaaccgtataataatgataagattaaaataaccttcgcctgttgcaacgcatgggtattttttctagttaaaaaaaactaaaagtcagctattatcttgcctgaatcagaaagcaaatcaagcctgattcttgttgcttaactattcgtatccgtatcagactattcgaaaattatctgctcctgacgatatatgtatttattttttcttcggaacagactaaaggcctgtttagttcgcaacccaaaaagttttagcgtgtcacatcgaatatacggacacacatttaaagtattaaacgtagactaataacaaaacaaattacagattccgtctgtaaactgcgagacgaatttattaagcctaattaatccatcattagcaaatatttactgtagcactacattatcaaatcagggagcaattaggtttaaaagattcgttccwtaatttacacacaatctctgtaattgattttttttctatatttaatactccatatatatatattttcaaacattcgatgtgataggaaaaaaaacttttgtttggaagcataaaacaatgcgcttagtttttatccctattatcgctcctttgccactgctgcatcttagtggagtgacgagagtgctacgagacaagggaagagggagaggataagaaataagcggtggagaaagagtcccaaaccgacggtactatctccgtcttaaaatataataatttaagctctcaggatttgttctaaaatataacaacttctgtaccaatattttcttcccaaccaatcaaaactctctaccattcacttttcccactaccttactccctctggttccataataattgacgttttgaacaaggttgatgtcaaacttttataactttaatcattaaagaaactagaacatatatatatttgtctttcaaagcactgtaataaaagtacacatgcatttatttattatatatattataatagaaaaattaaatcaaagatatattttgcagtccgtgtcattgtccaaaacgtcaattaaaatgaaacaggagggagtagtactcattcaattacaaccatccaccactcacttttatctactttttttaataaccgtgcctaactctaaaagggtgtttagtcgctctcaccaaaaaagacttatttttttagtgactctcacccaaacaccctctaaaacttcttatatttaaggatggagggagtagtagatatttacggatgtgctatctttgacttctttttctggaagtcccataaaaatcggtgtctgggagagcactgatgatcagtgaccggagaaggcactgatgacagcaccg

SEQ ID NO: 4856 - DNA, 2000 bp, Oryza sativa
cgttattataaaaaataaaaaaaataccttttctttttcaagtaatgagaccagaacaaggttcacccacttacattatcatcttatcagaaataatttagactttatgtttgattatgttttcaacatactmcaaaatcacccaaaattcgatatacattacccctgttattttcaactttccttctcagtacagaaagtttgaaaatggcatgcatctctcatggtatttattatgttttgagctaaaggttaactctctttctttctgctaaagtaatataagttttatagatattgaaaacaccttgaaaacgttctttgttggttcgagaggatacgcaattatgtacattatgcactcctgccaaaatggcaatcatccactacactgacaagtcatcttttatactctatttgctgtaaaacaggtctggttacagatgatgacataagccagagggaatccagattgcgggaaactctccaaaaggactctcaatttcgggtgaaagatgattcagtggtagaaattgctcaggtaaatcttgctcaaaataattgatcaatattctaatgtcctacataaataagattgatcattgactgatcctgggttttactgaatctgcagtataatccccctttcacacttccattcacaaggcgtaatgaaatagcattggaggttaagaggcttgatgcaaacttctgatgacctagattaacaaataagttattagatttcagtgtatataaaaatgcacgcacctacaaatttagaatttcaatcttctctttgctcatattgtatatacatatgtatcgtgtatcagacacaaatttacatgattgtaaaattgaatgttgaagtatcatagttcattttgatattttaatttgtgtatggtattttttagcatagaaggccatcctgtcttaagatctctgtcacaaagctaaagtagacctttttktcctcgtacaacttttgtaccaaacctagaargtcttttttacagaaataatgcgttcagcagagttttgagcctgccatatttgacactgatgggcatattttcaccaatttagcatgtagtacatgggagcatcagtaacagtaggatatatcattaattcattatggagttcttgaaggttcttagattggttctttaagctggattctgttttggactctgaacttgtaaagctgtgatctttatgcagaaattaagcaaaggggatatattctatcatagtatcatctaatgatttggcttgtcacttacatttacaggtgatatattccttatatgcgttcctatttccttgtttttatcgtgaactagcataaacaattcgcctaattgttgtcctagttggtttttcattttgtgtgcgtgtgcacgtttgtgtggggaaggtgtttgccgttcactggtcatgggcatatctgtacataggatgcttttctcttggcatgattttataatattctcttagttggcatcttggagatgagtcccactcatctttatatagtataaggtgctgaggtgtgaatgtgtgattatcagcatagccgagatcaatttcgaggtagtaaagtgacctacattgtttttatcagttaaatttataactgcttagaacagttgtcttattttacgtctgttacagaagttatgctatttgatggagctggcactggacaagactgaggaattgatgcattcatcctgtgatgctacaaagaggaccttgctattttctaattactgaaagggcaaggccactcgggatcaacacatcaacatctctgaactggtctacttgtctctgcaggtaggaggaagctagctcgtaaaaataccacaacaggccctatatatctgtgctctccacttgtggcgagagagcaaaactgcaagtacttctatagttccttgcacctaatgatatgagtttatatttctgaacagaggatcaaatgataa

SEQ ID NO: 4857 - DNA, 2000 bp, Oryza sativa
catttctctcagagagctagataaacgttggaggcggcggaggcgagtgcgtcgggaggcggcagacgagggcgagggtggcggagcaggcgaggtcggctgaggcggcggaagggaggagtcgcgagggaggttctctcggcatgggctccagatgcaggcgtcagttccagaacgaaagaagatagggtagctattgttataaagtgaaagtgacgattatatccctccgtaaataattttatatagataaaagtactctccacaattctactaccactaagtgaggtggtaataaaaatagatctgaacccttcgatcaaataagatcaacagttcagattttttttctactacaagtagaaagcatcggagtgaggctttagtaagtatatactgtattaatttgactggcctgtgaataccatgttatatgtagtgtgcatgamcacctgaagttattatttcctttttttaaggctcctttaacatcattctttttttccctgaagaaacggccargaggtttaatacgtccgcgcaaaaaggaacacgcaagttagccccaaatttccaatcattacacattcgccattgcaagacagctacagtccgcccgcaaggtgccttkgcggcggcggctgctamtacggcgggccatggsgccacgsaacacaattgcagcctccggcggccgtktcgccggagcgagattacgtcggccaagtgccaggtgcagcccagccgccgcgcgtgtgtcacccgctgattgctgttagaaacgattaagacttagaatttggttctaaagcagagatactgatgttttaagkgcttctcttttttttcccgcctttgatttgctatactagagcattttgtttttctcctttcagctttcattttatcctggaaatgtagaacaaaaggcagacatgtttgcaacacatctacaaatacatataagtgctttgtatcatcatccgatgtaactatatttttttttcatgtcaataaagctaatggcctgttcactttgatgctatttttaaccttaccaaattttggtaaagttgtcaaaacaaaaaaaaaagtggctacatttagtttgctactaaattttggtaactatataaaaaatcctgccaaaattttgataagttgtcaaaattttgacaactataccaaaattttagcattgtccaaaatttagtaattttttttaacataaaagtgaacagctcctaagccgaatggcactccccgtaggcaccacccccaaaaagaagaaaaaaaaaacgagctactgtttgagcgttggttttggatcggacggtgcacaacccatccatttcctgtgccagcatatccccctcctgatcgattcggattcctccagctaccgacacgccgacacttgtcacccacacaaggcccatgtgcggcccaactaggcccacccttccgacacgtgtccctcccccaccctcaccgaccggcagtagcattcaccttctccgccctcccccctccgccgcctccgccgctcccccaccttccagaaccttcctttcccgaaatagccacccctaccctaccctaccctacccacccccgccaagatccccgccgccggcgagctcgagcccttggtggtgctccggcgggcgttgtcgcggtcggatcagctgctgctggtgctggtgatgccgctctctctttcttgcgtgtacttccgggtgggaggttgatggcgatggtgaggtgttctttggcgcggttgccctcgcccccactcttatctcctctcctcgcccatgctacctaccttcctcccccgccggagctgctctgctgctcgtactagcgtgggagctgcctcttcttgttgagccatttcttgcctacaaggacagggtgcctcgccgtcgccattgccggcgtcggagccggacaaggaggttcagtgtactgtaccgtggttttgggccttctgagct

SEQ ID NO: 4858 - DNA, 2000 bp, Oryza sativa
accaatgcctctctcctgacgagacagaaagcaccaatcaagaacaacgaggtggatcaatcaagagagcaagagcagtggaataaacgaaggagaaggagaacagtggcggggtggcggcgcgcctgcccggctgccccctgcagcaaggggagggataagagagagaggctggggaatgggattgaggaaatgagggagagagatgggagaggggagaggggagaggggagagagatagagagggtagagagtgtgactggtaggtaccacctattttattttctagaaaatgcttagcggactgtcacgtaggaacaaaaccactcaaggttgagttagggagtaattcgtctgatactaatagttgagggtgaaagatgtctggttttcgggtttataggggtaatttgtactttttcctattttaaaaaattccacatcatatttcagatgtcaaaaatcacttgacgactatacaacgctaattaaatctacatatgtaaaataaatgaaaacaacacaatttagttgtgtattttttaagcaggtctgatttgaatttaatttgttagagattaagaatctcgatttttttaatctttagaattatttcattattatctgataagtgggcaacataaatgttacatagatgtaaaaaaattatgaaaaatatttcaagccaattattcttgctatagtacaaccacttaaaccatcatgagattttttggtcatatgtatgtttttctctgtgtcaatcaagtaacatgtgcaataaactactcatgatatattttcttatagttgaagaattccaacacatcaggcataatttcatggacgtatgtcgtagaccctcttgatgtgactataaagtatacttcaataatttagttattgtaaataagtttgggaaaatagattcattctccaaattaattagtaaaggtgtctcatctgattatgaataatatgcattgaaaaaaaaacgaactcaaaattatagatatttgtcaaaatataaccaataatatggtgctttggaaattatcgtggtagtatttaaaaggcaaaatttgctacaagacactcaaagtttgtggtctttgctgtgagacacccaaagaacacgtatcttctcgtggacactataaaaatatggtaattagctattggacacccaccatattattttattatttttggtgaaaatggagggagaaaaagagttgaaagtattgaaatgcccctgacactgtccatcttccttcttcagctctatgttatcttctcttttctttcttctcctctcttttattctctgtgcggaggaggcggcacaaggggtttccctgacggagaacgccatgagctccctcacccaagcagcacgggccatcgcggtgtaggaggccgcgggacaggacgaaggaataagttcactttgactcccttaaatagtgactgaatctaattcgtatccctgaactacaataccagatatctcgaccgctcaactcttaaaaccagagcaacttgactccctcagtggttttggagagcggtttcgctgacgtggcacctacgtgacggtattgacttggtatgtattccacgtagcgttgatgtggcgcttagatggcattacaattaaataatagtgtgggacccatttgtcattcacacaaaataaaattatggggcccaccatggggcattctctcccttatctctctttctctcccctccctcaagttccttctcggtcctcaccggtcaccgctcccttctccctcctccatctctctcctgaggcgggtggcgagggccaaagcggcggcgggcaagcggagacgcaggcgtggcagtggtgatcgcgcgcgcgccggccggcgggaggtgctggaggagcgggacgtggtggacgacctcccgccgcggggraaggcaaggtgctcgtcaaggtgtccgccgccggcgtcaaccgcgccgac

SEQ ID NO: 4859 - DNA, 2000 bp, Oryza sativa
aggtcccaggatcgacacgtatactgtgtgaccgtgtatagcaaagtccgccttaacactacggccgacatgctattgtataggtatatttggacatggactgggtagtacaccccgttggatcagaaataaggggctaagattcacttcttcattggatcagactatagagcttaaaattctgataagcagttggttggtaacccagtttctgagaatctggataagctgggttttccagtttctggcttctagttcattttctggattctacaactataacttcttagaatctgaaccaaaagctaaattgtttgggatagtttctgattatgggagaagctgcagcagctaaaaactcttccaaacaggccctatatgctatggctttagaaatgacgtacaaaaggctggtttatttcaaaaatgttgtccaccctaaaaagtgttggaataaattgaatctatttcaacatttttgtttcattcatccattactatggcaaatctcaaaaatctacgatttctcctgttacaagtaagtatgttgctttagactttttttttaaggacacacacaagaaagtgcgaagatacacacaaaaaaaagactacaactctagaaggtcatagtcaggaaaaaaagaaaccacattgttgtttagacttaaatttaataagacataactttgataacctaattcttttactccatatttgcataaacatgataatattattaaagcttcagtcacaccatatttkgactttattattttatatgcctaaaacatagtgcattctgaacaatagttatgcactacaacagatttgggcttcttaacggattccctgcaatgaacaggtaatccgtaattgatctatgataaatttgtcaaaaaatcatcgtgaacttcacgatcaatgatcctaacgacaactcaagggtcttggtcataatatatattcacggtgacaaacgagctcattacaaacgctaggttggttgccatggtttctagaacaacgtttatttaattaagacggagtagtaacacagtaccactctcgagtactctctttgttttaaatataagtatttatagggattttagcaaataataaagttaaatagaaagcgccccttattaatgaggtgtggtttatggatatgatagagagaagacaatggaacgagtggtggttgatgggaactagtattctagagtcgttgcttatatatttggtataaattttaatgttagaagtgattatttttaacataaggaatatttcatatataataattgagtaatacaataaagattgactgggtacacaatttgaacaattgaaatggagaaaagaatatattgatggtcataacacttcacacctagttgatttacatatgagaagtaaaacatcgcacgtaaatattccctcgagggttaaaatccatctccaacaaagtttggaaggtggctccgaatttcctttgtgatcatccctctattcattttccaaagctaaaaataaatgaattgagatttgattttccatcttcaaagtctttcaaaacttttaaatgagacccaatgcagtattataccatggaaagtaaatgcactaagattcacactactattataccaaatcagcaagactattatgagcattgaagaaaaaaaaatcggcaaaatctgtggccttgaattcttgaagagcaaaactcaaaattccaagcaaagcaccagagccaccttgccacgtgtaacaaagttgtggagccatgctggctctttttttttgccacgtcacatgctgttcatctgagcaaacgtctctatataaacccgtcccctgcctgccttgcttgccacctatcccagcgcctcttccaggccactacttctctgggctctgggcctctggctgctcatcaacggcggccggcgtagcgagcgagctgagctgaacgctagaaccgagcactaaac

SEQ ID NO: 4860 - DNA, 2000 bp, Oryza sativa
tgaaactaattttgaggttttttcatcgaagtttatttttcagcctttgcttttagatcgctaagaacacacgaataaaagttttattcacaaattacttttcgtttgtaaatacgacggctccgtgagattagctctaagcttgggtatacactactagtatcaagcaagaaatgcctgtggattttatcagttagacccctggaaatgtcgagcctttgcagcaatcgccgttcatggtggtccagttcctcccctgcctcccggcagcgtgtttgtactgtggagtaaaacagcacagtaaactggtaaggactagagaggccaggagttcagagagcctgggcagaggcttcagagattcctgtgagcgtgaggcatgatttgatgcgtgcttgtcttcatttatctacagcggtgtggtactgtagtgtagtgtaggcactactccagtaggagtagtgttcagctcagcttgcgtatgggtacgtgaccacttgctggctcatgtaggtgaagcgaggttctggacaaggggatgtgtgtgggagtagcctttcttgtgcctctgggtagtgtgtcttcctgtgcctgtctttatgatgtttggttgattttgtttcatccgatttgatataaagctgtactcctagcacgtactgtactgtagtgccttttcctaccttttcttgtgcttgtgatggatcgtggatggatgtttcatgggcttcttgatcctatctccaggtttttaggctttacgatgagtggtttgcgtaacttctgcttttattcttgctgatcagagagcagttcctggtttttgttatgatggtgttgtttcttttgggggctaagaccaagataatagtattagtatatccttgtggagttgttggagctatagtggcaactgccaaacacagcccaaccagcattgcttcgagtccttccactagatgttgattcaagtaggataggtttgcttgtttcatgttcttgtacatttgagctgacaatcgcatgaaagctgagtgttcctgttcttttctaattgttcaggatgcatttctgagagggcgtaatggttcagactgcagaaggtaatgaaattgaagttcttcctttgtgctgaatgttcgtagagcttacagtagtgcacctggcatgaattacatgaatcttgcatttcctcttgcycatttgagagaagtggtatcaactctaacgaattcttkgcgtcaaaaaaaaaaaactctaacgaattcatttcatgaaaaaaaagttctctactctttgattattttccatctgatcttkgtataatgacatagcattaacctttttccaggatgtgtattgcacagttttatctgtcagtcatctatatcctacttgaagttacaaggctacatcttataaggtattcatatacaactacttactgtattctatggtaattgccttcttcttagagtagatgatactgttacagaattctcctgtgtattattggaaattaccgactgttcctgtcttctttccttgcccaacttcaacttggtagacagtttgtatctatagttcggccattacatgttcaagttttaaaaccaagagattcaaggtataaacataatttccctactactaaggaagtcactgttattgtgattgccattatgtctcattgttggtgctttggaggcatagacaagttttaaaaatctacgtttgtcaaatctctaatctgttgcaggatataaagcagcaattggccttgacatctatcctggcataaacaaccaaacctgattgccacttttgggtgaaattatctttagttctgcagagtagtaatgtatcatttgttgactaattacagtaaacgtaattgaataatttccagacttggtgatatgtggttcttttgcagctactgacatggttaacctcttcatgcagataattgttacagtcccaaaaagaataacgtggaa

SEQ ID NO: 4861 - DNA, 2000 bp, Oryza sativa
ctaaaaggttgtagatctcattgatctctgtaactttgatatggaatatggaatgtagacgattatataggtcacccacaccctcccctgaaaagaaagaacctataaaaattatctttttgcggatttattagcactccgcatctaaaaacagaaaagtcgcatacgaaaataggcctatttctatgggtggttttttaacctatatccatacaaatatattttcacaggcatattctgtgatcttgaagtgacctcaatcatctcaatagatggttttacttttactagctaaggtcgcatgtgaaatgaagagcccagtgcctgagaaaatatttttatgtacaactggtgcatttagcctctcccttctaacgtagtttgcacacatggatacacaaaatggtcttcaactctcttatggttaattatttttttcatgtactgtagatatagaaaaatacatggaatgaaaaagaggaatatatttttttaatctgaaacttgataaaattgctcaagtaaaaaattatctagtttcttctcactagataatactcctctcacttgagcaatgttatctattttcagataacaaagcaattatatatatgcatggtatcaaaatgagggatatatataaattattcatctgaaactatatagcattgtttaattatatgttcctgcatagatccatagaatactaaatatttttcatatatagattcatatattattgtttcccaaagaagtaattttgaaatattgcactgatgtaattttgagaggactactttgtgtagataaaaagacagtggaaagtgataggggaacatataattgctagcaacaccataagttatatttgtcacaaataagaaattgttgtcgtcattgcccactggagatattggccaccagccacttataatagaagatgcatactagatgtatcttgatatagcagaaccaaggatggtttgcagaacaaccatcgggaagttactaacttttaggggttgagtcatatatataaacaataaaaattaaacaacttaccgagattattttaattaattagtattctaattactagttttaacataattgttaataaatgcacctggaatactgtaggaaaatcttttggctatatcataggtgagtttgagctcctgaaccaagtaaaccttatctcawcctctaaaaaaaaaagttgacaagacgcgcaastavttcctahahgtaattcaaytcatrygcragctgtttttttttttttgccgctgagtaattaaattgtctacttacaaatcctctgcagtttgaacgcgttgctatactcacagcccctatatctctccctttttttaaaaaagaaaaacacagcaggcataatcagctaagatgcaggacagtctccagccgatatacatgcagccgctgtcatcttttgttctcttctccctcggctttgtctcacgagagtccaccctaccatctctctctgatctatatgtgtttctgttcttcgcatcgggaggaaaaaaaatatagaggtctcaccgaaaaaaaggctcatccacacactgccctgcaataattttgcagaagcgaccaagctgcacttgcgctcgcggacaaggcaacccatcaaacgaatcggagaaatctttgcgagcttgtggtcgacatgcctcctcccgtttcccctaatactccccggagattgcacacttctcctcgcaactaacaatacctcgcacctagtcaccaccgcaccaaccgcgcgcgaccggccccccgtcagtcgaaagctgagcctgagcgagcaactgatgccgctagctatagctgctgcctgcagcacgcagcgcccgtaacctaacgtatcatttacttccattgcactgcacatcctgtgagttcgttgtctgagtgagagctggacgtgctgcaccgagctcctggccgagatgcttgccgtgtcgccggcg

SEQ ID NO: 4862 - DNA, 2000 bp, Oryza sativa
gtcaaatctggctggcggtggttgtggctgccgacggcggcagtgacgggcggcggctgtggcggcatcgactgtggcgactggctggcgaggcagcggccgtggtggtcgaggcatcgtggaggcggtcgcgcggcctcgtgggcggcgaggcctgccgtgcaggcgtcgtggaggccggcgacgtgtggctgtcgtggaggccagcgttgtgcggcagcgggagggcgtcatggagaccggcgggagtgtggagtcgcggccggcgacatggagctcgcgggcagcgacagcgggtgctggtggctgcaggctacgacagcggacggcttgcggcgatggccgtggcgaccgtggacgtggctgcggcggaggaggtgaggatggcratggcgaggtggctgggcatttggcagcagcggctgcratggtggtgactgcggtcattggaggcatggcggcttcggacggctagccgagggcttggcaaacggttgcatctggccggcatggcatcgtttggaggagggatcggagaccggcttggcgtagaggtgcagccgatggcagcgaaggccggctcggcgcgagaggcacgggcggcggakatggaggccggcttggcgcgagaggcgcagccgatggagggaggccggattggtgcgagaggcgcgtccggtggaggaggctggcttggcacaagaggcgcggccggcggtggatgaggcgacctctgtgtgagaagctgccggtgggtgtagcgcggtcttcgacgcacgaaggctggccagcgggggacgccggtacaggggtcccacatgtcggcagagcttgagtggtggtggagcatcgatgcgtcagccgtggattcgcaggttgctgggcgtaagcccagtcttggctccttgggccccgacggacggcggcaacggttttccgtcgcttctctttttgaagacgtcgttttggtatcccctagagggcgatgttcgtctgtgtttctttgttggtctagcagcggtcgatcacgcttagcggcggccgattcggtgctagccttctcccggattgtgtgttgaagctgtcgatgtatgggtggtggtatagttattcctttttcctggttacgaccctccagggttgtaatcttataattttttttctgctctatcaatagaacttcgtaccgtctcgtgcgagtcgttaaaaaaaagcattgtgtggcaagtttccagagtttctaaagtagacaaacttcagcattagcatgatcaataatagtcgagtataaagagatacatatttatcttattagatgataatgtcgaatagattacataatttcagatttaagccaagcatgtgttattgtataatggtttcatctaatttgtatataaattgaataaatttgatcacgtgacctatacattagaaatatatattaaaatctccacttaaatctttccgttttcttattagctctcacttacaaacaagtatcaacataatagtagtatggtatcattgtataagtataaatttatgacttactaccgatgtcattgaaatatgtcatattagttatttatgttgttcgtttaaacttttaaaatatgcaaaatcaccatctaaaaacaccttaagaggaaatatgaacgattttatgaattttagggggttagatatccggttttaaagttaaatatgctagataaacttccatccaaaatttaggggagtatttggattttttttcattagaaaaacactactgttccatattacaagcaaaaatgggggaaaaagaaagccttctctgccttcacaactcaccgaatctacggttcagattgctcgcaaccttcggataggaggtgggacccactttacagcggcacagctcctgcctcaaaaagataggcggatagcgttcatcccccactcccccccgtccggcgcgcggctcctccgtcgacccgccgtaagtaaaccttccg

SEQ ID NO: 4863 - DNA, 2000 bp, Oryza sativa
gagagagagagggagagaccgaaccttcgggaatcgcatcgccggatcgcgcctctcccagctccgtcgcagccggctgcggatcgggacgaggaarcggcgcctcactggccgccgccgccggtggcggcggcccgtcggaggcgggtacccagacgaggctcccgtcgggcttcccccacacctgccacctcctctgcatcccggcggcacagccagaaatcgctcgcggcggcggcggcggtgagaggatgaggaagagacgagcaaaaaaaagaaaaaaaatggagaggaaaaaattcaaaacgggaggaggcgaggagggaaaggaaagcgcggagcggaaatggcgaagcggctgtcggtgggtgggctgggcccgggtagattcgagacgggccggcccattagcggggktgggtgacagcccatcaacatccatttggctggacgccgccgccgccgaggaggattgctagggcggcacggcacggcacgacgcgtcgcgtctgttgcgtcagcgtgaacagatcagccaacccgccgactcgtctcctatcaccacctgtaccgaactgccgccacgtagatcagcggccatggtatacacatcaacgctcaacgcaacaaccaggtcaaacgctatatcaacagtccaatttgcaccctccgtattattaggcataactaaaatttaaaattttaaaacctatttttgtgtttatttgattatttatttatcgtagtttattttttatcatttgatttttaagtcatcagtacacacaatatataaatgttgtacacataagttcttttcttgataatgtgttcgctaccagggatgggaactttgcatagtgcgtacggaaaacggggcggcctattagcacgtaattaattaagtatttgctattttttttaaaaaaatagattaatttgattttttaagcaactttcgtatataaactttttgcaaaaaaacacaccatttagcagtttgaaaaacgtgcatataaaaacgagagagatgagatgagaaaaatggcatccgaacacaccctatagtcttataatcaactgtagacgaacgaaacgtaatgattttccctgttacacggaaaatatacaacaccacagatacctattatacgcgcacacagtcacaaaagtatacccttttacacacactcatttttcttttttaaaaaaagaacatactcccttcgttctaaatataagagcttatctagattcataatactgtaaaatgttcaattttagatttaactgcgatgcattcgaagttggaatttttcaaggatgaatcgacagaccatccatccaagttgtaagttgtatatagttcatgaaaaaaattaaaaatttatgtgtagaaaagttttgaatgtgatatgatgtgatgaaaagttaaaagtttgggtaattgaggtgtactaaacacgagcagccgtaagtttcaaaaatttccggcaggagaattcgtaatgaaattcgattatcgaaacggggacgtgttgtcaccgacacgaggacgcgaacgcgagagggagatgccgtgacaggacgcggttgcgggtgcccgtggcacaactcgtgtgttgacccgcctcgcgctcgcctgccaccaccgccaccgccagcgagctggatgagccagcagccgcccccgcccgcggttgcttcccctccccaccacgtcaaaacccaaccccaaccatgatgctcctgcgccaccaccaccacccccacagcggcgccgccaccaccagcagcagctgcagcggcggcggcggctgttagagaggagggcacacaccaccaccgacaccgacacgctcgccatgccaccaagcgaggcggcggcgtgaggcgacgcagatctgaacggaggaggaataggaagaagggaggaggaggggagggagaggagttggaagagttggaggaggaggagatctctttcttgttcccgctcg

SEQ ID NO: 4864 - DNA, 2000 bp, Oryza sativa
aataaaaaaactaatttcataactcgcctggaaaccgcgagacgaatcttttgagcctaattaatctataattagccataagtgggattagttaggctcaaaagattcctctcaacgtttccctctaacatattttcaaagattcgatataatgtttttggaaaaaaaaagtttggggaactaaactaggtcttagccatcttacgttgtgtccatagtgctatttcttccggcctaaaaaagatagtattttctgcgtttaaaatttaatataatgtagaacttctccattactatcactactacctcaggttctcaacttaaccaactataatcatctctaatttaaatttttatcaggtcacttatcttaattatctgtaatttaatttaatttttctttacacccgtagaaaactctaaacgcttgtattctaggacgaaaacatggcactatggcgtaccaaccacctgtggatttgttcgccaccttcgccgtacgttgcggctcgcatcgcacccacacccgacccaggcagcggctggttcactgcatctggatggataggcatcatcgatgtccagccagccacgtgcagaatggcagcataaaaaatatttttttcctttttaattttactgacggcgagagggttagaggagatgcacctactctctctcgttggctgcgaagcgaagtgattctgtgataaaaagtgagaaatcgtggtggtgccatgcaagtatgaacggtccatagtttggaggcgaatggaaacgatacccttctgaatttgctgagtgatattcgaagcatatcctcgtgtgtcgatcggtagatggatcgatatggaagctacagttgggcagtacagcctccctgtggaatcagttagagcgatcagtgatgctactagtatgtgacagcctgacagggacacatagaaccatgaatgctacggagattagtaaagggaacacgcggccggcttgcattaagctccttgtgttaaagctgtcagattcttggatatcacgttaggcagcgccgggggattgaaagcatccggtaattggcaactttgaatgcatcgtttcagagacagaccgatcgacagtgatccgggcccccccaagtgtccgctcaattgctttcctttcatttcgtgcgcgcgagttttcctcttagcgtaggcccctgcaagtgaaagaaaaatccaagccaagacgccgtccaatactccaattgacaggcaaatgaaatgaatagttctagagaaactaccaaatccacatcctaaaaaccgaattccatatgcgtcgacaacgcaggcaggaatttcctgggcaccgcctgcctacacaacgactggtgactgactgactgcatgcaaggcgcaaccgatgcagagaaagaagcagagcaaaattcgcacgtggtgcagcaggtgaaagcttaagcacgcacgccgggcgattacgacgccggagtccacgaaacaatcgggggcagatatgtgtgtgtgcgcaaaaacagtcaaaaacatcgagttgttgttgtcttggcgatgctgcactgcacgcacagccatccacaagccatgagccggcgcgagattacaatattttttcttcgcggaagatctatctctcgctcgctagcttgtctgtcttttgactcttctgtttccatgaggctttcgccctttgagagaggtcaagctattttctacgcgcgagaaccttcgtcgtagtagccgcgagcgcacatcctcatccggcgaggtccaggaggggacagggccgggcccacctgcagcccacgttccggaggagccacccccatatatagccgcgacctcgtgtccgaggccacgaaccgacttggtcgccacggaagcgcagcatcaacaaaggcagcagcagcagcagcagcagcagcagcgttggtggtggtggtgtgtcatcaccaacattttcacgagaggagaaggatggaa

SEQ ID NO: 4865 - DNA, 793 bp, Oryza sativa
  misc_feature (1)...(793): n = A,T,C or G
tggggsccccccatttttttaagggggsmaaaatarattttttmaacnnkggggtttaaaagggtgaaasggttaaagttttaanaaaaattttttatysccgrrattycyattttttaaaaaaaatttcygcraaaaatttctgggggggggtaaaaattggggcttttwggttttaasccccaaarggggggaaaaaamccaaaaaaatttccsggaawttttamaaaaaaaaaattttgggaaaaaaaaccgscttttcaaarrttwmgggkkaaammttttccccttttttgggccccaagggbyttttttysggggssgkgytttttccgmwkkaaaatwtccccccaaargaaaawtttttggggtmcscttttgggaaatttttttavsraamcgggkttcccgsssgssgttwaaacccyttwagggyttwrgcscttwaaccccggsccccsraatttkggggggttttargggaaaggkyccccaaaaaccccccccccccggcgtcgcgcgggccccaccatactactccgcgggsccccacggtgacgtcacccgcccacctyacctccggggctccgaccccccctgcttcttccgtgtgtgtatatatccacccttcacctctygtttccccgagccatyacgccaagacgtactccctccttccattgttacacgcgttcacaaacggccagcgagacgacgtcgtcgatcggcgaagctagggtgggtgcgctgcgcgcgtggcgccgccgcgagagacgatcaggccgggggagca

SEQ ID NO: 4866 - DNA, 2000 bp, Oryza sativa
ttcataggtcacacatcttttctgcacactttgtcctcactcgtgtgcacccggaaagaatttcccggtcggtcccccatcccaaattgctccaggccaagcacgcttaaccctggaattctttggagattggcttccagaaaagaagttgcaacttgttgatatgagtattctattaatcctattaagccctagaccgggatgttacaccctmacccccttaagagagatcgacgcccccgtcgatcaaccctaggccaggaacgtcatctcttggccacgtccatgtgtgataccattttgtaacgtcccgccttcccccaggccgggcccgcttacatctgatagctttcataggtcatagactgccctcacagaccaacacatatcttttctgcacactttgtcctcactcgtgtgcacccgggaagaatttcccggtcggtcacccatcccaaattgctccaggccaagcacgcttaaaccctagagttctttggagattggcttccggaaaagaagttgcaacttgttgatatgagtattctattaatcctattaagctctagaccgggatgttacacaaagggctagcatcaaccctttaaacagaccaggttgccaatcatgtaagactgtgtattacgcacaccatagcctcagcaaaagaaaaggcttctcacggagtggattctaatctctcgagaggatatcctctcatgtatcttttactttcaaatttgatacaaatagttgtgaaaaattctaaaaaaatatttggcaatgtagagtatagtgatatctactaatcccaaaaaatcaaattcaaattcgatttacacattgagaaacccaaagaaaaggcttctatcatcactgtcagtcaagtaacttaaccagaataaaacagagggaaatatgaatttgtcagctatttctgtcactgcagctctcaccattcaaatctagaggtttgaccatatgatctatcatggccaccaatagataaagtgaggtcttacaaactaattaaaaaatgcagtacatcactacatccacaaccagttgccctaatagtccaatggagggcctcggtgacagttgacttacaagcaagcaatagtttcttttcgtagatccccatcaaccaaacaaaaaacaacaaatctgagcactgggagagctccactacccccatcatctgaaacaaaaattaatcacctatttgcactgctaaattccctagcttccagacctagctaactgatacctaccagtggggaccacctgcaattccaagaatcaaactgtcatgggcgcaactagtggtggtgatttgtctgaggggagccgggggttggattaacgcgcgtcaaccgcctaaatccaagggggtgcaacatgattaccgacgcttctcgatccaatgaccctaggtaatcacgcgacctccccggccgtaatcccatgtgctccaggcagccgagtctcgtgacctcacgtgacgcttccgcctctagctctcgatcgatcgatcccaccactaattatccactcccaaatgattgtttagtggcccgtatcataagaccggccacgtcgtgcagctagtgtgacttgggagagacagtgtaccggccatttgccagatttgcttcctcagaaaaatagcagagtcggccgggtttgcagacttgcagagatcggaagaatctttctctttcgaaatgttgaggatttttggaaggaaaacaaaagggaaatggagatataggaatcgtggcatttaaggcggcacggtgcagcgtcgtctgtgggttgcaacatgcatcggcatgtgagtctgcctcgggaggcgcgcgctcgtcgatctcgtggccgccgcacttcctatttaagcaccgccgcgggtgacaccgtcccctcctcctcagtactcagatacattacccgcaccgcctaattaagcgctcgcatctgaagccatttcgagggacgtc

SEQ ID NO: 4867 - DNA, 2000 bp, Oryza sativa
atgcaactcagttagcctcgcttctctactcgcaggaatgtgaaaaaaaccccagaaggaatagaaaaaaaaagacaggattctaacggaaacaaaagtgtaaaataaagaattgtaaaacacataaacgaccgtttgattggaccgtagaaaaatcacaagaattcgagtagagataaagatttaaatgatattttttccatgaggttctaccttatgttaaatttcctccaaaacttccatggaaagaggcatttcataggaactttataggattctataggattcattcttttgatttaaaggctacagagaaaaaaaatttatgaatgaaatactctaaaattcttacgaatttcctttgaatccaaagggggcctaatttcttcaactacttttctatgtcaactgaccataaccatcctttatttaatttcacatctcttcttgatctctgtaaaagaaatttcagaactacttatatttggagacaagtatcttcacctcctcacaatgaaagaaagaaaagagaagaacatctggtcccaattgtgtcacatggggggtatcttcgtggtgccacgtgcgtgtggtgccgcacacaaatcaccccaaaaacattgcattgcctggttcgtaaaatcgatttcgacctaatttaaatcgagcatcaagtaacatggcttcctgtcataagacgacgcggaaatatgcgaactagacgtcgtcgaacgtacgatactgcagaatattcgtacgaaatcggaccaaattgtttwaatttttcacgcatgtatgtatggtgtcaaaatttgaaagtgaatgcgaaacgaaaccatgtggccgagcagggagccacacmaagggccacataattggccctgggtcccggawtcccccgggggccattcgggcmaccaactaacccaacccagacaggtgactttcacgagccggtcgtctcgatggcaggtgggggccaacctgccgggcacgggaagcggcggggcccacctgtcagttgtggatagatgttgacaagtggcgctgtactgtacgccgtacgatatttttagctgttccaactgagccgagccgagccaagccaaaattgtactgggaacatgattattatagcaggctctgttaatgtgtttttttgacatcaaatcattattacattcatcctaaaatacaacaacctagcgccgaattatacaaaacctattagtatgaatctgattgtacatattcgtgatactaatttatgccaaatctaatacttgattactactccatccgtcccacaaaatatgtcgttttactcatttgtgattgtcccaaaaagtgatcgtttagcatttgaagcagaaaagtagacccatatggtataaggtcatcttatactgctatcaattgtttttgctctatgggactttatgccccaaacgaggttgcaggttggtggtgcagtggagaggagaggaggccggtgaaattacttatagtacctgcaagtactaaattataattacttatagtacyycaaaactaatttagcagcactttcacaggatgaccagaattttgggacaaggagtatattttgtaacggarcggctcaagctttagcagatcaggcggcaagccgagccgagccgagccaaggtcaagacctaccccaccgaccctgcgtcacgggcccacattgtcatacacgccacctaacccctaaagtatcttttccaagtcaggtcatatagatacgaaaaaaactacgaaactacccttccccamcaccccttcttcctccctcctctcacaccctcgtcgccgccaaccaccatccaacccatccaccaacccctcctcctccccttcgccgtcgaccccgcctataaatacccctcaccccacccacctccaccttcagaggagccccgcctaccgccgccctcacgcctcctcccacctacctcacctcgaagctgacgtcagca

SEQ ID NO: 4868 - DNA, 2000 bp, Oryza sativa
ctccgggaagagggagagtcgggcgcggcggggacggcgcgcgccgccgcgggcggcggcgacgacgccacgtcggtggcgacgacggcgaccaccaccaccgccgtagtgctcgctgacgacgggggcggaggcggcgagggaacgggcggcggaggaggggagagccggcgctgttgggtgacgagggaggaggaggagcagtttgggatttggtgtcggtgaagatatttgtgggccccacaagtggtgcttgcactgtgaagagagtgtccctatgtgtcatcctgtggtaactcatatggggtgcttgcagtgtgaatggccttatgaacttcatatatataacacacattccctcacaagaatgtaccgctccgaggtgtactcgtatacagtacatagcttgacacaagtttaagattattgaaaaggataattaataaacaccattggaaatgagaatgttggagcatgatattataatagtacagcaagaggatgcatcaccgacagcgtagttcaagagagacatatgtatatcgatcgatcgatcaatctcttgtgtttcaagaatccctgcacagctagcttccctgaaacgctactccctcacacaagttttagcaaagctctggctagctagctgatgcgtgattaattagtgtgtgtagattttacaattaacagtgatcgtttggtactatctccagccagctagctagctaaagtatgtcaaagattcaagaaaaactaagatcccctggctgagtgcmaacgacgccatcatcaatatgataacccttttatatagctaattaatgaatatattattctctacctgatctcgctgttaatttgatcatcccgtaattatatattctgcttaactatttgttgtcgaaagtacccctccgtaaaaaaaataatactctctccatcccaaaatataaggcgcctatgcatttcaagatttcaccttcaaagcattttgactaacatttagtacattataaatttaattttacttgctaaaaattatatcattggattgacatttgaatttcctttcatatggttataattttgttattacaaaccttataatatatgagaaattataagatagtagtaaagattagtcttgtagaccgtgtcaagtttgaccatgctttatattataggatagaggaagtatctattatagtatccagaagataaattagtatggaaaaaacttcgatgccgcttattaaatgagtggtcgttgtgagcgacaaggtgatttatggtaagatgaggaaaaattaaatttaatttcagtgacgggtggttggagaaaaaaatagtactataaacttaaatgcaacaactgtattttttaaggtcgagatgtaatcgatttcattatttctccgctcaaagaattactagtcatcagggtctgaaaataaaatagtaaccgcgcaataaccatgttcaccggcatattgagtcttcacgaatcgagaaatcaaaaaaaaaagtgagatccaaaattttcaacaaaaagwtgtttgaatttcacccattttcaycagtaatcgagattgaacggtaaatttgacaaatctaaacgattgtcaaacccctgctgtggtacttaccgtcctagtaaatcaaatcaaattaaccgcgccctttttggcagtagaggacaaggaactttatttggagtatattggtcgtttcttcctttcacacccacacacagacacagtacgtgacgagacgacggggggcatagtcgtcattgtcaatgtcaaatggtgcaacgcagaggcaagcagcgtgtgtgcgcctcttgccctttgtgtgtgggtgagtgactcagccagccgagccaccggaggctttacatacacactcactgttggggttggagaggagaggagaggtggggaaagagagagaggggggggagactactcgtcggctaggtcaggaggcggccggcgacc

SEQ ID NO: 4869 - DNA, 149 bp, Oryza sativa
ggawttccgggcccccccccccctctcctcaacctctcttgtgcttgcttctccawtgcagctcacctccatctcctattctcctcctccttgttgaaggagttcgtgtgcctctaccaagaacaataagaagccttgcattggtagcc

SEQ ID NO: 4870 - DNA, 1287 bp, Oryza sativa
tcatctcataataacaaaaatatttaattaaaaaaatttaaataagacgaacaattaaagttgggtatagaaacttatggttgcatttaaaatgggatggarggartarctgaaaaatgataggagcacgtatatcaaatcaatcgcttcatgatgccccgacctgtaaaacaacatctgaccactacacagctcccgtggacggtggaccttcccactaaccccaattcactcatgttgtagtatccgtatgtgctcgccacatccgatccatcgattcgtggaattctcgagcgccggagagagacggctcttcttcgtggtagtgccagtacgtctcacagcccagtccagcttcgctgtctccccactgttcagcgtcaaagcacacacacaaaagatcccgatcgatttatctcaccaaaaaacacgttttgttttaattcagtagctacacgtactactagcttttgtatggcccagcatggtatcctgcccacggccaaaccccagatcgatcgaccatctgaatgacgaattgttattgtcctctggaagagaccaaattaagctaagcaacaacatcaacgaccttccaaatagaattaattcacttgaccctttttgtatatctcctctctctcttggtctccccgaccttatctggctctatatatacccccatctctgcaacaaagtctccaactccaacaaggcaaggaggaagagctgaggcatactccgaacccagccagagagctagctcagtgagcagtacacagtacactccccgggttatctctcccagcacgtatgtttatgtttaattcatttcctccatttatactctgtgcgcgctgcaaacgtagtacgtgtatgttctagctatagctcttgtcttgtgcgtgcgtgctgctcgtgttctcgtacgtgcgcccgcgtggttcaatagcgcctaattgatgggtgaacactggtatagtacgtacactagcgtggggcgtgacggcgtktgccgatttgcgcgcgcgtccatgcttggacgagtcgtcgtactctgccattaatcccgcccggccatctcgtgctagatctccgcgttcccgatcgatttcacgttcccgtgtttttgaggcgcggagcgcaccggagcgcgcgcgtcgtgcatgcatgtgcatgtgtacgcgcggcggccggcagggccggcagcaatmttcgtagtaagcacacgtttgcttatcttgtgttctctttactgttgcataggccagctagcttttgcttgca

SEQ ID NO: 4871 - DNA, 2000 bp, Oryza sativa
tctcaagatcctgttggatggacaatgttcaagaaatactttcttcaagccatattcagttaatccttagaagagaggattaaagrggatttattccacatatattatgatgtgaaattattttyctttaatcccttcaaaccaaacaaagactaagcttttaagcacggtaaaagctcgggagtcgggagggtaaaagctcgggagtcgggagtcggctgcggtgaagaaaagtagcaatggtactaacatgcggatgagagaagggaaataattcttcgtagaaaaatcatagaacagatatggaggggaaagagtgaggaaagatatatggtgcaaataaagaacacgtgtattggttcatagatcctcctttttatctttcagactcagtttaagtggctgcaatgtaagccctccccccctgtgaatagcctcttgaatcagaggaatgaattctatgaaattatatgaaattcctatggaatgcctctttctatgtaagttttggaggaaatttaatatgaggtagaacctcatgttaagaatcctttgagtctttatctctcctcaaattcctttgttttttctgtggctcaattaaacggtcattcctcctatgtttttcctgtgttttgtaatctttgttttccacttgtattcctatcagaatcctatgtttttcctattcctccgtttttttattcctgtgattcaaagggggcctaaatcttctaataaggctatgttcgggaaccctcactccccgacacgcagaacgaagcaacgtttaacacgtgattaattgaggtttagctaatttttttcaaaaatagattaatatgattttttaagcaacttaagtatagaaactttttgtaaaaaaaacgtgccgtttagcagttttaaaaagcgtgcgtgcggaaaacgagagagaggggttgggaactagcactcccgaacgcagcctaaatgtggaaatagacaattttgtgagcatgaccgagtttagttccaaactttttcttcaaacttccaacttttccatcacatcaaaactttcctamacatacaaacttctaacttttccgtcacatcgttccaatttcaggccgtgtttagttctaaactttttcttcaaacttccaatttttccatcacatcaaaactttcctacacatataaacttccaacttttccgtcacatcgacacacataaacttccaacttttccgtcacatcgttccaattttaaacaaacttctaattttaacgtgaactaaatataccctcaattaaacttctaataatagcgtgaactaaacacacccccacgttaaagcagcaataagagccgggtagcagtaaatgtccgacagaggcatcagccggacaagataaatactccgacagagtactaaactcctacagtacgcattcccaccgcaccgccattcgatctgccactcgttgtcacaagtgtggtcttcttccacaaggtatcacaatctaatcaagcttcatccgaggcagatctccacacgtatctccgcacttgacttttaattagtactccatctctcctaaaatataagggattttaagattttacttgtaacatatgaccattcgtcttattcaaaattttttaaaattattatttattttatttatgacttactttattatctacagtattttaagtacaactttttattttttatatttgcaaaaaaaaaattaaataaaacgaatggttaaacttgtaaacaaaaacttgaaataccgttggacggagggatactttgattcccgcgactcgaagtaagtccactgcttccccggcaaggcatgacgcctatttaagtaccacaaccattactttctgttccagccttccagccaaactgaagtcacgactcgcgacatctgaagttgacacacctccaaccattactttctgttccagtgttgcacacacctccggccatttgggcgtc

SEQ ID NO: 4872 - DNA, 1824 bp, Oryza sativa
atttaatatttttatatttattaaatgatacaacataaataatattttatgagtaattgggkatttttaaacttttcataaattttttaaataagacagatgatcaaacgttagatataaaaactcacaactgcatgaaacgggttgagtwtaatcctgcctacctgttcggtatgactgcacctgtgcagtggcgaaataccggtagtaccccccgttttctgtgaattgattgaggaggataggtggcagtttcggaatgttaggtctccatgtctgggaggtctccactttgtcgtctctatcggcgattctctcagcaagtctcgtccatggtggtgaccggtgaacaagcagaaagggccgtggcaattgtcagtttagacctttgcattcctgcttatttgatttttttatgctggatgggtcgaacaaactctccttccgaaaaaggatcgcattaatattttttttaaaaaaaatcaatttacagatttgtatttcgacccagctaatgaattttatgctgtaatgcatatatggtaatgcactatagtataacacattcgtacaatattgtctgtttggtaattgcttggtgcccacattagraaaacgtaaattatatatttccaacattccatgaggatatactaattatccaccttatagaaagatgatatgcctaatggtgtaatcatggcgaatatggtgtagcatcaaaatcctcttcaccacttagtgctttttaaatttcatccttttcagcttaagatatttttttttattatcatggctacttcctaagctcctacgggtatatttggacaatgggaaataaggggtgagattgagatagggaaatgaatgaaatgttaggattaaatggaagagtaagaataaatggttaggatttaaagatgctttttggtgggtgaaaaaacatttccctaacccattattcaaacaaggcctaaaagtttattatctctttgacaactttcttcataaccatttcttcaaaactttacaaaacaaactcttaactctctaacatctaattcattcatttataacatccaacaattgacataaactgaatttcatccatcatccaccagcactcgacaaaacaagaccttacaacagctaatactcatctattagcactagccattaaacattccctctaaaccgaaagtctctactgacacttggatatcacacatatcctgggttttgattccatcccaaatcagcaaaaacctcacccaaaaaaaaggagaaaaaaaaatgctacgaggaccattttgaaaatcagtaaaattcaagggtccattttagaaacacacgaacctcacataaaagtcccttcccctttcgttctcgtgggatattcctccgaataattatttattttatatttacataattttttttcccactcctctccctctccgggcctccgctccccgtgtctccccccacctcgccgactcgcgccttctagaatcttcgaatcgcgatcgcctcctcccacctcggcccagcaacgagctccctcccatggtggcctccagaggataggttctctcgcctcgcctccctttccccccaccctagttcgtcccggccagggcgggttctgattttattttattttgttttgttttttttctcgatttttttggtgaattttgctgatgtttttgggtgatttgtagcgggagagatcggaatcgtagggttttgggggaggcggcggtgggggagatgagcggggaggtggaatgcagagtgtgccacgcgaaggtgcaggtgccg

SEQ ID NO: 4873 - DNA, 2000 bp, Oryza sativa
gcgtacactcacctcctatgaatacacacacgcacatcctacccctatgagcatagccagaagactgaaccgatatatcttgagatttacaaagtcaccacgggtgccttgttatcgacggatacgtcgcctaccgcaaaatagccgagcacctgtgtctaagttgaatctgagtgggttggtttcaccacaagaaatctaatcggaacgctcacttcgcataaatgcttcctctgtttcatcatattacgagtcactttcaccttttctcaagttcaatttatttaagtttcaaattcataaaaaaagatagcatttctaacacaaaacaaacatattattaaaatattttgtatttaatcaaactaatttataatataaaacaaagagagtatgtagttatagggctctgtttggtagagctccaacttctaaatttagctatagaagttgggtctggagtagagttatggagcaatctaaacctagctccacttctctagttcattttgtgatagtgttccatccaacttcgctcctagtttatgtggagctgaaactgtttggttgggcttcaactccaggagagatgaagcatgagttgcaatggtgggttgttcggtctttttacgatggttggcttttaaagaaatctgtttatcaaggtttacggattttatgagaccaaaaatgtttttatgtgatggtggaggatcactacaagtatgctataacgggatcataagttttttgggtggtttttttatggatcagtttacttgagtttttttgaaacctttctttaaaggagaggaaagagaacgactttgcttttcaaaacagttaaaaagraaaaaaaaaagagagattattaggctaatagctgctatcactaacatcaaagatatggagtactcctagatgtacctaagagcaggtacaatagcaggctacaagctagctacaaacatattataaagagataaataagaagagagaaaagcagtgggctatagatttgtagccaaatatagcacggactccaagacatagtatgtatatgacatgtgggaccagatattaatagtgtagtactacctccttccctaaatgtttaacgtcgttgactttttaaaatatgtttgaccgttcgtcttattcaaaaacttatgtgaaatatgtaaaactatatgtaaacataaaaatatatttaacaataaatcaaatgataggaaaagaattaataattacttaaattttttgaataagacgaacggtcaaacatatttaaaaaagtcaacggcgtcaaacattttgagatagagggagtatataactattgtatgaatgagctattagattggttatagatgaattagagttagtagttggctatactattaaacttgctctaatgtttcaaagagaaaaatatatactctagtagagaataatggccgctatcactgacaggcgtgcccccacaaggccacaaggccaaggccaggccaaccgctgtcacgtgtacagcgaatggctacaactgacggggcccacactacaccaacacccactgagctgcgggccccacggccccaccacgaggtacacctactatgccacctcttccccccaccaccaccacctcactcccacgcctccctcctcccattttcgccggcctcgctcgccgccgcgtcgcgtcgcgccgccacctcacgccaccgccgcgcgggcgcggcttccccttgccttccactccgcctccgcctccgctgctacggcgcgagccagaaggggcggaggtcttcgccgcgacggggatgagggggcggtgagcctgcgcctactgccccggccgcaacagcgcagcagccactgccgccccccaccgctcggcgcgagatccgagcgcgacgcggctgttgctgttgctgctgtgaagagccgggaggggttgacgcggcggcggaggagaggtcagggaggaggcggaggcc

SEQ ID NO: 4874 - DNA, 2000 bp, Oryza sativa
tgaaagtcgtcgcatgacttctttttgtaatcgtactaatcgcgcgctttttgtgacggcatggcatagacgcatgtaaacgcatgccttttcgcaaatttgtaaaacgaaacgaaccttttgtcccaactggtgcaaaagcgtgaggaaaacgaaatgattcgtggtgagctacaacacacttcactcgatcgatcgtagtagcaggctactagccgcagcagcagtaggtcatcggacgccacagcgatgatttgcatgattcctcatgttgatccctggcggtggtaagaagagggggaaaaagtgactttttatcgtcaacagcgaaaagcaaaccgctcgcgggaatctcattattggcgtaccatttgttttttaacctttcgaggccaaatacgccatgccttccatccgtcgatctaccggttggagtagtagctgttatattgtgctcacgtttttgctagtgttgtagacgtggccgcgtgcgtgagaaaacgagaccgagaaaatgtggcgtgcgtcgcatggtggagggagggacagagatgtggcacggctcggcgcgtcgcgtttggctggacacgaggacagtacgtacgcctgcgctgacaagtgggggatcaccatgggaaagagaagcgagcaaatggggatagtgtcgtgcattgagagagagagagagagaggcgatcgactgacgacgacgacgcaaggaaaagctacagcgggtagcgagggacgacacgcagcgagcgagcctgcgcaaatgaggaatcatggcttcccccctcgaaaggtcggcatctttcgcgcaaagcagccgcggtcagcagcatcacacactgcagcagcagcagcagcagcagcaggagagaggctgggaagccaagaccaagagagagaaggcaaaaggcgcaaaggggaagaggggagcacgaccaccctcctccgtatcattgccatctactgcccccatcctactactactcctacacccgtctactccactccacaacctcttcttcttcctcctcgcgtgcgtccgggcctagctgtagcacgagctcgcctgcccatctctctctcttcaccgctttgcctttgctggcgttgcgcgttttgccacactcgctgcttcttttttatacttcgggtttgggcgggtgccactggagacattcgtggggtgccattgcggcgtcttctcctctctcaggaggtgagtgggctctgtgctcttggcttgtctctcagctacttgcttcttcttagcattacccattttaagtttttggttgttctaatccggtgatcttgggtgttccctccggcattgccgatgttcttgagactacgatcacacattcatatgcatgggtgagtgatggtcttcgcttcttgtgaaaatgcctcacctgggggaaggagggctggtactagtgctactagaggggtggcgttcctgttcccttgttcgtaggcattcgcctggagttgtgtttgcatttacaagctgcacggcagaggatgattgccaagtggcatttcgtcgagcacgtagctgatatattcgtggtgacatttactagtactagtgctactactctccgcgtagctttctactgctactaatcctagagacatgagctgtgtggcgtaaaaacacaaaagccgcctgctttcttgggaaagggaggtggttttggccgccatggggacccaacacccaagctatagctagccaatgcattttgaacctcccttctccacgaattcctattttattttggctctccactttgactgctgctcacactgcacaccgtatgaaatgatatcctctgcctctgttgcaatggtatgcaggcatttgtgacatttggtcgatggtgaagtgtggctaagctgctcgcttggcttagtactctggaattgaggttttatcagaatcttggcattcagattgcagctgttcttgggtttcttggagacat

SEQ ID NO: 4875 - DNA, 2000 bp, Oryza sativa
ggctcagcacataatactaatagggtcatttttgaaccaacaaagaagtacagttgttcagggtaaacgttatatcaaattcatttgcatcgtctttgattttaacctgaaagaagagtattttcactgtgagataattcactatctgaaaataaagagctaataactcccaccttatgctttagtttcctgtaacgtacttctttctatcattccatttggtcttctattatactcaaccagtgatccagctcttttcagtaatgtgtagagtaaaaccagactagttttttgttcaactcataattagaaaaccatttcagtacactggaaactcagtaacttctcacattgtcatctaactcttccattgtcatgtttgtctccttgcaggcatcatgacctgtttgcaactctgttccgagatcttcagacatcatgagcactgaatcagtggatcgcagcatggccaggaactgcaggtctctgccttttaagcttgataccatcaaaatgatcaatgtactggactagatatataaatcgattgatgtatttggtttcggagtgctagatttttcgtcattcatacatagaacatgaattgatttacgtgaaacaatttatgtaagtcttctgttccagattactactatgtttgaaaactttgaactgattagttgagcaaaagaaaatttacctgtggatgggtcatgcagggcgagaggaggaggaggagggcgtgtgctccatggggaccaccagccacagaacggggcactcctggagcgttggatcagctgcgagggacaatccgacggccgagatgcgtccagtgcaggtatttaagcgcaatgctgcttctccttgcgcggtttgctgcacaaccactttctgcttctccctccctcacaggctcacgcattctcatctcaagagcactagtggcgaaagataaagggcaaatgttatatccaattccgtctgcatcgcctttgattttagcctgaaagaactaataatttcactgtgatatgattcacaatctgaaaatgaaagagctaatatcactcatcatatgctttaattttcagtaacctactccctcctctcattcctttaatctaatgttatactcattcagtgatccagctctttcagcaatctgtaaagaaaagagatcttcaaacgagtagattaacaaaagcgtaaagtgtctagagtttttggaggcgtcaccctaaggtggccgtttttcttttcttttggggggcgttagctgcggctagcaccctgctcgactgtctaaggtcgattctgtaaccttcgtgacaccctctttcttcttaatacaatttgggcgacctctttcggctgtcccggcaaatctgtaaagaaaaacaggacctctttttaccttataaagagaaaccaatccactaagctggaaacgcaataacttttaacactgccatctaactccattggcatgtttgtcttgtagatggctatgagctgcatgcggctccattctgagatggcccttcagacatcacgagcactggaatcggcggatcacagcaagaccagcagcagcagcagcagcagcaggtctctctaccttctaagcttgataacatcatcataccatttgccaacatgatgtgatcgatgtactggattaatttgtaaaaaaaacttatattatcttgccatgtaatattacaaattccagttcagctaatcctgctacagtctacatgatttttttttgtctgggatttgaaatgttagaattttggtcatccatgcaatgatgcaaaagaacatgacttgattagtgtggaaattgtatggaagctgtcatgttccagattaggagtatgtgtggaaactgtactcagattgatgaactgactagttgatgatgagtataaaagagaactacacggggatgagtcatgcaggctgagggatccgtggggaccaccagccacagg

SEQ ID NO: 4876 - DNA, 2000 bp, Oryza sativa
ttgggttggaattggggagaagaattcgcggatcgggactcgggaggtgattaatctcctagtgccttcgagacgccacaaacgggtagggccgctccgaactaagcccaaggaggaggacggcgacagcaacaggtggcgaattacgctgcgataaatctgctttcgccattgatttggctcttgattatgcttattatgcaactctatttgcatactacaccttcttttttctgtgggggagcatattggtccttttgactgttacattgggcttcattgccaaaaargaaaaaaaaaagcaactgatcatttttggtaaagtcaaaaattggcaatgctaaaagtttgtaaaattttggcaacataaagatatgaaagtgatgtttaatttgatgccttaccaaaatttagtatagtttttatgagtagaagttcctagaattaccaaatgttggtagggattgaaaaggttacatggtaaagtcttgtttattttgttgtcttaccaaactttgataataccaaactttggtatggttgattttagtaataaattgaataagcccataattccatgcggaattgctattatatactattcttaattgttgctctctactgttaaagaaagttcactgcactagattttaaaacactgttttattggatggaacatttagttaagggtatttgtggagctacaacaatgtaattaattaatttcagtttgttattcacggaagattcatccaactaccataattcgtggaaaaaaaacaaatttcataacataaatgaataaatggtatactacggtaccttttccgtttcgatttaccatatggtattatttacgcgtcttgtttattgtccgattttgttatacacattttgttatgaaccacaccaagacaagtttgtggagtccaagttgtgccttaattagccctcaccaggtctatgaatattacattataatttagacatgtttagattcgtactatttatttgccatatcaaatataaataattatggggagagttatttcgagccatagatttaccattaagctcttatattgttcttttgacacaataagctattatattgtttatacccacacttcatcaatccattggctatcttttttatcgtgggtgcatcaaaatgttttactatagttccctagattttgtggtgtgccaaaccaacatgtataaaaatgtaagaatatacatgaagagcaaccaaatttgaaccaagaacttcacaatccagtactaagatatagccatatactttgacacgaaggtttaaaagtaataagagcgtagccgtcatagcgtatcacataaactaattgaaaatatgtcacattcaaatatttcaaaacatccttttcaatacgaacgatgaaatcaagctttgattactctaaaaaaaccatgtagcttgttagacttcctcacccggacttagtagatagatcgctcataagcctggttggccaaattctttctattgtcatcgtgtatacggaatcgacaaccactcccttagaaaaatcgtccatgagaccaatgacatggtgtcatggaagaaatctgccaaaggaagagcagtaaaacgagcatgttcaggagggcagaattgcaaaactgcctaatcactttcccccatcgccggtcaccgcctctgctttctttttggttcggaacacgtcacgttgacggcgaccgggccagcctaattacccaacccatcgctttcgccccgtagcttccacagatcggccagatgccaaaacccacgcagcatattcccatcgtgcaacgcctgtgcgctcacagccgtcagatcaaagatcggacgggacggggcgctccgtgccgactcggaaaccgcttcacgctctggcctgggccccgcccccgcgttcggaacatgggctgaacgaaatattattctggcccatttgatccccacggctcgcacc

SEQ ID NO: 4877 - DNA, 2000 bp, Oryza sativa
tgacttttgccatacagttcactttgactttcaagtatcactccttttactcacttcttgcatgcatctttttcttctactcactattcataacttctattgtaggaccacttcaagagcaaaaagatggagatgactattaaatatataggtaactatgtttgcttcacacaggataaggttgttacacatcttattactggtctctattgtactaagttgtgaagttccctattattatttgcagatcctacctacatgatccgagctattccaagcaatgcatcagacaatgtctactgcacgctgctggcccacagtgctattcatggtgcaatggccggctatagcttcactgttggaaatgtcaacggcagacatgcctacatacctttctatgtgagtaacttcaagtgatcttatttgttcacatggaaaatgcagaaatgtagtgctcgttacacccgggcatcccatttttttcctgattatccaagagctgttcttactgcattctcatactaagcatcagttccaacttaacgtgaaatcttcccttgatggcagagggtgacatccacacggaacaaggtcaagatcactgataggatgtgggcgaggctgctatcatcaaccaaccagccaagcttcctaagccagaaggacatcgacgaagccaaagagaacgataggacggccaacaagccaccacttcccaccggcctcagccatcatgtggcaaactctttcgaccagtctgcatcatcttcgtcgaacagccagatatgaactccatcatgtggcaaaccctttcgaccagtctgcgtcatcgtcctcgaacagcgagatgaatccaatctgtagttctatatagaagctgttgctattcccgttgagaaacctgggccacgctacgcagttttgatttaatatgcataatatcacctgtatgaatccacggatactctcctggattgctggtaactacaagcgtaataagaaaagcgctattgatgaagctatttctcataagcaacactcgtgttgtgtcttgtatatgctgctgatctgaagatatgtttcgtcagctgatcgtatattgaccttttctgtctctgtcactgcagtgcaatgcgtttatgttgtggtacccaaattaggcctgcttggttactggaatactataccacttactactaagtattctgcgcacaaacagcagatcaggagtttgtcagagaatatcatcatatgctgcgtgtctcccgtcagtcccgtgccgaactgccagatgtcccggataagattcagacgaattctgggacgagccacaagatcaacaaccaagctggcaaaatcgttgatgataataagaaaacaattaccagtacgcagtacgcaaaatgcagaacgagctctcatgaaatcatggccaatgatttgatctgcacgaactgcccacacagaatgctggtcgcagtttccggcgcggcgaaaaagtcaagagtccactggccaatcatgcgcccagctgcactgaagtcaactccaacccatgtgaatatgtgatttgctcgtcaattccccagttagttgcagggtcattttatttgggtaaaaaaaattccagggccatagagggtcgaggcattgacaaagaggtggcctactgccctactggccttggtaaattcagaataggcccacccgtcagaggaaacagtccatacatatgcgacgcgtcgactacggcgctcgacaattggcaagcgacgactggacagatgtgctgagtgctgacgtggttaaactaacctcgatggtgtgataaaaggctagttgtagtaagtgatattaagaatgttaaatttgatacttatttactgggcagattaacgctggatataaaaagagcacgtacgtccctattattatgcttcagtagttcagttagctcgctgctgcctgcatgtgcaatggagcgttcaacgccgggaaca

SEQ ID NO: 4878 - DNA, 2000 bp, Oryza sativa
cggcgaccacatggccgcctccgctagtgaccacttgtagttgctccttccccgcgcctccaccttcatcaattagggcgtatttgaatgggtgcaccgcacctgcatcgcatcaagccagcaaaatccaacttgtttggttggctggaccggcccgcgagtcaggctaggcggattcaaaatcgccgtctgggccaagttgagcagaaacgcgaggggggagcatcgctgcgcatccaggctgatccggtgcagcgcaactgcacccacacaacccctcgttgcaggcgagggttacctccccgcacggccacatcccctcctcatttcactccccaggagaagaagctagggtttggggctcctgtgcaccgtcgtgggtgctccctctgctgcgaactctcgtagccggcgggagtgctcgttgctgagcgggtgtgctcgtttgcctcaccttccctcccgcagctcctcccaaacaacatctcatatcatccaggataaacccatgcaagtaaccaaacacaaccaattgcattaccctagccaggctgagggcatcctggatgagggatacggccaggctggggacatacgagaaaccaaacacacccttaatgacttccgtagccttggatgtgctcctttcttgtgccgccagctccgccaagacttggctgcacattagataagaacaaatcaagaaacaattgccattggttgaaaatatttttttttaccaagtcactggaggggagagattccccacctgaatttcattcaaactgtcaataagcaatagcacttgagtacaagatggattacagtccagattacaactaatttagagcatgaacagaggatgaaattacatttttccaagccagaataatatcacggtctttcggaccaaagcgaaccgcccagaggttaacttcctattggcattttgacagggctgaaagcagtgatggttgagcattgcggaacaccacgtcgtgtctgtgaagccagagacaccaaaggcacagcaggatgaagatcttgaaatgtttctttggagccctattggttgaaaagatattacttacatagcaatcctattactaaatctcatgcatgattgacgaatacttgcataaccggtgtttccagtttccggtatgcgagatgaatattgtcctggttcttttaacgccgttacagctgagcctaaaactgaattgtgttgttctagagtacctgcatgcaagttttaattggagatttagaaaacaccaaatcatttaatccaaagagtcgtgtagatactcctactaaaacttttaggtacctaattatgtttagtactaattagccgcagtccgtcagaggcaaaatatatcttcttgcgctgcctgtctcttgtgcaaaactgccagatcagattcagatgcattctctgacagagagaacaaattcttttacgtagtgggcaagtgcataataatcttgttggctcatagttttccggcgcggaaaataaggtcaagtcgacgggccgtggccaccgatctcgggcctccaagtccttcgcccagcaaagcagttgaccagcgggctacaagtcaactcccggcccatgtgatacactcgcctcttccctcagggtcattgacatgccgggcccacaaagaggtggccagtgtaaattctgaatagccccactcgtcagtggaagaatatctatatgacccacaaagcgaggcgctctttgttactggaatctggatagatgcgctgacgtagtgacgtggttaaattaatcaagattgagttttgtgatgatcaattggctagttattattagcttgtgacagtgagattattagcttggtcacttgtttactagctggaatgctggattacaaatagatggagcacgtccctagagagtagcagctttgctacctgcatgcatggctgcatgtgcaatggagcgtcgttcatcaccggcaaca

SEQ ID NO: 4879 - DNA, 2000 bp, Oryza sativa
tttcaatttcgtagtactgcttttgttgaatcagtggagaacaaactcttctacctacctcgcattctcgcaattgcataataatctttctttcttttagataatgattatattaaacctgacctctaacctcatgagaatgtacataagactatcatgttattataggtacaacgtaaataagttttaaaaggcagacaagcaagaggaactaaatctttcatggcaaatgattctatctgcatgttttccagttcagagcggaaaggctaatgggcgggtgatcgctcccccacccgcccagcgaaaagttagaaaaatttatgtatagaaatattatatataaaaaatttgaattcaaattcaaatttgaatcgggtatgtaaacttttgacttataaactttgggtctataaattttagatgtatagaaatactatatatagaaaatatttgaattcaaattcaaatttgaataagatataattcaaattcaaatttgaatcgggtatataaactttagatctataaacttttaggtgtataaactttagatgcatagaaatactatatatgaaaaatatttcaattcaaattcaaatttgaatcggatatttgaattcaaattcaaatttaaaatgggtatataaacttttgacttataaactttaggtctataaactttagatctatataaactttaggtgtataaactttagatgtatagaaatactatatataaaaaaatatttgaattcaaattcaaatttgaatcggatatataaacttttgacttataaacttttggtctctaaacgttagatgtgtaaactttaggtgtataaatttactaaaataggaaagtaacgcggtgccaaaaaagaaaaccaggttgagggagggaggggggaggtggagagcgaatctgatcgctaccctatctccacggcgatccatagcccatcaggggtacccagttcagagaacaagtcaagcgcctatgggccgtggccagtggccaccgatctcgggcctcgagtcgtgccccagccaagcagttgaccagctgccatccaagtcaactacgtgcccatgtgatctgctcgtctttgctctcttcccgggcttgcagccttgctgacttgcagggtcattgacatgccggtcctacaaagaggtggccagtaaaatgtcagaaaaggcccactcgtcagtgacagtccacatatatgtgtgaagacggcgcttggcaagctatgttactagacagatgtgctgacgtggttaaactaatcacgatggagtctttgtgatgatcattaggctataatagtagtactagctggagtaagtgatagtaataagatttattagcttgattaacttggttattcactggaataaggctgcgttatttcaaatgagattggagagattgtaactcgttttccgcgcgcacgcttcccaaactactaaacggtatatgttttgcaaaaaaattctatatgaaagttgctttaaaaaattatattagtctatttttgaaatttaaaatagttaatactcaattaatcatgcgttaatggctcacatcgctttacgtatcttcccaatcttctcaatcacctctccctcaaacacagcctaaggttgcgttcgtttcaattaggttcccaactccctccatctcattttctgcacacacatacgcttttcaaactgctaaacggtatgttttttcaaaaaaaaaatttatgtacgaaagttatttaaaaaatcatattgatccattttttttaaaaaaacaatacttaattaatcctacgttagaccgtttcgtttttagtacgtgggaaatgggttcccaatacccaccaasgaacatagcccgaaaaaaaaaaggctagctataaatagccasagmtmsacgatagatagagattacagttctagtagctcaccgcctgcatgtgcaatggggcgttcaacgcccgggaaca

SEQ ID NO: 4880 - DNA, 1766 bp, Oryza sativa
aawtttttttggggggtkgtggggggggggggctttgaagtaggcagcaatatgacactatcacccaaccatcccttcacaaggcattcccgttaaccattattttccaaaaaagtaaattcgtttaaacatgttagaaacttgtctaaaccagcaagtgagacaaaagttctatcaaatagtaacaaaaacttccctgaaataacagataacaataaaccaattagaaaggaatacattcacaaaagggcacttacagctacttccatctgcgtagctccatgatatgtacttgatgttgaaagcttttaaagaataacaagacaaaagaatacctccggttaaattactttatgtgtgcgcggctgcatctccttcttctctctattactataaaagttatcatttgccattcaatacaattaggctatatattttgttaattgaacaaaccagatattcagtcaaaaaaaggctgccggcttgtaacacatgacgcgatcaaatttatgctacttttttacaagttttggaggcttctaactttccgtgtgctataatctcagtgccttcagttcctccagaaaccgaggcacgtcatgcagttggagaggattaggttgttggacaaccagttggcatgttaaaaaaaatcacaaagatatgctttactatgtggaattcatccctcctaagatattcttctgactatttgtttgtctgactaattgcaggctgaccatgtgggccatagcctccatagactatattagactggagatgaagctaaactgctaaaccatttcaatttattgaaagaaaaattaaggtgctaaatgcttttgcaccacacatccagacttgcgatgtgtcctcttctcatctcactgattgggtagttctcacactaaacacgtcgagcttgattttttttggaagctaatcttcccccaaagcatccctctctaagcatggagttaagctgtttcagcgcccagtctaaatagggggacccacgagtctacgacgattcttcccttcgccatctctgcctgtatatatagcaacctcttcttcttcctcctcctcttcccatcaacagggtgatactgccagcttcttctcaactcgacataagagctccctggcttctctgtaagttccatgccttctctctctctaagccccccttttctgtaagctctagtctcttctgcaagttccctttcaagcaaaatctctctctctctctctctctctctctctctctctctcagrgagagtgagagagggagaagaaaactagagaggaaggtttgggctttcctctgcgttagagagtactattttcttgaacgggagagtgttgtttyactgaccgcattcaagaaattcacgaaaagcttggtcagacacaaatgctttgaatagttccttacaatgatcccgttttctaatcacaaaatgtcagaaatataagtgtgaaacagtcttgggtgagagctttcatcgatgactttctgtctaactcaaatttttctggtgttacatgctttttgttttctcagaaaaaaaaaacaagtaattatcatttcctttcttccttttgagaagttgcaccattatgttcaaacaatctgttttcatcctcttttgtgcttgtgtttgggtctatgcattgatcaattcagtagagcaagaaagttaaagttctgataataatattaccttcattatggtacaaggtaggggggtcactttggtcg

SEQ ID NO: 4881 - DNA, 360 bp, Oryza sativa
gtgttgtgttgattaagaatcgcatgatttgggttccattggtttgtttttgcaagagtttttgtgtttttctctgatcccctttcagctgattgaatgatcatcttctcccctaattctccatctgtctttggtggtgattgatcacttaaactctacacaatttgatattttttgcaaactttttcagaggcaagatcgttccagattgaattcgttcggtggagggcgatatattttttttcggcaaggatcgccattctcaccggtcgttcaaattcttctcctgcgttaagtggctgtgtgtgctctgttcgtcatcttcctctgctactcaattgcattggttggttggttaga

SEQ ID NO: 4882 - DNA, 2000 bp, Oryza sativa
ccccgcccccggacaagggccttctagccatttgtgttgtataaataaaactagtataataacccacgcaaattgcacggctagcataattatattctctcatataatagcatatatattttctcaatgtattattcaaatatattaaaatgataacataattttaaattttgtactaactttacaaaactactaatgtgtaatattcatattgtattttatatacgtgttagttattaattatttttaatatcaaattttagttatttgtaaattatattcctatatggactctagactcgtctttcaatatttcttttttaaaattccgaaattttcgttatctgtaaattatatttctatataaactctaggctcttctactaatattatttatttttaattttgaatttttattgtttccaattgtatctctatgtggactctaaacacatctttcaatattctttaatttttaatttcgaattcagttacttataaattgtattcctatattaactttagactcttcttcccctttttttaaaattttgaattttagttatttgtaaatagtatttttacatgaactctaaactctacttttaattttattatgtttatttcgaattttagttagttttaatttcttatatggactctatgctctacttctaatattccttatttttaattctgaatttctattattttttaattatatttctatatggactctatgctctacttctaatattcctggtttttaatcctgaatttctattatttcttaattgtatttctatatggactctattctcctcttctaatattccttattttattaattccaaatttcaaccatttctaattgtatttctatatggactctgttttcctttttctccgattaatatgagattttctaggtcgtgagagcgaacgtggaggctcctttttctattcctttaataagttaatagattcttctagccgtttgtttgtgttgtataaataaaatttttctttcttttaatatattggcgtataattttttttgcgcgtttgtgaaagaagtattcaagatagagtatattttgccaggtcacatcgagatcggagtcaaatcctccggccacatcgatcgattaacgaccttaattccgatcgatcaagctaagatcgatcgttgtctctgtttgcggtggccaccgccggccaagtcgccggagatgagatgagagattatccagtccagtttgcacatacgcgtggaccaaaccggacagagaacgcggctgcagccgcaatttatcaatgtagaacggctacgacgacggcgacggcgaagaggatgatgaagaatactttctctatttttaaatacttataccgttcacttcttaacacatatttgactatttgtcttattaaaaacttttgtgaaatatataaaactatatgtatacatataactatatttaacaatgaattaaatgataggaaagaataataattacttatttttttagtaagatgaacggtcaaatataattaaaaaagtcaactgtgttaaatatttagaaacgaatggagtataaagggagtatattatatctgaatcgaggtcgacgcgtccgtccagctaattggttctcattcgatttgcccatgctcgagttgacatttttttgggtcctcgagctctctctcgctcaaggttaattacccacttaatcactgggatttaaccgggatttggtggggaaagctaatattttaatccgttttcagtcagaaactgcaggccccgacgacgacctcctagccttagccccttagcttccttwctataggagggscaagctaccattgcaaggacaattaaactttgttcagccatcgctttgcttgatacccttctgttcagagcctacgtgattaagctaagcctggtttaatatttcgagatcggtaacgacgatcgatcgaacgccgca

SEQ ID NO: 4883 - DNA, 2000 bp, Oryza sativa
ccgagtgccacaacactcagactggccaacctgcactagctagtactacttcaatgtgagcagctcaaatcactctaaaagtagagtgtttgttacgcaggagagatcgatcgaacatgcttgcacgctagattgtcaatggagtcaaaaccctgcaagacttttaacctgacgtactgcatctcacgcgagctaccggggccctgtcagccgggtaggaggaaggatgcatgtaagtaaatacgtcgttattatcttcagaaatcctggagtgatcaactgtgtctttgctacctcgagcactggactgaatgcagattaacagcgtaattcaagcaacagagaagcataaaacatcacaaggttttcaactcccaacttctccaagctacaatacttgttcataacgtcatgcaagcttaggagaagtaattaagcaaccagttgtttaattatgagcagaaaaagctagctcagttgcagtgtggtcaacttacattatatatgtggatttggcacttgtttttggcctggtttggttcactccatctgtaagtaattaagtactacagggagtacaggaagctaactggttggagatggaacagaattattagttgcaatttatgccaggtttaagtacatgcttccaacattttcttggactgtgtattgtcaccactcagaccagtcaaagctgagcgcacaagtcctatgcaagtttctgaaagccttgtagaagaaacaaggtgattatgctgcttcaaagtaagtctgtactttggtgtttttggtgggcaccaggttagcttgttatttgaaaagcatgagcacttttgctaggagaaggagcacttgccaaattcaaaagtaggaaagacgaattgcttagagtgtgtgttggctgcgttttgctatgttgtcccaagggacagataatctgaacctgtaaaccatgaccaaatctgaactttagttaactaaagttcagacttaattacgtcaaaaagaagttcagacttacagagctgcaacccatcacctagaacttcagtttcactattccgatcttcggctggaaattagagtgtacatgtcacgctaatttcttgcaattttagtttttttagataatggaatataatatcccggcctttgctcaaaagagctacacccaattagtacatagtagcacttagaaacagagtgtagatcttaaaaaaatagaacacaccacagaggataacaaagaacccaatctaacataaggagatcacaattattgaggtgttacaaatcctgaatcacattacacagggtgcacagggtcaacttaaaaaaatgattttatttgtgatcggtacacactatgttgatcgatttgatggtggtaccgaaatgataataaattttttaattgataaaaaatgtttacataaatatcgaagtgtatagacgaagttaatcaggcaactgaaaaaaaaaaagaaaaaatgtagcaattttctctatgcttattttggtacagtttccaatgacccaatgtaatggtatataagtggtacagcaatacccaaactatacgctccatacatctgccagtgtgcacatgtacgaatgttcagagtgttcaattgtatacagttaccaatacagctagtgtttctgaatgtgatcacctgacaaatttgttcagagttatctcaacaagcaaacaaataaagagtgcagtaagcttaaaatggaagaagaaaacagtcggccaccccaccaaagcctcaaagccgggaaacttttcccgactcatgtaggagatgaactatttcatgtaaaatttatagcaaatttatgagacccctcattatctctttcttggcctttttctcctcccttcaaaactataaatacaggttcttgagcttgtcagcttccaaccaaagcaacactgcacagatcatccatcacctgcagcatttgccttctctggttggtgttcagcc

SEQ ID NO: 4884 - DNA, 2000 bp, Oryza sativa
acattaagaatacagagctgatagattagatgaaaataaaaatagtactcctactaagtggcagtatcgagcgtggtacacacgagagggaacttcctcccatcctccgtgctactagtactgcaacgtggatctcatgagatggtgtcaggccatgtcaggtccgcgcggtggagccagccggtgcgccgcgacggcacggcccgtctgatcgcaatcaaacggagccagacgctgggcagagttaaatggacccgcacgagactcgccgggcggcgggtcaccgtggaaaaatcaattcgttcgtgcccaaccctgcacgtgtcgatgaccggctggacccagatcgggttcgagaagccagaattcccggggtccgaagggctggatctggtgccgtgccgatcggatcggtcgggacggagtctgagctgtgttacacgtggttggccgacatccactggctggtggggtccggggccaatcacgcaggtggtagctcgggcccactggcagcgccttctcgagagaactctttgtctccgcatggtggccactggccagtgacaggtctttgtgctctttggctgctctcgtgttaagtctttactctttagccgccttgaggctgcaagcctgctaccatcagcccaagtgtgtgggtaggtgtggcgaccggcgacggcgtacacaacttttgaacttccacatgattagatcaactgtaggtgatttggaattgataattcaggttagggcagcgtagccagtgcgacgctatgtttgtttctgcgttgtatattggtgatgtgatcgtgttccgcgatttggcgacttgctagttgctgctactagtcagccacctttgcaaccagtccggatttcagaagattttctgcaatctcttccaaattgactactgacggactacacacgagtaactctttttttcttctaaaagataggaggaaaaacaatttcttgagtttcttgtgctaaaaggaggaaaaaggttttgctgtgcgtgctgcatagggtggtctgatgcaaatcgtctttatacattgtcttcgcccaattattgaacacgtattggtccctgcttggtgctcgcccccacacttatgccatatgtactaatgaccatctacgcttcactcaacttgcgggaagaatctcccgttgtgctcgctcttctctttattgcgttatcacgaaaggttcctctttttttctcctcatgctgtccatcgaaaatgacatgaaaaggactacagcgtaggagtcctcgacactaggttatttcttcctgggctatgatggaaattttggaagatcaaggggaactacagcgtgtctcaaaatgtgatggcaaaacggtaggtgacaacaattttgtgtgaatgcaattgggcgatagacttggagaccttggtgccgcgtgactgtgcccactaacgaactctcactgaggatctaattatgccaggccagaaaagcgggtagaaagtacattttatattttattttattaggaggtttacgattttattaggttctttagacagcctcaacccataatatctgtcggtgattgtttagtaccctagctagcttagcttggtttctcatttcctgaacaacatgataagagttatcagcttttagatgtgtatcctttgtgcttgcaagctaaaagatgaacagttaaactgaattctcagaatgcactttcttttataaaaataaggcctacggcatgggtgcagttttttttatagcgtcaccagtcatatatactcatatccgtgattggaagttttcatgctttctgctgtttatcataagttgattgctctttgaaatagatgttttccttgaaacatggtaccgcagttaaaagaactttatatctttattgtttgaaaacagagttcaaatctaattgctaagaacatatccactgtttggatgcatctgagatctatattacttagcag

SEQ ID NO: 4885 - DNA, 2000 bp, Oryza sativa
taaatttaaatagtatacaaaacgatgattcaaatgtaaaagtaagatgatgtggttttataatagaacaaaagaagaaagataatttaggccatacaaatcatagattaatcaatctaaggactaaaaataattgatgtcgtatgggttaataagagaaaattggaatagcattaactaagtgaggatgaactttattgttatataggattttgtaaaaataataaagggatatatattaaaatattatgtgaattatgtgggattacttaacatgcttgcattttaaatctctagactttaataaattaaaaaattatagataatatagcatgcttgcatgatgcttaaatgtaataattgttagtggatgatgatgcgaaatttttgcatattaagttttaggattcagttggctataactttatagtttatagtaagagctgatttggttgagaattgtttgcgacatgtaaaacgagaaagttctttaataagattaagcattaaattttataaacttaaaaagtatatttatttaacttgtaagaaaaaacttttacgcaaaaaggcattttgggtaaatggatattctgttaatgtgcgtttttgaggaaaaaaattattatctatatcttgcccccctcttcgttattccttgatctattctcattttaccatgagaagagattaattattctgtcctttttttataacgttggttagttcaattttaaactagccaacgtcatatattaaggaaataaagtaatattaattattttaagctttaaaactaaattaatatatttttttagaaaacttttatataatactttttaagaaaaatataacatttacttgttcaaaacgcgtgcaatcagaaaactagagactgtttactctagcttcatcatagagtatagatagaaaatcatcgggggaattctttatatgccacttgaaattgactgaccagtttctttatatgccacttaaaattggcttctcccattaagtttttcaacccccactcccatcactataccgtttgttgaccgctagtcaaatgttagtttttccgtaaatgaccaatatgtcctctcaactaaaaaatgtgtaaacttcaaaaatttataactaatttattttaaatccttttttatgaataaaattttgtcagaatcagtgaaaaatgctctttatattaaaaaaattgttggaaagctgcatgtttcatgtttttattgaaaatataaaaattgattttttttaccaccaccgtcacaaatgaattttcaataaaaacatgtaacatgtcgtccatgccacagtgaactaatcatagcttcagattaattgttattcatatatatacattgacactcgttattcttgatagtactagtattagattgtcatcgatattttttatatggctaatgtataatgtattctattttttcattctcatatatttgttatcgcacatcttatgggaggtgcatgaaggttctagaatacccattgatactgttagcttttttttactaattttttttctcttataatgttgatgtttatttaaagacgtgggtcgtggtgatgacatcttgtattccttttcactaatgtagatacacatttatccaaaattctttcataccagtataaaacacatgatcaacaagtggttgtcattgcctcattggaaatccctggtataagacggtaggcgtgttggcagtttgccactactgcccttgcttgactcgtttggttggttgcctaatggagtaactaacaaaaagaacaaaaaaattcatgctaaaacttgagcgttgaccgctttgactcctcttctttctccatcttcggtgcgttcacatgccaagggggtgtaacgtggcattcaattcggttaataaaaccacgaccatttccaatttgtcgttccccattcctcaattcaaacaaatctcaaccaaaaattaaaaatc

SEQ ID NO: 4886 - DNA, 2000 bp, Oryza sativa
ctttgcttaatgttctttgtacaatttgtttgtggcgtgtagatgtggatggatctatgaatgttgtgtcatgtggatgcatatcttagggtttcataattcttttattttacattttttgctgaaatgtgttatcgcgtgcgtgcgtcttaatgcagcgtatggaaaaaatatctttttaggcggactgcacaactcatccgcttgcaaaaatagattatcgcatgggccacattaagaggtccgcttgcgaaaatcgattatcgcatgtggttgggccgcccgcatgcgaaaatactgattttcgcaaatacctgcgtgtggacgggccatctatccgcctacaaagatcttttttttgttgaacgacttgcaccagacaacgtgaagttcatattgatagagcataaaaaaaattacaagattaaaaccctgggaggttgtaaccagaaaaacgaagaaaaaaagccaccgccccacgcaccgacaacaccagaacacatatccgggcgaaggcttgcaccggaccgatcacctctatgcgtgacttgccgctgctaggccgacaatggagctaaagccaggatcgcccaaaattctatcctaactgtatggataaacctttttttaagtagtgattctactaatctagtttcagagtgtaattcaattacgagatccaccaacagaaagaaaggatcaaccttattcctttgcctttgtgataattttggtttgcttcctgcagtggtagtactagaggaaataatacgatggttcgatttttgcctcgtgtgatgatttggcgatcggtcactatgtgaattggtttggttggatgtggcatggtttgattatctcatgcattagagatggccttaggttgcatacgctagtatgggcttcaaaattatatagtacctcctccgtcccataaaagtagtcgttttaccaattgctaaatatcctgtaaagattgtcgctgcagttctgtgatgccattactacttctcccgggtgattctggtccattcatttgaactgagtgcatacatattaattcttttttatttctcaagcacttaaacacactaacgactggagggcacattggtacttataactgtgagctaatttatctcataattactagaacatcaacttttgtgggatggaggtatacacaaagaattgaattagggataacaacgtaaataatcatcacattgttatccctaattcttttgctgaattctacttataattttttttattggaaatcgcgtactccctccatcacaaaatataataatttggaactagatgggacacatcttagtccaataaatctgtataagtggttcaaattcattggactaggatatgtcccattcagttttaagttgttactcctttcggttttataattcttgacgttttggacgatgacacgatctctaaaatatatctttgattatgtttttctattataactagtagtactctagttaagtagatactttcatacttccagtctgtgatgttccgtcactggttacgactaaaacgagatgctctcgatttagattttacgatcttatatacatgactaaatcggatcaatcttatatataccaggcgtacaacagaaggtctagactcggattcagctgcttgggttcaatttcggattctgctgattagtggatgttcggaagaaaataaaagagcactcggcatgcaaacaacaactctgagcatatggtcgccgatttgttttgttgctgagtccgatttgttgctggagtccgatttgtagcaggattcttttgttgctggagtccgatttgtaccaagattcccgggatataaactgtgaccgcctgatcccttgttcgcccgcatcaaccacttcttgttcctggtcctcctcttgcgtggtttcgcccttccgggccggcggccggccgtcgccgtcgacgtcgacgcagccgtgagag

SEQ ID NO: 4887 - DNA, 1962 bp, Oryza sativa
tcgcamrrttccacacaacayacgagccggaagacttaaagtgtraaactttgggtgcccactgatttgcwtataccattagacgatgcaaatcggaatgctcagattcaccggttggatttaaacaaatcggacatttaggaatgctccacaccccctagcctaaccgtagtcctctcccagcaccttcacaacctcttctctcctaacgctgtcatccatctcctgtgctagcgttgccggcgccccattcttcccatgtcctggagccacctccacctcctctccctaccacaagccgaaatgtctcggcggtggccagatccgacgtacccagacctccaggtacccggatctggtggtgtggaagtaggagatccgcggcccttctgtggcaatggccattcctttgttttccaaaggcagtggcggttctaacggatttgcatcagctgcgtacgttgagctcgagaggggaggggatggaacgggagtggcgctgacggtagctgcaacaggagataactaagtattttctctctatcctctttctgctctccctctttctctctaagccttctctctctctgatctagttgtcgtgggagtggtggaggagggagctaggccagccggtctccggtgggagtggatctgggagctaccgatctagaggaggcactgaaggccgatgtcaccgactctctctctctctctctctctctctgccgatgtcaccgacactgtgtgtgtgtttgaacaagttaattagttctggatgtttgttgcaagttgaatagccatgtgagatatatagatattttatttgcataattgaattgcaatatcacttaccagcaattgcaagttttgttttgaatctgtgggatatttgtatgaatgttgtgtgtgggtacgaatggatgtatacaaatgggtatgaatattgtgtatttgtatgaacaatagtatcaatttgccctaatcaattgcaggttcttctacattttcttttatggaatcactactactgccgattcaagaaccggcaatgatagcggtcgggcattatttccccttgcctattgccagattgaaaattggcagtgatgccagtttggagagatacaagtgggcaatcctgctagctgaataaaaacctgcttaatatatatagttcatttctcatatgatagtgcaaaatttagaagaaaaaattaattagaattgagataagatggaaaagacccaccttcccgtcccacctctaaatccttgtgtcacgaacacacgatacatagccatgtggctgttcgatcgtttcattatggcataatattattcgcaggcgttcttggaattagttgtgtggcagtttgagctatatcatactaattaacttttcctcaaatgcaagttaattacgtttgagctatatatatgtagttaaaaaaagagaggagaaagaagataactctcttggcccggtcggccggtcgtaattaagaatgcaaaacaaacttccaattcctctctgattaacgtcggtgtgaaacaatctaaaaatttcggcgcttcatatttaaaacgggcagtagttacggttcaaaaaaagccatactgggttgttaatgacttgagatacagtcactttaatctagtgtatgttcttggagcacgtgttttatttcctatgttgctttcatgacctagcactagtagctcaattttaattttgttattcaacacttcaataatgatccgcaaaggccagcaggcaaattgtctctccttcctccttatcctctcgcttttataaattaagggctaagtgagctagcaccgttcatctcatcacggtgcacatatagcacagcaaaacgtgtgcgtgtgcgtgtgcatgtgcgagtgcatgacgtgctagctactagctaagtactagctagccagtcagctccgacg

SEQ ID NO: 4888 - DNA, 2000 bp, Oryza sativa
ctcaaggcaaacataatcaagttcgagcctgagttgccctcatggaagagctctgcaatcgcagaccttggtgtcggtatcgagaacaagatcgccatgcacttcgatacagtcttctggcctaatgttgaggtgctgggaatggttggcccaacgcctaaagcatgtgggtacttcctgaacctccacaaggccaccggcaatccggtcctcgtctacatggccgccggtagatttgctcaagaagtggaaaaactgtcagacaaggaggccgttgatctggtcatgtctcacctgaagaaaatgctacctgacgccactgaacctgtgagtttgccatctcagatcatggccacagttagttccattttcgagttcgcattatctgaatgaattcgttgttcttgcgactgacaatttgcacttgttgatttgtgttattgcagacgaagtatttggtttcacgctggggttctgacccgaactcgctgggttcctactcgtgcgacctggtcgggaagccggccgacgtgtcggcgcggttcgccgcaccggtggagaacctctacttcgccggcgaggcggccagcgccgaccactcggggtccgtccacggcgcctactcgtcggggatcgccgccgccgatgagtgccggaagcgcatcctgatgcagaagggcatccctgacctcgtccaggtcaaggcctacgaggagatggccggagtcattgctccccttcagatttgcaggacctgaaaaaactgaacctgctccaccctgccattgtcatggaatctggattgattcaattgccatgcctatgccctggaatcttgatgattcaatcactcatacaagttcaagttcatgtaggggattaactgcatgaatcaaaattattaattaataattatgtaattgtcatgttattattgaataaataaatcgagatcatgcttgagatctttgtactgggacacagtttcaattaattaatgctagtaacaaccttggagtgaatgaatgtgagtagttgggctggagttgcttgttcgtcttttgctgctgtgattgcaacctgcgagggagaagtgcacggctgtctcgtctcatgcctttgcttgctttgagcctttgaccgtcgccggcggtggatggcagctgacctcgacgtcgacgtggtggaacacaaatttggcgccacgcatagttctgaagatgacaggtcatcttgtgactacaataaaacgctacttccttaaaaaaaattcagtttttaatacaacatttaactctccgttttatttaaaaatcttctaattagtatttttattttcgttagatgataaaatgtaaatagtattttatacgtaactatatttttaaatttttataaatactagaaaaaatgttcgtgctgaagtatattttaattgggtgaagtatattttaattttattattgttatatggattagttaagatgaaatttattgtgggagttcgcttggatatatatttttttagaaaatcatgagctgtggttaggagttcgagatcgtctcaaggtagtatgcgagttttttaaacagacttcttatatgattccttctgtattacaaaaataaataattttaaaaaccgactcaaatatatatatatatgtatttactccatcgtcacttagagatttgggagggagaccggttgagctgacatgtccacgatggcagaatctcccaagattccacgtggaaccctaaccttccctttccaaaaagaaaacgagagcccttttcctattgacgcacgtgagcgcaccgcttaagccacgctacccacgctacgcctctctatacctaacgctttccccgaactccaagagrtycmaaaaaaaaaaatctcaaacggcaaagtcaaaaaaatactactactccgacacgaaaaaccaacaggaaatcgggggaaaaaaatctctgtccattcgttcgcttctccc

SEQ ID NO: 4889 - DNA, 2000 bp, Oryza sativa
gtcgaacacttccaaccccgcgccggcgaccctgccctccgccagcgcgcgcaccagctccgcctcgtcgacgttggcgccgcgcgccacgttcacgaccacgccgcgctcccccagcgcgtccagcacgccccggtccacgatgcgccgcgtctccgccgtcagcgcgcacgccacgacgagcacgtcggagctcgcggcgaggtcggtggcggtcgggaagtaggcgtaggccacgtcctcccttcgccggcggttgtggtaggagacgacgcagccgaacgcctccagtctcctcgcgatcgccgaccctatgctgccgaggccgatgatgccgacgcgcctcccgccgatcttggatccgagggggaggaaatcgccgccgcgctgctccggacagaggccgcgccggacgaagcggtctccggcggagacgtggcggagaacgtcgagcaggaggccgacagcgtagtcggcgacgtcggtggagtagatcccgccggcgttggcgacctgcacgccgcggcgcgcgcactcgcggaggtcgatgtggttggtcccggcgctgacggtgatgatgcagcggaggraggggacggcgtcgagcagctcggcgccgacggggatgggcccgccgccgaagacgaggacgacgcgaggtgggtcggcgtkggcggccacggcggcgaggaaggcktggatgggaagcscggaggcgtagaagtcgaggaggcggaatcggtgggcgacgtcggtgaaggtgcccgggaacagccggcacagcaagagcaccggcggcgacgacatttctctttctttttttttggtgatttgttgctttctttttgggtggtttcgggcatcgaccatgccatttgttgcgatgcgatatgcgacatttttgctgtagcgatcatgacctgataactgacatccttaaaagaaaatggaaatgtcccttaaactgttcaattaaactttgaagtcgggtgttcaatcgccttagacactgtaagatgatggttttgcggagtgtcbgattcacatatatatggatgagtttcatyccgtgatatataaattggacatatatgttaaaatctctacctaaatctttcattttgctcctagtatgatatcactataggatataaattggtaattaatcgatgattgataatacgtgaacatgctatattagttcttcaaaaccacttatttaagcttgcaaataccctaaatcactttaggggggtgtagtggtggagctagaatgatttttttgagcccgagcaaacttcaatataaataatatttgctatagatatttaatcatcaatttactattcaatattaaaattcaatggagtctttgccgacaagcccgggtgattagccggctagctagcggagcggtagctcaaccactgagggttagatgactagttttaaagtttatagtgctggataaaatttattaaggttgggaactacacctcccctgcacgtaaaacagaattatccattaacacatggttaattaaatactccctccgtattttaatgtatgacaccsgttgacttcttgaccaacgtttaaccmattcgttttataatttttgtgcatccaatatttatgtcatgcttaaatatcatttgatgataaatcaagccataataaaataaatgataattacataaagtttttaaataagacaaatggtcaaacgttgataaaaaagtcaacggcgtcatacagtaaaatatgaagggagtattagctaaaataaatttggaaaaaatactaatataaatttttgaaacaactattctatagaaacctttcttaaaaagaaatacaccatttaataatttgaaaagtttaactgagttagtataagttttgaaagtcggatgctgaactcagtcttagcaggtagtatatggatttttatctaaaacagaaaaagaaatcaattccatttttaggagcatctgcg

SEQ ID NO: 4890 - DNA, 2000 bp, Oryza sativa
gaattcaaatttgatattcgaactcgagggtttagggatgtatcaagggaaactcaaggagaagtcatggaaaagattcaaaaggaatacttgggtatttgttctcgggaacatagggtggagtcaaggaaatgatttggatgaggatcgattctctcgaaatcgggagaaagatttggcaacgagttcaaggaagggagagattgacttcaagaattgggatttggatgagagggagtcgccaacgggattcaaaaaaggggatttgaatctaaatttgatacttgtacacaagggttcaaggagacgagtaaggaaacaaagtgggagtttgatactttcgggaatgggaacaattatttggagaggattcaagggaagggattgactttcggaatttgatttcggagactcgaatcggaagaggaattttcgaggtggaggattttgatttcaatgagagggaacaacaggattaaattgagatccttggcacaacttagactctcacacaaagaacgaaaattttcgcgaataggattttgccgaattagtttttaacgtcacgcaaaaagcggagcgttacatgcccgcgttccgcgtgggagccgctaggagtcgctcacctaggattcgcgagagcacgcacactgccacctccactggcgagtttaagtttgagagagagagagagagtcgtgggaggggaggagaaggtgaggagaggataaggacgaaaggactcggtcgatcgactcggctcaacagtttagggtgtcgttttatttaaaaaatcggcacctataaggttattatatgtgtcgatttttataaaagaaaaacggtacatgcgactgacaatatttgggtgtcagttttgtttttattaagaaccggcgttttgtagtagtgatatgtcatctcaccaactaaactctagatgaaaaagtagaaattctaaaacccattctatttctccacataagtatcttaggtacgtaattgctatctttttctagtagtatttatatagtcaaaaccaaccacatcagttaggacaaccaatcctattagaaatccctgacgcatttattctaactatttcctaatcttcttaattttgcactctctccaaattttgatttattagctaggtctctcaattctactggcgttccctcacacatttattccaattcattcatcaatcttctcaaatttagactacctctaaatttgacccctttcaatatacacatacaacatacatcatatcatacgtaaatctgaattttatatgcaccggtccttctcttaactatctgaacctcattcctttagggtttagtttcgatcttatcaccaaccatgctcctcagaccctcaagcaacattcaaagcaaatacatgaaactcgcactgtcttgtgcagtttgtttcaaaaagaaaaaaattcaaagaaaaaaaacatattcaaagcgaaaattcatagtcctttccacgccggtcaaaccaaagctgccatagcacctcgaaacaccaaactattgctattaacattttatctaattatctgttgcaatatagtcatcactgtgatttcacacttactaggtaggtggtctggtggaatgatgctgttatactgtcaccactcatcgatgcatgagtcaggcggtcaccatcacacacacttacattcgacgatcacaggatttgaggacatctcaacactcaacagtgtgatcgaacgcattcaacaggccgtccattaagcaatacagtacatatctcgtattctcattatgtggttgtttaaatccacgtagccatcacgcatgaagcttactggttaccctccatcagacaaacatatatattcgatctttctccggtcaagttctagcacaacaaaacacaagccaaaacaccatttaaccacctccaagcttcgcattccaagagaccgagcgactgttcagccagagattaatcagaga

SEQ ID NO: 4891 - DNA, 2000 bp, Oryza sativa
aagtaaaaaaaaataaatcccaatgataatcatatttaatttttaaaatctcaatggcaataaaaatgagaggcagcaggcgggtcgtataggagtacaatgacagagccgccgatggttggtgggtcttctagaaagtaaaaaatgaattccaatgatagttatgtttgatttttacaatcccaatgacaataaagagtatgcggcggacgagtcgtagaggagtatagtggcagtgtttgacgggttttctaaaaattataaaaaacatgaaacccaacgagacaataaactctaaaaactataaggttcaaattttaaaggttcgggcttctaaaaaataaaaaaataaaccctaatgataatcatatttgatttttaaaatctcaatgacaataaagaagggcggcagcgggcgggccgtagaggagtacagtggcaaagcaactgacggtttggcaggacttctagaaagtaaaaaatgaacccgaatgataattatgttcgatttttaaaatcccaatgataataaatagaaaagacaattgacggggcatagaggagtataatgacagcgtttgacgggacttatagaaattataaaaacgaaacccaacgagacactaaactctaaaaactataagatcctatttttaaaggtttcaaggagaatgaatagaaatagtggtagattgagcaagcaaataaaaaatgatatgagaaaagtaagacgtagcagctggtgtgactttaaaaaccatataattagaaatatggagatgataaggtttggtctttcaaagtcttaagacaacgaaatagctatttaataaattttaagcaaaatcatacttaaaaaatatataattttgtttgtgtactagccgcgcagttgcgcgggccaccagctagttgagagtataattaactttttttctttaaaatatacacaataaactatattttttaaaagattttctgtcgcacagacattatactagttctgagaaaaaactgtctatattttctcagtcaagtcaggtgtgtattgcgcagaacgaaagctcggagagaatactagcacttggtatgaaccattaggacttgctaaagacagatgaaagggttatgccaacaccagtttttgtcgggggactggtgaccgcgcaattggattggtacctctcttgtgccgtagtttcccccctcatgcacccccaaaaccccagaaaaattttgttgtttgtacacagaccgcttgaccatcagcccatcacctacgtgcggagaaccaatgacctatggaatatgtaactagaacacaaaacctaaacaaacgtgttgcacgaagtagaaagcgatagagaaagataagccgggggaccaaggaaatgatatctggatatgagttcacagcccttccagataaacggacgcccggacgaaacgaaagacgacgagtcgaggaccgtcagcagccgcagaaacggcgagagacgcccccaagccaaacgtggcttcgtggcgtgacgacgcgaggtgtttcacgccccgtatccccccgcgccgccgctgccgcgtgcaactctctctctcttcccccgcatgcactcccgccactgccgcccgcatcgcccgctccgctcccccgagcccaaccgccacagggcacgccacgaccaccacgaaacctctacgtagccacacgcccacccggcccgtagttgcgctcccaaactcgctcgcgccggcacaccaatcccgtggtcaacccaaccggccacaccgaacccacactccccactcccacccatcctgcgcctcctatttaaactccccacaactccctccattcccctccaagagcaaagccactgcagcttccatatccccggctcttccgcacacacaactcctccacctccatcgggagcaaaccgctcgagcaaccaccactcgttacagctacacatcgatctcccctctgcttcgccgttccg

SEQ ID NO: 4892 - DNA, 2000 bp, Oryza sativa
actgtatcggctatatctgacttcctcctcccctccaatggttggatcgggctttcttcgacaacctcaaacgctgcaatgtgatgacccggtgattctttctataaatgaccttgacttccttgttgtcaactgcgatggcatgaccaccacttgctccgtccgctgcttctctacgataggtttccctcctcctcgctgtcgtcgttgtagttgtcctcccgttgccatcggcatcggctacccttatggtgacatgtcatcatcgccacatcaaagccttggtgggagatagagacagacacacagagagagagagagtagagtaatcaagtgcgcgataagggggagagatgtgagtgagacaagggagagagaaatgattgaatgagtggatgggaatgattggcaggaagccggtttttttctcctagatccagtgcccagcttggagcgttttcactagaactatacttttttatacttttttgggaaattgctaaaaaaactaatcacaatttcattttggtaaatgctttcaaatataactatggtatagttgtagtaactataatataattacactatacttacattgtaactacattgtaattacaatatacctacattctaatctctatataacttagctgtaaagttgcatatttttttaatctttacaagttacattgtagttatagtataattattgtagaattatagtacaactatactgcagttatatttgagagtttttcactttaaaaaattgtggtacctttttttagataatcccttttttatgcaaaacacactcctgaagatagaggaaggataatataacaagcgctaaaaagataaatatttctatatattggaagctagtatttgttttaactcctctcctagctatccatatgcagctggccaggggaatgaagagccgccggccgatgtaattgatgatgtaattkgatctggtgagctttgaactgaattaaccaaactaccaatagttattagcttgaaactgtctcggcagctgcaggcaacagagagcgtgttgatatattcagcaattaactgcaatactgacattatcaacttcccttttaattagcatgggtgctagctcttgactaattaatcagacattcagacgttatattgccataacacacatggatgcctgaatatgcggagacgaaagggaaccaagtatactttacatggatagagaagacatggtcaatctactcgttaacgtacattcacggttatttttgttacaacttgaatgtcatattaaacttgtattgtatatttgtaaagagatatattttaatttaatttaattatcttatcatttttttaaatcttcttgagagataaaaatccatctccctatctttatcataatatgagcctgttcactttgatgccattttctgataaagttgctaaaattttaactacgtttagtttgttgctaaatttttagtaagcacatataaaatcttgccaaaatttagcaaccttgttaaaattttagcaaacataccaaaatttagcaatgctaaaacttggtaaggttgaaaatggtagtaaagtgctctgtgtttctattcacctgataacaaagacagccaagacatcatcaatctaatgcatgcatcatgcatgacaggcactggaataatctaattaattaattagtcggccaacctagctgttgactgggaattaagatagcttgaatccatcaaattaaatagtttctttcccagatgcaatcattaagagttcaagaccagttcagacttctgaggagatgaacaagtcactagctagctcatccttttcttattgaccacttcagaatcatttcatgctcagaggcctatatatatggatgcttccatggacaaaagcatagactacagctatacaagaagcatcgaccactacttgtacacaagcaaaagttccatcaacttaac

SEQ ID NO: 4893 - DNA, 2000 bp, Oryza sativa
gatgtggcttgggccgtactgaggacgcgcgagatgggcagtttcccccagcccaaattattgcttgggccatggcccagtgaacctgtgctcctgcagcccagattggaaaaagtccacttaggtcaagttgattcgtgcccctcaaccgtataaaacaagtgcaaatcgagcccttggatatagagatagacccaggggtgctaatgggtgtgttaccgctccaggcgatcaccccccccccctcctcctatactccactctctcctttcctcctcccctcttctcttcctactacaccataaatttaaaaaaataaaaaataaagttagaaaaatttatgtatagaaaatactatatataaaaaatatttgaattcaaattttaatttgaaacgggtatgtaaacttttractaataaactttgggtctataaagtaatatttgaattcaaattcaaatttgaatcgggtatgcaaacttttgacttataaactttaggtctgtaaactttaggtgtataaactttagatgtatagaaatactatatataaaaaatattttaattcgaattcaaatttgaatcgggtatataaacttttgacttgtaaactttgggtctctaaactttaggtgtataaactttagatgtgtaaattcgaggtgtacaaactttaggtgcataaatttactaaaataagaaagtaatgtggtgttaaaaaaaacccacgtggaaggggggatcggccctgatcatcccggacgatcgctcgcccattagcaaaaccgtctccaacccgtctatcctggccgaccaaccgggcgggtgggtttggatcctaaaccacgtcaaaagtcaaaacacacaaggtggagtatacatggacaactaggcctgcaatgcacatgcacggcacgggtccaatgatcgcccatgtccagagacggccgtcaaatactactagcagaacagcaaaaaggctgctgtacgtgcccgtcggtgtctcgcactctcgcggtctcgcgccgctgcagcgcgccgcaacttccaatcccattggctttagagcaaggataataagagcaagtataatagtgggctataagaaaactaaatggtgagtggataggagaagagatgagagagatgaaaagcgggctgtaagtttacagcctgcttaggcacaggaaccaagaaaattgtgagacagacatgtggaccatatatttatagtgaagagttaaccactatataagtgagctgatagataggctataagtaagcagctggctgtattattatccttgctctaatatagctcacttcctactactcccttcatctatttttgatagtcatatttccaaatctgaaaattttatttttgataggcatatttcaatccaacaacctatcatcttaatgattttctcgaatttaatgcatggctctctattcttccacacatgattggctatatgggctttgagaaatgtaaatattaatgaatcgtttgtttacgaggaatgaccagtagcatgcttaaatgaatgataagtagaactacttatccttggtctgtgtgtcaagatgaaatatgactatcaaaagtagatggagggagtattagcctatactaaagtcaacacatgtaatagattagctataaagttagctatgattttcttcttctatctctatctctcacttatatatttaatgtatttgtctttaagcttgtgttaagctagctcttgcatgagagccaacatccttctttttcttttttgtttacccctctcctccacgtaagattatagtaagcttatagctcactattatacttgctcttatactttcagctcgcagtcgccggctgtattaatattgtgcccgattttgcgagagttattagagcgttcaaaccgcgcgcgctgggccctataaacatccttccacttcttcacgtacgtacgaatcatttttcgtttcgtcagca

SEQ ID NO: 4894 - DNA, 2000 bp, Oryza sativa
ccgccacctaggattttgatgacgtgggaaacggttccgcctgctgactaggacttactatacttgctcttagagacacaaagcttgctgctggtactgctagtgtacgtgagctcgaacgaacacgagctgcactgcatgtgtacgctcgttttggtgttgtcaggtgtcagtcgcatgcagaaagagaaaacgcacgcatgttgatacaccgtcatcgtcgtcttgccaagtcgaagacaacccccgtcacctccggcaacgaacgcacgtacgagcacctccgtccctgcgtcgaagccgcgccaaccaacgccgcaataccgaggtagtacaatacatgaaacggaacatatgcgtcctccggcctctcccgcctccgctgctcgtgcttgcctgcgtgtggagaccggagagagagcaagagacgggagagggagaggcgaggagcgagaaaggaatataactaacacgtgggacccatccactgactcagcaagtctaaccatggtcaacttggcacgttagaaataaaccgttttccaaatcattcaaggagttgatttacacatatttttaaagttgagagaaaggttatacccggttttgtgattgaagggatgcgattcgatagagatgagagtgatataaaataaacttattcccaagtttaattaaaatcagggttatgcgaatcctgtgagtagataaagggtgatatggggcacgtggctgtgcatgtcgcctgtcatgtacccacgtcgccccagagaaaaagttgggcaacgtgatgcacacttagcgctcactccatggactccccttcatcagaatcggtggctagtgggtgggaccattgatgactaaaacaaagacttccgtgccctgctccacatgtcagacggaaggtgatctcatcgcatccgctggactgcttggaggaacatctacaagaccaagcataccaattcctatgtgctgggccacaccccaatatgtatgcatgggtgctatagacttcccttcacgtataaaatgagggtccatgtcaacgagatagaggatcaactcccttgagtagactaagttagattcaacgactcttgaactaagtgaataagggttcatcctctccgacttagcatatatcaccaatatccattgtaaacttatccattcatgcactgagcaaagacataatagtagagtattacgtttcttagcgatccaaacctatataaaccatccgcctccactctcttttgtacctgtcccgaccacaagtttagaaattgcacccatgccgaactctcaagggagagtattttgcctttccgctagaggagttttgtgctccaacacccaatatcacaaactcttcacgctatcccacgaagttctccacataaatatagccttcaaaccccactttaaattcaatggtttacaactagaatcaccaccaacctgtatacaattattagcgatcacgccaaaacgatgacatgcaacagttaagccacatgataatcacgtcattaatgagtagccagctccgccaatcaattatgtgcccatagtatgaacgcagaaccgctaaaaacttattttttaccaaaaagaaaaaaatacaatccctaatcttataccaaaaatttaaaccctttgctcatccatacagaattttccgtacaattacagccttcaaactatctcattaacttgaagggctattgacatagatccattcgtaccgcacggattaagatcctctaacttactttcctctaatactctaatagaggatcctcttcatgccgcacgcaacaagcacacatggcactgtagctagcggctggttgcccgacttcgcccaaattccgcaaaactgtagggctctacatgcaaaatagcctgacagctagaccccacacccaccgtccgcccactgctatacctaccccacctcccacctccaccccaccggagatcacagcgag

SEQ ID NO: 4895 - DNA, 1417 bp, Oryza sativa
ttgggggaaaaagggggggggggactcatcccctttttccttcttcagcactccctccccccttctcttcctcctcttccccccttcctctatccttctatcaacggtgatctagtagggtagggtaacttgggtccatggacaaaggcagagtatattacggggtgccaaggaatctggtcatgaaacttagacatccgtattagcttaaattcgatctaaagtagagtaaattaagcaagtggcactcatttcatttcgttttagctccgccccctgttgagtcctcccaacatccatgttggatccgcccctggaggtaggaatggaaatggtcggaaacaatattattttttattatttttatggaaatggtatcgttggaattttttctatatttatgaatttaagtaatggcaactttaatatgatgaagatgaaaagctaaattttatagaaaaaaaagtaagaaatgataccaattttttttacaaaaatagtattggcatggtcgaaaaatttccacattattttcatcgctaggagatacctatgactttaccaccaaatcattagaaggaaaaaaaaagaaatatcgtgaattacatgtcaggttaggtgtaatttgatccaacgaattacaagaagattgaaaaacctcaaacttcttggtaggtcatacattgacaaccccatggaatgatggaaaggcattatatcgagactttggaatatgacaactcatatctgggtaggaataataaatttgaaggaaaatgaagtagagggactaagggagagaggaagattccttttctttttggtctttgtgagggaggaaacatccttgtatgggctttacaattgacttccatgtctctcatatactcccccgtttcaaaatgtttaacaccgttgattttttagtacatgtttgaccattcgtcttattcaaaaaaattaagtaattatttatttttttcatatcatttgatttattgttaaatatactttcatgtacacatatagttttacatatttcacaaatttttttaataagacgaacggttaaacatgtgctaaaaagtcaacgatgttaaacattttgaaacggagggagtatattccttattattttccaatgagaaaaaaaaatacaataacaatcagaaaaagcataatttggagttctatatttttatcatcacgataatagcgacaaatacaagggtctaggtggaaagtttgaccacccaacttcccctgcaagaatggatcgcgaggagaccccagaaaagtwaaccaaaacggaggaggagcgcactcgcccaaaaaccccaaacgaaatcgaatcgagaggagaaaaggggcacgcgccgccgccgccgcccgccgctgccaccaccagccacccacc

SEQ ID NO: 4896 - DNA, 2000 bp, Oryza sativa
aagctctcgttgaccaatcgattgctagcgttttaggttgctctaatctgcaacccattgcattgatccatcatgatgatctatcgattgtacctactatcttttactatgtctcaacatatagcagcaccaacacataattaattaaccggttaagatacccttctccaacaaaagcacatccgttgttaattaactaagttagttcagttcttctggtgcgtacccttttgccacgcaagaactaccttagctttttctccagctggtgcttgctattactctatacgcgatacctaacttatacgtcaaattatatcaatatcaaaagattttaaaagtacgcaatttatataagaatgctgctcgatcggaaattaggcgtttcgatcagctggcctgcactgtacgtaagcttggagtctacttcatttatctcgacagaaattagttgctctcaatgtctccatcatttttcgtttgatatcctctacgacatgtacggagtatatctgtatatgtaaaaatatttctgattaatccatactcgaaaaacatttttttttcttttactgatacagtaaagtcgatttgatctgttgatgtgatcagcctggctgtcagcccggttgttcaattcccaagaaggttaacgtttctgcttgtccaacggccaatcacaaatcttggatcttgcatttgtagcattacttttgtaattcttcggcaggtttccattgctcagttccttttttaaaaaaattgtaccagtacgattctactgttccatcggtgtcaaatgcaatgaaccttgctaatttgttgtttcaagctgtcacgaatatattaagtcatccgatgatcttagagcatgttcattttaatgccatttttaaccttactaaattttggtaaagttaccaaaatagtggttgtatttaatttgctgccaaattaattttggtaactatataagaaatcttgccaaaattttggtaaatatgctaaaattttgtcaatgctaaaatttggtaatgttttttttcatcaaagtaaacatgcccttagtaagaagaaaggaataaaattctttgctttgttgttttctcaacatcttattgctttagatttatattctcagagagaaaataaagtcgttgccgtggaaatcagactaataccattggcaaagggcatcatctacactgatattctttcaattttgtgttgacaagtaacaaatacagtacatactgaagctcgaatttgaaaaaaatgctgtcttgtttagggacctttcacttagtaattcaactattttaaaaycaggttaaatagctcagtctcacttttcccttacaagtacaatttaatggtatctcaataaatattaagggcttctttgatttggaggaaaaatatatgaattttgaaggatttcaatcttacatgaaaaattcatataaatcactttgaaccatatccaatcctattagcaagagcttaaagcccttagaaaattttcttcgagtctatctctctcatccgaattataatgtattttatatcaagagttatcaatgagaaaaaaaaacaaccattatcattgtaactaaaccctaaaattcgaagccaaaataaatcttagatcctcctaaatctaaaagattcatttcactgctagaacctagaaggtctgtcatctaaaataaaacagaaatggttgagcctttccttttggttaacggaggaatagggaaagaaaaccgctccaggtgagccgccgtgcggcagctagatcacagggccgcaaacaataattcgcgatatttccttcaagtgggccccaccaccttcgtcttccccctttcctcagcctcctccgcgtttatattccccgtccactccgccaaaagcccctcttccgatcttcttcttcttcccccaaaaatctaattaaaatcccctcccccaaaaacccctctcacccgaatttcctc

SEQ ID NO: 4897 - DNA, 2000 bp, Oryza sativa
ttcgcckggttttttaaattttttwaccgggtcacatataatcccttttycttwatyggaaagttttttttcgcctttttttaccgcgtcgatggagtcagattcttttcagctttttccttttcttttatcggacaaatttttttttcgcccatttttttttctcctgtttttttcggatcggactatttttttcttttttcgcccggtcgatttttttaccacgatatatataattcctttttctttggaataggacagttttctttttatttttttaaactctttttaccgcgtcgatgtagtcggattcgtttcgatttttttcctttttttgctttcttttttgtcggacagatttgttttttttccacccggtttttttccgcccaggtttttttatcggacttttyytttttttttcyccacgatacatataattcatttttctttggaataggacagttttctttttawttttttaaactctttttaccgcgtcgatgtagtcggattcgtttcggtatttttccctttttttccctttttttttgtcggacatatttgttttttttccgcccggttttttttcgccaggtttttttatcggacttttctttttttttcgctcggtttttttctcccgttttttgacggacgacagaagcacctagagaagtgttttttttcttttctccaatccaatacagatcggatctcttccagggaaatcagattttttttctccagggaatcggactcttttttttcgctttttttattcattaaacggtttgtctctcggacttttttttccctttttaagggatcgggtgtttttttgccagggaccgggtgtttttttcgcccggttttttttcmmytttttttttggatcggactttttttttcgtccggtttttttgatcggacaaacttggttttttctgcccggttttttttcacccggtttttttgacggacgatggaagcacctcttattttttaagtagtagtagatttaatactacatgtatatgtctaaacattcaatgtgatatggtaaaaaaaaattttgtttgagaactaaactgtgccttattcagtcattccggatgagaaacgagacgtcgagatctatgtggaacttcgtctcggaagagcctattcggctgcctatgctacggttatgacgcagccgacactaacagtgccgcacaacacatgatacagccacagccaccgcagacaggcagccgaacatgcccgaggtcgactgtcccaatacaaagtacgatggaggagacagtatttctcgttatagtttctcgatccatcgatgcaggaacttaggcgacgcctcaacggcaatccggcgttcaagcccgcggccagcgatcgaggctgcgaatcacggcgggtcaagcacaaaccaggtgttgaccggcagtcatcacgacggcacgaaaaatcccaggcagcgcgagacgaggcggtggagtggtgaacacgtcagtccggtgacgtggcgtcccccattggctaccgcgggggcttcgccgagccgcgattggccgccgcgggaattggttacgtcgccccgagcggatacggcgtctagtgcgctctcactggacggtggggcccaccggccaggtagcggtgtttgaacattgaattggatcgttgacttggacgagtcatcgccgtccccctcccgtccggtgcctcgctctgctccagtccacacttccactaatcccttcggctcgcgcgatttaccccgaagtcttagcttaaatcaccaaaatgccatcgtacataaacgcctcgtgttcatgtgttaggctaggtcgggatggcattgtcgtgaatattccgaaaagccacgggttttctcggcctcgcgcacgctacaaatattcctccattgcatcggaatgcttgcagctttaccgagccaccggagtagcctcgtcttctccggcgagccaccggcg

SEQ ID NO: 4898 - DNA, 2000 bp, Oryza sativa
gtggccacgcgcgaagaatgggaggaagaacaccctcagccgccgcctcccgccatgtccgtccgccgtggcggcggccatggatacaattggcaagagctagtgaatcctcgggggctcaggacaccagatcgatcagggcgtttttccgctcgacgtccagtgcatcaaccgcgcgcgccccccgtgcatgcgtggtcgcgtggatggcgggaacgttgcgtcgaggactcgtggacgcatgcgtgggacactatcctaaactgtcgaggagacmactatcgttgtttgcgtaccatatgtatgtggtgtatgatcatgagattgtcatttcagcactactttgttgatgctcctgttacagatttgcagtctatcgctgagtgtactgattaggattaccgtggtggaatcagtttatctgatttaaacttatagatttgacacatgcatttacatttatggctaattattctttaagaggtagataatatatttatcgattttaaaatatgcggggccccatcttttaaatgtgttcatatggatagggtgtgcgcggatccgtttataagtacgagtgtttatatgtgttcatatggatgtgattacgagatactttcttggttgagttcatatcactagcgtaacgattgctcgcacctaggcttctcagattgccacagtatttttttccttccatcataaatatcttatgttttggataaaattagtcaagcttttgatattttgatcacaaatactccatccgtttcaggttacaagacgttttgactttgatcaaagtcaaactgttttaagtttgaccaagtttgtagaaaaaaatagtaacattttcaacccaaaacaaatttattatgataatatattcaattattgatttgatagaactaatttagtattataaatattactatatttgtcatgaacttagtcaaacttaaaacagtttgactttgaccaaagtcaaaaatatcttataacctaaaacggagggagtagtttcatataaaatacttatagtttaaaggaaagaaaaatggtgtgccgtaaattttatttcaaaaatacgatcatagcattataaactccttatattttacaaaccatttgttttaatgcaaaactaacggtcaaagttttaaacatttaacacaattttgcttttaaaacacaaatacatatacttcacccgtcaaaaaacccaattctatattgtattcaggttcaaacgtttttttagaagggattactatgcgcgaggagtgctctgttttttcctttttaagaacagagtactgcgatacaggctgcgtgcagttggcatttgtgtctatcacaacctcacaagctgtccaccctttctcactgacagtaggccccacggtccccacacgcccatcccggtcacactttctgtctgcatgcgaccacggtccagccgacgcgcactccgcccgtcactgccaggtgggccccacccccagctcacctcatccgtcacttcacttcactcctctccccgaaccccgtggagtaatcaaaaccccagcaacaacccaaccatctcatctcaaatgcacgccaaaaatctcgaaattttacgggggttttaattaccaatcaaccgctaaaccccggagtagagtagagtgatacgcgagcggattcgattcacttcacgctcacgcttgcggtttcctcatcctcgctggtgccacgtccttttcttgtcccgtttgattcttgcaagcctcctcatccagcttgtgctgctagctacgaggtcggctttggcggttgcggggggcgccttgaatccgaggcgatttggtgtctgactgattgatttgcctcacttggggtkggggggarttggggtttcttggtttcatcggggcggccgcggaatgcggtgaattggcgggagtccgttcgtggagacactttcttggccgtgagttcttggttcgtgcgcc

SEQ ID NO: 4899 - DNA, 2000 bp, Oryza sativa
cccttaacttgtcagcgaatccgattttcatccttcaatcagaaaactagatacaacaggtccctcaactgtcaaaaccagtgtataagagatccctcggtggttttgacagcggtttttggctgacgtggcgcctacgtggctaatctgacttggtcttcatctgatgtgggattgacgtggcgcttacgtggcagttcgatccggaaaaataataaacttcgtgggacccacatgtcagtttcaccaaaaaattaataaaaaaatagtgggcccacatgtcaacttaaaaaataaagattgtggggagtccctctcggctctccctcgtcctcgcggcggcaggaccatgccggcggagcggcggggcgtcggcggcaggccgcgggcgccgaaggargtcgccggcaagggcccagaagcagaaggtggcgctagcaaagcagctcaacctccgaccgcggcaactggaggtctagttccagaaccgctgagccaggtgcatgcaaagagattttctcctcgattcctcgttggcttaaagtgccgcctccctcctaacagcggccagctcgcgthaccctccggcggcgcgcctttccaaggccgagaagccgtcgggcggcaagaagaaggtaggctggctcaagaacattcaagtccgtcgccatcagcttcatccaggacaaggacagcagcggcaacagcaagtcaaccccatctacgaccacgtcctccgccgccgacgccacctcttcgtcgtcatcctcggcgtcgtcatcggagcggctcaaggcgcaccaatccggcaagtcatgcaaggagctcaccgggctgtacatgtgccaagagatcatggcgcacgaggggtcaatctggagcatcaagttcagcaccaatggccgttggctggccagcgccggcaaggaccacgtggtgtgcatttggctggtggtggaggcgagctcccaggcgtgccttccgaatgacagcaactcgggccccctcccgctgcatccccccgccgccacgccggcggacgggacgtcatcatcgtcaacgccgacgctgtccaagaagtcggtgaaggcaaagagcggcagggacacgctcccagagcccctcctgcgcgccgtcggccttcccgagcctcggcacggcggacctcacatggtcctctcccaccggagagatgagagagaggatagagataagaggggagaaagggaagacatgtggggcccacgtgggccccaccatttttaattatgttttatgtgaaactgacatgtgggtcccactgattttattattcttgcagatcaaattgccacgtaagcgtctcattagatgaagaccgagtcaaattagccacgtaagcgtcgcgtcagtcaagaccaccatctaaaccgtcgaggaacctcatctgcaccggttttgatagttgagggacccgctggatctggtttttgattgaaggataaaaatcggatttgttggtaaattaaacttattccttatgataaccttttttgtccggacgatttcaggtgacacggcctatcaaattcaaattcaacccattagacccattcgggctggatgacgtcaataaggcggggcccggaggtgagaaaggaaaggaaaggaaaggaaaacagagcatgacggtggtgtcaacggcagggagcacagcataaaccgcgtccataagtcacactctgattacactttcatccttgaaaattacgatccgtccgtatgtcatgcggactgcactgcgctgactcgttcttgctcttgttgcaatcttccaaacagtagcttacaacgatggagtcggtcagtcaatttctctcgtcaactcctctgcctcactctgcagcttcttctcctcccctctactaaatctctctagttatccaatcaccacaaagtaaagaaacaacgaaaattgaagcagcacatcgattcatcgagagtaccaattcaattcggac

SEQ ID NO: 4900 - DNA, 2000 bp, Oryza sativa
tcgcatgctaacttgagacgatcgaactcctaactgcaactcatgattttatatatatatatatatatataagcgaactccaacagtgaatttcatcttaactaaactatataacaataataagattaatatagacttcacccgttgcaaacgggcattttttctagttttaaaaaaattatcaaagagacgccataccacgtattatagtgtttatttgcgccgcaactcatacatacttatgttgacataccacagcttaataaatggatatagtccctccgtttcaatttgcttgtcccactgaataggttgtttggttaaaaattacaactaactaaatcctaatcattttacccaaagccagcattaaaatctatcaacttattaaagtaatagaaaaatgagtctccacgttcgctctcacggcttagaaattctcatatcaatcgaaaaaaagaaaaacagagtacatatagaaatacaatttagaagtagctgaaattcggaattaaaaaaaatgaatattggaagaggagactagagtccatgccgtaatagaatttcggaattaaaaaaaataagaaaattaaaagtaggttagagtccatttagaaatacaattttgaaataactaaaattcggaattaaaaaaatccatatacaaatacaattaagaaataatagaaattaaaaattaaaaacaaggaatattagaagaagagtatagagtctatatagaaatacaattaagaaataatagaaattcggaattaaaaataaggaatattagaagaagagtatagagtccatacaagaatttagaattaactaaaattaagattaaaaataataaaattaaaagtagagggaagaagaatctagagtatataggaatacaatttattttttcgaaattaaaaaataaataatattgaaaaatcagttcagagtccacgtataaatacacttagaaattttcaaaatttagaatttaaaataaataatattggaagaagaggctagagtctatatagaaatacaatagaaatacaatgtacaaataacgaaaattcagaattaaaaaaataagggatattggaagacatgtctacaatctatataagaatacaatttagaaataactaaaatttaacattaaaaataatcaataactatcacgcgcaatatgaatattacacatggctagtttggtaaagttagtacaaaatttaaaattatgttatcattttaatatattttaataataaattaagaaaatatatatgctattatatgagaaaaaaatataacgatactagccgcgcattctgcgcgggcctccatgctagtgagacaaaacataaatcccgagcaaattgcatttactaatctcaatcttgatcgatcggatataaccgagacaatataacattgatattagtaaaaacaataactatttgattatgtcagatttcactaataaaccgatacataacacttgataaaagtgacacggcagcgccgcggagtaacaagcttctccggcctcgccgccttccccatcaagccgacaacgcacgtcggctctcctacctagccgacaagcttggcggcgtggagcgaggggatggccgacgaggtctctcttctcagtcctccctctcctttcccttctggtgcagagcacgtgtaggccctacctaacgaggaacatgtgaagttgtgacccaaattgactatgtgatcttgaagagttgtgtgattagacgacgtggatataaatatttggttttcggtgttgaggtaaacgcctcctctgttgaaaaagagtacacagactctcgtctggattctggatctggatctggatctgatccaactcccacccaactctccaagtacggcagcagcactggctactgcggaggaggcgttgcgacttgcgagtggcggaggactaggaagtcgcctccgcctccgctgcagacacactggcg

SEQ ID NO: 4901 - DNA, 2000 bp, Oryza sativa
catgacaaatactgttacttttttttaagggcaagatgctagttaaacttcagtcttctcttcaggaaaacttcagagaatcttcatattagaagagcagtgatcagtgcatgcttgtggagaactaactggccatgtagggcagaaaaggtgcgtttattaagaactcatcactatgaattgttaatttcaagaacattcagaacttgtggtgtgctgggtatgtatatgagatccggaggttgagtggacagtgcaccttctcggtacaatgatactgaattcacggaataatgtggaaccgcaagtccgcaactctgcaagcttacaagtagaacttcttggcaagttgaaagttactagtacgtacagatttgcggtatagagccttgaagaaaccaaaaaaagcgaaagaaagaaaagaaaaagggagaaaagaagaagcgaaagcgaaagagagacgttgatcaggtccaggcgtccagcccagcaccgaaggctctccgcagctagatctgggcccatttgctacggcgaaaaaagacagggatgtgatcttgctagctttcgccaaagaaagctaccacgtgcattgctgcccattttactcgccgctttggacgctttcaccgtgcttctctgcaggctgcgatgattggctgcagcggtgcgatctgcctgcatgtataatctcgccttgaccagatcccaatcctccctgctgatgttsccggagcaagcgatccaaatctcctctcccaggcttttcccaaagaaaggtgaaaggatgcaaagcgaccgaccgccatgagcgacctcgcgactccttgctctctgatcaagaagttcgaagcctcaaaaagagaagaggaagggctcgtgggcttctggcgatgtcaacttggggtacgttacgttctattcctgacaagcgacaacggcatgatgggccggctgaacacactggcccggggcccatcagaagtattcacgatctgcgctggtgacgtggcaccggccggatttgcagctttgaataatttttttggaaagtggaaaaataaaagagggaaatcatcactccgcgtccagaccgcgtccggggtagtacggtaatctccggcctcctggaaaactgacacggagccggtccctcttttggaagtcatgggcaggttgactgtaccacatggcagcacgttcccgcaattcacaggccttgtccctcgacgttgcaccgtgtgaccaaaatgtcctcgcatgttgccctgtgtcctacttgctcggtgctcggtataatgatgccatccatgcacgtcatacatatatagaacttatacaagtccagataaaacataacaccgcggagaaaaaaaacgctagtaagagccaaatcatgatggattgatggggtgcacatgtatatacataccttcagacggaaagaagatattcatgcactacaaatgttacaaaatcacatcctaacatagtaccaacgacgctgacaacaccaccgcgcgagccagcgacggactcgcgcgcgtcgtcgtggactcgtggcgcccatgtcgcgtcgcggtcggtgaccgctttgcccgtcgcacgttgcgagcatcgcaacgcgtcctccactccagcctgtgccaacgagacgagggacgttaggaaagtacagccgcgcatatcttggttgattgatcaggaggagacgggggaktgaragggagagagaggaattgaagggggggtagtttggggaattcgcgggggcgcgacgttaacgggaggcgtggacggcggaacgggccggtcggggaacgggcgggcgggtataaaggccggcgaaatttcccggacgcgaggccacagatcgctcccagccattctctccgcgacggtctcgtcttccccacccctcgcctcctcgcgcgctcggtgagagaagcgaagaagaagaagaagaggaggaggaagaacgccaggctaagcccagcggc

SEQ ID NO: 4902 - DNA, 2000 bp, Oryza sativa
tagcccgcttctcttatctctcctcttttatcttctccacataagcttgtagttgacttagaaggtgtttagattccatcccaaaattttacatcatgtcacatcgaacgtttcaacacttgcatgaagtattaaatatagacttaaaaaataactaattgcacagattgtgattaatttgcgagacgaatcttttaaacctaattgctacatgatttgacaatgtggtgctacagtaaacatttgctaatgatggattaattaggcttaataaattcgtctcatggtttaccgacggattctgtaattagtttttttattagtgtccaaacaccctatgcgacaccctattattgtacttgctcttaaggctgcgttcggcagcagcacattaaggagaaagtttgtttcgttttacacacatgcttcccgaattactaaacgatgtgttttttttgcaaaaaattttctatagaaaagttgctttaaaaaatcatattaatccacttttaaaatttaaaacaattaatacttaattaatcatgcactaataactcacctcgttttatgttctctgtccccttcttctcagactcggcctaaggctccggtagtcgtatgccttgtggactatatccatgaatcacctgcttcagccctagaaaagaagcataattttggaagacaggttattaaaccacttgccacttgtgttggaataagtttcacggtgatcatgaataatggtttgaaaagaaacaaaacgataatgtaagtttcacgcaatttgcactgcgtagtttatatgccccttcaggattacaatggctctatttttttttactgtctataggacaaatggcttaaaaaaattgatgcctctctcgtttaatctgggccgggctttagggcgcgcgaatcgataaaggccaccgttgtctccccagcaggcgcggtggcgcacgcatgttgataaaaatccaatggacacaaattcggctgataaacccaaataaaacagcaacaaacgaatagcaaatccttttttttcctactccagattatataattactgatttttaaaaatatagaatctaaaatatttggaatgctgaaattattaggggactattcaaattgatgttattttcaaccatattattttttttacaatgttgcaaaaagtgaccgcatttagtttgttgccaaactttggtaaatacataggaaatcctattcaaattttggtaatattgacaacttgctaaaattttgatattgtcaaaatttgataaggtttattttggataatctgaacagcccctggtagtcatcagtttcacgagttattaattgaacacatttcttccgtgtgagatgtgacagtaggcagcggtagccggcgatgacgcaaccattaaggtggtgtttggattcacgggctaaactttagtccctgttatatcggatgtttggacactaatttggagaattaaacatagactacttacaaaaccaattacataaatgagagctaattcacgagataaattttttaagcctaattaatccatatttagcacatgtttactgtagcatcacatagactaatcatgaatcaattaggctcaatagattcgtctcgtgaattagcccagagctatgaagtaagttttatcattactctatatttcctcatcagcagataaccaaacaggcccgtcaggtggctcacgccgcggatgagcgcatccgcctcctggtgacgtttgctctgacgcgtttttctgtagttattatcaccactacataaacgctcccaccaccacacaccattattactactcctcttcacccactccacgccatctctctcgcgctctctccggagccaaggcgaggaggcggcggcggcggcggcggcggcggtgcgagacgagatcgtcgagtccggcaccccacccccgtccttcgcttcacacgaaaaggaagggaggaag

SEQ ID NO: 4903 - DNA, 82 bp, Oryza sativa
ggacgtwcaaccgctcccgcgtcgtcctcgtcgcggccgcggctgcaagctgtacgacgccgacgggcgcgagtacctcgac

SEQ ID NO: 4904 - DNA, 2000 bp, Oryza sativa
tagtagattactaagtcggtaagtcccacaccccatgtgtgttgtaagagtacaaaaggtaaactagttgcaggagcaacagtacagttaataaagtattaccaggacaattgccttttttttattaaccttttggcaagggctccacattggaattctgcagggttttgaggcatcatcactcatacaaagataatacaatacaatgcaagttgtaattacttaatacttacccttaaccaacctccaacaagggttaatgcagggtttaatgtgaggaccctttaaaggaccacatttgactttgctttgaggtaagggttcttttaactttggatttcttgatcaaccctaaggacaaatattactgcaaaccatcaagttaactactctgtcaagtgtgaaatacagtagtatggtaaaatttgtgctgaaagttggttacataagctactgttagatgatccatgacaaccctgaaacctatatcccagcttcaactaaggtgactgcaattactgggtataattgcaccgttgatcactgaggaattgcaacaagtcaattttcattccatcgatatgcaaaatatttgtctaagaggatattttccaagacaaagaaaagctattttgagatatggtaagtataattcttccaagtgattcagattcaacgaagttcacagcccactatttccttttgacttctaaagacaaaagtgaacagggtatcacatgctaatatggatgtgccaaaacattttgtccaagtagggccttgatgggtcctaacctaaggcaaacattttgggtgaccaccaactttcaacgcgtggaaagatttcatcgttcaaacgctaattagccaaccaaaatatttgattgattatcgtttttccttttaagaaaaaagacaatgaaaatgataggtaaagttgatgcaataagaaagtaaaataatttccagaaaaaaaaatcatcaccagtaatttatgatctatctatgtccaagtttgtaggattagtgatgtgtttaaaatatttaaacaagtaatataacacaaaggctttgaaaccctccttttccagtgaaacaatgtgtattcatttcccattgttctcctcattagtcattaatctgtcattttctatgaaaagaaaagaaagaaagatggaaatggaaagaacacctgttacttaagagaaataccccctacattattccctaaataaaattccctaatcttcaataggcagaattggataccttgccccatgtgcaccccaataattgctgttccaagccccaaaaaaaaacactttccaccaacatcccacctcaccccaaccaactgacgcaacggccccacctccctgtccccacatgtcattgtcacacacacgcgcgccccattggacatagcctagtactaccttcgtcctaaattaatggtcgctttgactttttttatgtaatgtttgaccactcatcttattagaaaaaataatgcaaatataaaaaattataagtcacgtttaaagtacttttgataataaagcaagtcacaaataaattaagtaataattctattttttaataagatacaaacagaaactcagagcgacaagtctcactgacaggttgtccccgtgggacccacctgtcattggcacccaccgcgccgcgtggagcgcctgccatttgggtcaccgacatgtggggacaggtgtggaccggcgtgcgcgcgggtataaacggcaaccaccgccgcttcggattcggagcctccgcctcctcgccatttacggcagcaaccgcggcggagagagacgaccgaggagagagagagagagagagagagagagagggagagctccagtggtcgccgccggcgaggaggagcagtgaatggtgcggcgcgtggggttagccggcgctcgtggatcgatctgagcgagaggggagctgctggagacagtggtgcgtgcgtccgcggc

SEQ ID NO: 4905 - DNA, 2000 bp, Oryza sativa
atatacttttaaaactcgtacaacgtataaacacctgtatttgttggtgcatgaatcacacctctcaaaggacacatgacaaaatgctatttatttcgatttgtttgttaccacgttacaaagaaccacatttattagaacacgaaaatgttttcataaacttttttttttacaattttgatatactgcttgcttataattaactaaatttcaataaggaaaatcaaatttaagaattgaatggtatatgactatatatgtgacgtctatgtacagtttgttgatttagtcgaataaaagtagcccatcaatcgtccctttccatgtgatatggtagatgtgccgaaatgctaagttttattccgatttatttgttgctagcctcatagaattgaataacatttattagaatacaaaaatgttgtcataaaaaaatttctttacatttttgatataccacatatgcttataataaactaattttcaataagaaaaataatcacgttttaaaaatagaatggtgcacgtgacttctatggacacttgttagttttctagtcgatatacaggtagctcatccatcgtccctttccgcgtgatatggtagatgtgccgaaatgccaagttttgttccgatttacttgttgctaccccgatagaattgaatcacatttattagaatacaaaaatatgttgaaacaaacctttcatgtgtgtacacatgatcatatcaatgctgactcaactcaggttagatacatgggagcgtatcctatacacacaggccctcgtggagcgtatcctatgcacacaggccctcgtgtgtacacaccgtgtacaccaactaaaaattatcaaaaaaaattttaggaaaattcatacatgtactttcaatagtattatatctacgtgcaaagtcgcatcttcaaattcattctacatagagaataacaaaaaatataaaattctgataaaattacaaccttaaaactgtcagattttttgtttttttgttacggctaaaatataataaatttgacgttaatattttaactctaggtgtaatacaattgaaagtatgtgtatgattttttctagattttttggtgacattttttagttagtgtgtacgtgtgtacacgtgagggcctgtgtgcataggatatgttgcctagatacatgacctgtccctccagtctccctgcagccaagcaaaacagaaaaaaaaaagaacacgaatccatccgttggatgcccatccgacggctcagatccatcggcatcttcgcagtgggccccacatgtcatagagcgtgggtagggacgccacaagaggttgaggttgaggatggcggctacaagcctgcaaaggctttttccttcttccccaaccaccattaatggcttcctcctcctcttcatcttcctctcctccttcctctttctttcgagtagaattctagaagaaggagaaagaaatcgaaaggcagcagctgatggttgcatgctgtgcgtcgctctcatgctcaaaaggtcaacagagttgagtccctcagctaaggcaggcaagcacgagagtcacagatacatatcccctttaatctcctctcccaccaatcctttgatccattcatcccaacttcttccatagtacaaatctcttgctcccctccctctcatctcctatctgtatctatttctatctctctatctcgtatctccttgaagaagaacagagagaggattgggaggagtagtaggtagttgatttagttttgaggagccggagaggagagcaggtgtcctggttcgtgattcgatttcagctgttctgatcgcttcttgtggcttctgtgccgtgctggcctctcgttcttgagcctttgtcgattcgattcccgcgaaaaggaggcgtctttttgtgagttaggtgtggtgcttcttgggctctactacctccgaggtgaaggtgttgttgttggtggtggtggattttcgcc

SEQ ID NO: 4906 - DNA, 2000 bp, Oryza sativa
tataggttcatagtactacgatatgtcacatctaattctagatttgttttttaaggacggatggagtatgttgttggatgtaagttcatcgatgtcaccagtagactgtccaattgagtgaagctaagtgtaaaatgggtagacagctacactaaccatgctttctctgtcgctagcatatggtaaaccgagattgattttactactgcggcatgttagagattggagcatggaattttttttttacccagaaacgtgggtagcgatttattagttttaagattgatggcccttaattctccccgtgttttgtatttgctttcactttaaaaccacattgtgtgtattttggttatgcataacttagttatgcaaagtccgagagtgttctcaatacagttatatcactttgatgtaattggatgagctcaattaagcttctattatcttaaaaatagaattgtcttgtttaaacaagacgaacgtgcattgtcgatctctaaacttgtttatcaatgacatcccagatctccaaactcttaaaatgtatttttaaatccccaagcttgttaagtgtgttattccggtcctaactagccaagacctcttcgggatcctacaaggtatgccacatggacactaaagtgacatgccacacggatattccggtcctaaattttctttttctttttctcatttttttcccacacgagtaggaacgaagaagagaagaaaaggaaagagaaaaatataaagaaaatgagttaacacccgtgtgacatgacacgtgagtgccatataggatctcaaaggtgtcgtggtaatttgacacgtgagtgccatataggatctcaaagatgtcatggtaatttgagaacaaaataatacactttaacaatatcaaggacctagataagacgaacaaatttaagtgccagcaatacactttactcttttaaatgtttatgtatgtagctaaatttttttaggataatgatgctagctgctgctagacacattatagtgtgaacgtgttcttgattggagattcttgatgccaaggcattgtagttaactacagatggacaaataaaaggatgttcctagctcattatcttaagaagaaggattgtttctagctgggctcgctagctactttctcgcaaaaaacatgtacgggagccttagatcatcaagccatccctaatattcgcctttttttatattgcatcaagaatatccccccaaaaaacggtggagcaatctgaaccctgaaagaaagatacatacaaagattttagtttacatcgacactggtctcactaccaaacattagctaccgaaattggaaaaccaccttcatttcatggggacaacatgatctctatataatctgaaatgaacatggcccatgcccctcttccttcacttctgtgtctcaaggaacctatatatgatgttgttgctgaattggaactgctgataagtaaggtgcgtgtttgtctactttaactacttgcctgttttccataattagcagacaacaatgttcttgagctcttccatcaggagcctcctgcagttcaacattcagaatgttagaaacgagtacttcaggtgtactgttgtgtaatttatgcaacacaattcaatttgttactggagaccatagttttgcttgttttcatagaagttcacaccgaatcaattataagctgaatttccaaagaaaaaaagggtgaggaaataatgcgctaactggttgcggttccctcttataaacaaccttctatggtttggggatgcaaatgttctgaattctaccaaatgagtaggctgaacataattttgagtatccgtgatcatgaagaagaattcagaatctgtctcatgcaaaacttgcttcactttcccttttacagacaacaaactgaattcatttgctgtgggacaggatatatctgtcattcagttttcaggtggcaaaaaaaaaaacacaa

SEQ ID NO: 4907 - DNA, 2000 bp, Oryza sativa
agggatttaccatgaggactttgtagctgatgaagatggtgcctggctactacaaggatggaaagggagagtaatttatgccatatccacatggaagccaaatgaatcatatttggatcagtaagattcaaacagtttttcatgtacatatgctatggtgctcaaaggtgtataggcaactgccaatctctgtatctacttgaacagtcgtaaacacaataaatgaacatatatgtatcctttatatgtattgatttgattgtacatgagcatatatagaaactaaactaaacgaagtgtataacatactttttttatacctttgaaggaggtaccagtccttccatctcaacaatatgtactatttgaaagttcaaggttcctccctaaggaccatactaaaagtcttcttgttttatttcagaacaaagtgtaaatgtgtaatagaaaactactctagtagtgaaactgttgttttctaaaaccaatgtgtctatcccttgttctttcatgcataataggttgtaatagtgcaacatctaagtgcatgtgaatggggaagcaaaaataataattttaaatacctgagaaggagacaaaaaaagctgcaagcaatgaatagctggaatcatacagcttaaacaagagactgtttgtgctccagtgacatgcaattgttctttccatctattagcaaactatttggctggaaacaactacttcattgtataccagtaaattattcttggaagtacaatttctagattatattcataacttttagttctcatattctcatattttttttactcctaagttagattactgattgtattctaaatttccaatggccggttactgtttaacgtgggattagagtaaatagcacaatacgttaaatagttagacaataactttagaatttccagtttacttatcattttcctgggcacatgatgtccttttatcagttgtcacatccttctctttggttataattgggggcatctatgtgtccaaactgaaccaaaaggcccagcctggatgaatgacaatggtgcctagtttgtaacagaaatgatcacaagaaagccatttggaatatgatctgttaccttcatgtcacagttatatgttttataaatcagaaaagtgtcaagaagaaggttacaagaaataaccctaatattaatcagccagatgtcaacaagaaagtaacaagaaataaagaccaagaggaacattaaacaattttcacatcaacaagaaaagctcacccatcagcacaactaaggagcctcagcccctctcataagggactggacaatgccactactctcaatggctcaaaataaagtccccagtttttcacctccctccttcctcaccataggccagatacatcattaagctaggtaaatactgatgtaatctctcttgctgctgttaacaattggtaacagcagtaatagtagtatacatcataaaaagtatatttgggatatattctacagtgtagttggtataccaagttaccaactcctacattttgatacaccaacattttttctcaacaaaaggtgtcttccagagtttggaggttatccatgtcaaaagtatgatttacatagcaggtaagtagtgcatacaatcttcaaaattgggtgccagagatggttttacatgtcagtttatctaggcaaaaaactatgttttgctgattacagtcctgggaggtaccagtacctccgaattttaatgttttcattcatattggcaactcctgttgttaattagcgtggcacctctcaggaccataaaagaactcttgaacttatcctattatcctatctatgacttattttgatattttagcaagttttgagaggcaaaaaaaaaagacattggctggtaaagaaacccttctaaaaggttgacttgctcttttgtagatcacaaatttctgcttcagaagcttaaagcaatgcaggtctagcata

SEQ ID NO: 4908 - DNA, 2000 bp, Oryza sativa
ggtataagaaacagtacacttgcaatgtactagtactaggtaggctggatttttcaccttttgaccaattaaaaaaactgatttaataaatagacccaaaaaacttattttaaaaatggaccattttcatggcgccaatgttattggcacgtggtctaacatctccccttgccctctagtggaagttaagtcactaatatgaaataggtcatattattggcgtcgatgacctatttttaattttttttaattacaaatagattttattgaattcttttacaaataggtgtcaatttcattagcgttgtcatgttgtaccacggcgtatgttggtgtcgagaaaatgtccatttctacaataaactttttgggacctatttgtagatattggtgaaaaattcagaccagatagatgtctacatgagttgtcctttttctttctcctgctgaaacatttttttttcctttactgcccctcgagtcttgagatatctcccttgtgcaacactgcaactgtgcaccacacgcagaagccaacaaatgctcctttattcgttgcgccctcgtcaggagtgtcggccgaggtcctacagccagacacgacccacgcaatttgcaagaaagcatctcttttgcctttcaagaaagggataaaaaggacagacgtccaaaagaaagggggtaaataaaaacgggacgtgaaaaatctaacagcattgccagtgtactgtaaaagatgacttacaagtacagcacgagtaaacgtgtagtacacgagcacggatcaacggtccggatgcatgagagcacgtggccgtccgatgaacaaacatgcgtgtggtttcaactttcaaacacggccccttccagtcatcaatgcatgaaataaataagggcttgtttggatcagtgccctactaatttttttagtgctaaaacatatgtaaattttggcactaccaattacttggtagaataaatttatattcatcttatttggtttgctattaaaatatagctaaattgtgatatcatagtgaagaaattttggcaatccaaaactgccgtaaatctggtggtctttttttttactgcgaatctgcactaggggtttcctgttcgtgctcacttcctccgtcacccggtctctcgcggcagagggcagaggcacagagggcaggttggttgggcggtgcaccgcctttaatcctcccttgatccccttcctctcctctcggctctcgcaatcaacagcagactgactgactgctcattctcactcgcatcaagtcatcaacagtcacatgccctgctagctagtaccaccatctcaccattaatccaccaccatccatgatccatccacagatccactagtacactcgtaggacaggagtatgtaacgtgcctcgtcaacacgacgcgacgaacttcatgtgacggccaccacggagcggataaaactgatgagaatatatatgagataccctgaccggtccaagccccagatctgatcgaacaccatgcgtgatgactgatgagtgacaacaactagttgccctccctccccataatataatccactatcgctccaactcaaaaaacggtcgcgataaacaaagggagaaaggcataaacaaagggagaaggcagctgggtttctcgatagaaaaagaggggcttggtgcggccgcgcgcggcagcagcagcagcaacggtgcgattttcaccgcaccacgccgcgccgcgccgagacggaaacagccggcaaaaactacacgcttcgtgaaccccggggcgcgcccaagccccaacttgtgtctttctttaggcttttttagtacagtagccacttcacatctctctcacgcctataatactacgcggtggtgcgcctcttgtctctctgtgctgctctcactatcgatcgacctctgctgctgcctcgctgtcctctgctacgtgagctcggccggctcgggtgtcgaggacgatcgagg

SEQ ID NO: 4909 - DNA, 1386 bp, Oryza sativa
acaactagggkgrtttaccatatcggccaattacatcggaaacctcaaccgattacaacaaaacaactaagggcgatataacaatatcggccatctcaaggcgatgcaaacgcaccggctattatgtatcggcaatactagccgatcatgcgttaacccaaatacttgttgtatttgtcaacaaatacaacagcgaggtgcccatggtgtcttcgtcaatcctaagatatgacatcctagtcttccgtatatgcttataggggtagagtgttcgtgtgtgcgttcattaggatgagtatgcgttcattgtgagtgtctgcatttgtattgtgtttctcaaagaaaaaaaacagtactaacaattttataagacatttaaaaagaatgggaatacatcacaatacactcccttaaaagtggatatgtaattgttgcccaagttaacatctacggcccatacaaccaccctccccaaaaccccagcccaagaccaagcccaacccaaccctttccattcattccttcctatctgttttagtgttatggattattagggtttgagattgaatcaagcaccgtggcggtggccgagcctgagcagtaggaggagtaggaaggctttcatcttcccttgctcgtgaaggaggaggagaaggaggcggagtggcgggtggagagcctgaagccccagtgggcgagacaaacatcgcccgtggactcgctagaggtgaaggagacatcggttctttatctcgagcgtggtgagctctcgcagtgatatctgtcacaacttaccaaaaaaacaactttcaaaatgaatacattaagcttatgtggagaagagagaatttgtaaaatgaagagtattagctctcacgcaagagttagttattcacaactttcaaagataaatacttaagtggatagataagaagagaagaaaaatagagataactttattatagtcatgctaactataagataagctataaaaagctcatagttggctcaaatgtggtttggattctgtgcgccgatagctcctgtcaacgtgtcacgcgctgcgcctccggtgctcttgcgatgcgttcgctacaagatctgagtcaacgtgtcacgcgctgcgcctccggtgatctcttgcgatgcattcgctataagatctgagccgcacgttggggagtagatattttgcgttttgaaccccctggaaaatggtgcgccacaataaatcacgccattagaaaccaccaccactctctttttggcgcctaatcggctaatcccctccagcttccacttctccccggttcatccgctctcaaactcttcaatcctcgattccccattcgaaatttcgagtccctgagatccccacgtttccag

SEQ ID NO: 4910 - DNA, 2000 bp, Oryza sativa
gtgtaattggtttttgtttttgtctatatttaatactccatgcatgtgtcgaaacattcgatgtgtcagcgtgaaaatttttgtttaaaaactaaacatacccttagtgctcatctttgaagacctgtagtagtccgtgcaaaataagtatattagggtgtgtttggttccacgtcaaaattagaagtttgactaaaattgaaagattgaagaaaaaaattgaaagtttatgagtgtagaaaatttttgatgtgatggaaaagctagaagtttcaagagaaagttgagaactaaacaagggcttattactctaatcctctcttgttttatattgtttttaataatcctcgtggctgtttatatctgcttagttgcaagttgcagcacagcaaaaaatcgatcagtaaaccaggaccgtccgatgttaatgcccaattaactaagatcatgggcgttgataatgatggttagtccgaatgctattgctaacaagagatttttctttgaacggtaacaagataattttaccgttgcaattacttattcgtttcctcctttcaaaatatcagtcgatttttcaggggttgacagcccccgttgcaacgcccaatagccactgacaggtggggccatctgaatttccgaggaatttcttccgaaaccgcatcatactttgcgttgagaaaaaaacaatttaaaacacacacgacccgtttccttccaacacaaggcacctccacgacgatttcaagccgcgaaccaatcgaaatttccaccctttcccgctcgcccgcgcccactgacacgtggggcccggcacgtgggccccacgcgtcagccacacacgagcgcgcccccggagaaaccggcgacgccttgataagtcccaggtttcccactcgtctttgcgagagagagtttttccgattcggccgccgcgcggccgtcacgaaccagataaaatctccacgcagttcccctcaaaaagaaatttggttgattttgatttgatttgattcgtgtgctccccgccgccttcgatccctccaacggataatcgccgccgacgacgacgattcggaggaggtaacttctttactactctctcttgcaagactggtttctttctttggggttattagcggttttggttcaaatggatggaatgcttttgtgaaatgttttgtttcggggaggttttaaagggttgttgcgatttgcgggagattttgattgcggcggatcatttttgaggaggagaaggcggtggctttgggcggatttcgcttaggtagggttttggtggattgggcggttttggggggaagttttaagcgatcgtgggcttgattagggttgtgcattcctgtagtcgaattgtttgattgttgtggagttggctttgccgttccttgtcgaaggcgatgcttgcgtgatggcacactcagttcatgttgtgacaattcttccttctttcaaaattttggcccttggattaatagttaatctttcatttgtgattttctttgaatagggtgctgcattttgatcaatacacttagcctaggaatgcattagtgtttacttccttaaatagttttatgtatcagtttattgcacatcactgtgcctggtttaggcaaatattgttcttgatgtaaaaaagtgttttttttaaaaaaatatttttaggtgttatttgcaacccttgtatgcaccaagttgaaattgtatttcctatctgggctattgcagtgccccttgaagaattaaaccacagttactgctgcaaattactgaatgcatcatttgttcagacttctgacttccaattcacaaattattttgcagaagatagtattcaagtgggttcatcaagataatttgtttgcagtgtgctggagatagtgtggtctgaccaggcttgttggggattagtgaagctaagcatcgcagatatctgacaacagagagttgatgcccatgtttgctagcacaat

SEQ ID NO: 4911 - DNA, 2000 bp, Oryza sativa
tacgtgcatccaaagtacgtatgtctccccacccctctcttcttccttccatttatggtagcaaaattttgtatataaaaaacacaacaactaaataattagaatatcttataatatattcgattttaatttgaactatgtttaccatattttggtatgtacatatataagaaacatatcatttgacataaacccctttatcgcaactaaatagtaataaaatattacaaaaagtaacatatatcatgccattgtaaatgatctcctattatctctcgtgctcactttcttatccatattttctagcgagcagttcagtacataaagaaccaacaaatgctatattaactatctattatatacttaaaaattcattaaactccctacagatcctcttaaactgtcacatggttttctacaaacactcatgagatgccatgtagtgctcaaataaattaaaagttcctagaaattatgataaaaaaatcaaaccattgattttcctttaaataggtagatccaataattataactgctacatctcacaaaaataaatccggtacccccacctccacccctaccgtatgtgagcatgcatgtacgtacgtacctccaccgtcctactcatctctgggatccaattctcatatcctatttttaagataacttttcctattttctacctagcacataatatatagaaaaataataatagctaaatgatcatgactctcaagttacatgtacttttctcagtttatttgactttttgtgttatttataattaaattcaagacccatattgcacatatttactatatataagttagataatactgctatctaactacaaatatttgagcaaaatagcacttcgaaaatgatgaatgaattcaaatgtgtgggtctaaagtccaagttcaatcatcaccaaagaagcttggaaccagaatgcacactctgggcctgaacccgatgaaggcggagctataagacattattagcaaggtggacactgacggcagcggcatcatcgacttctacaagttcctggacctaatagcgcactaaatgattagatgaaggacaaggactaagaggaggggaccagagggagacgttccatgtcttcgacaaggactagaaaacagcttcatctttgccaccgagccccaccacgtcatgtctaatgtatcaagagaggctcactgatgaggaggtcaacaatgatccgcaaggctaatggtgacaggtggatcaccacaaggagtttgtaattaaattcagaacaaaaatataaaacaagcaatttgattaaaatacacaaacaaaaaataaaaaacactaaaactataaaaaaaaataacaagattccatgtagaatataaaatatcaagagtccctataaaagtataagttataaatatctaaaatttggaataataaaataagtattaaaaaaagagatcaaatacagcacgatatgagattaagcgcaatttaaaatccctaaaaagacaatttagaataaagtaatttgatttgaatacaaagtcgaattaagaatcactcaatcactaaattcagaatacaataaatattttttaaagaatttttctatctttattgattcacatgcataacaaattgcatatatatgaagcaattaaagagagggctagcagaatggtaaaaatatatatttattaccaatgaaagtttatcgagatttcttcacgaaaaagagatataataaatactcaattaacagtagagaatacattactttaattttggatagactagttcttccatgctttgcttgctctcccttgtgaacacagagtacactcctctaaactaccaagtctcacttaagtcgacggcctccacacttcagtgaatccactccccaattaggaagactctacgcactgactcgttgctccaagtcaagctggtatcaccgtgcgcaccgacgccggccggccgcggcggcg

SEQ ID NO: 4912 - DNA, 2000 bp, Oryza sativa
stygrcccawtccaysrtsstwttrsyacyacrykkcrtwmkcgtgrcagwmcaatsagcatkmtaktyaytarwarrtggtrgcgaymctacctwkmagtgastwytcctagtskmcctmattawmtyyctgcmcatmttcckcgatyatcamayggmarmagkmsrssramrgwssckcarcktttcatcgggatacaaaatgcgtcctccaaccacaaaaccagatatgcggggtcccttagattatgcaaaactagtcacaataggtccctcgacggttttgcatcccggttttatcgctacgtgactgctgagkcgagcgyrrcgrcskasgakgcgagscscrgcrwgksagmstcskctttctttcccctcttctctcccttcctcttatcactctctctctcactcttctctctaggctcttggcaggcggcggggagggcggaggcgcgggagaagtcgacgacagggaagccggcggcggcatccttgacgcccacagttgtagacggcgatgcagttgtaagtatatctatctgattcaggaagcaatataaatttaagggggctgtatatatatatcatgtgacagaaaatcacacctcctattattcgaattttggaccattggatatgctttaagattcgtgcaaacacttaaccctatcttcttcttccgtccccccccctctgctcgagcattccgtccgatccaccgccaccatcgctaccgcccgatccactgccgccamcgccccamcacgccgcmgcccgcctcgccggctggccggaaggagtcaacgacgccggcgaggcmcccttccccaacccccctctctttcttctcaagaaggtgacagcgagattcccccgctccgccgtcttccccgtctccggcagctccccgtcgctggatccgccaccaccggccgccgcctcctaatctcatgcttgctttgcccccgccgccgacgccggcccaccaccctcctacatccccacagcttcggcggtgccgccgccgcctcgccacccgctggattccaccgcccactgccggtcctccgccggccacggccatccctctaagcgccgaggaaacccccccctaccctaaccccaaccccaaaccctaacgcgtatgctcactgtcggagttgggggtgtcgccagcgccgaagaaaaaggggagcccgctgaagttagaggagagatgccgatgcacgaatcttggcatggatccaatggttcaaaatctttaagatttcatccccaaatttcattcaaatgacatatagcaattccataattaatgcttaattgttcatgagccgatagattaatatattaattgttggcgaatcgcaacaattaaccggcgcatcacatttggcaacgtacgtacttgagtgcgtgtcacttgtcagaagcggagtctcgccaaattctttcatttcattgcactattatataagcatacgaatgcagaagtataatattaaattctgcattattaagcactaatgctagagccttgagcataaaatcattttaccggacgtacgtatatatagtgcatgtggtaatcaactgcatgcaagaattattagtttagcaccatccgttgaatggtaattgattggtcgatcgcgcaatgccaattatcaatatatatgccatgtcagtgtcaccagtacgagaataagaacgatagatacatcatatcttccaaattaaacagaactaaaatttaatggaggatgatgtgtcgatgcctgccttctccctctaaacataggagtaaataatgcatggcattataaaagataaacacagtaatgatgcatgcatggcgagcttgctcaactcattataaaagaagcaattaaggaatgccttcctcaactcattccattcatcaaatttgaaggtagctagctctagcgagcttgctctgccttggaagctaggccactaatacgtagaacgtagca

SEQ ID NO: 4913 - DNA, 2000 bp, Oryza sativa
tcccagtagcagaagcagatcttgctgactgggttcacatggccaccactaatcacacatcattaccaccacaataaccatcattatctaggggtttgtaggggttatttgttaatgacccaattgggggtggtgtgctgagcgctgaccaatcctccttatccacccgccaaaaaagaaagggcaatccgctgatgagagcaggtacaatagcaggctataaatcagctataaacatattttaaaaatataaaggaatagagaagagtagcgggctataaatttatagccagctgcagcacggactttaagatataatatgtgtataataggtgggactagatattaatagtatagtaagcaactattgtatgaattagctattacattagatatagataattaggagctaatagtaggcaatactattgacttgctctgagggagagaggaggaggacgacgcgcgcggctaccaactgccggaacgcccccgcggcggcatattccctcgtctcctccgctttctttatcgccccccgagtcgccgtccgctccgtcggctcgtcgcgcgcggcctcgacctcgatcgccttttcttcttctcttcctgctcctctgtgtgtgtgtctctctctcctgtggctacagctgagctgagctgtgcaagtgcagatcctgtttagcttagcacacagcttcagctgattgatgagtagtggggggcagagtagtgcgggactgcgtcgtcctagtctgatcgtcttgtctctccatatttgtattgaaaaaatattttatataaatatgaaatatgcgattattggttgcatatttattggccgaggtcgaagatacgaaccatttcagtttgtctgaaataatacgtgatcttgttctacgccttgtttccttttcttttatagtttgttacgttttgcagtaattttacagtcattaagaaagtatcttaagatatttaaattttacataaaatttttagtatcttacgatacttaattaataactagagctaccaaattttacaccaaaaaatacgatacctcatactttctcaaggttaataaaatttaccttaacgtttaatgtattcaggtggggagtctccctcgttgaaaactagaaaaaggaaaatttgtgattaactgagatttgataattatttgaaagttagttttttctttcataatcttggtaagatatgtgatcaagatgttccacgagaaaatgccgcggaaaatcgaactcatggcaagtcaatgaccaaatattatcatgagatatattatttatgttgttattcatatctggtgctttcggtgtgacattttgtgtctatgtggtgtggtagtttctgatttgctgaatacccattttttagcataaaacatacagtattcaaaacaaagatcacgttgtcaggatcgccgcctccagaagtccagatgaataaagcccattccagcttctcttccttgttgaactagagatccagcgaagaacaggactgaacaatatacaatcctatcttacagtgtagcgaagcacatggcacactgaacctgaacagcctgactataaccaaagagccaaatccaaatccgaattggccatcctccccgttttgttgcggcccggaaatccccaaaattcaaccaaactttgacgtcactcctcactcctttcaaaaaactacaatatttaaatcgctcgacttgattttaaaacaaaatttaaattccctggagattttctctttaaaaaggagagaaaattcaggcgaggtggctgctataaaaacacatgagcaaccagtctatctctctctctcctccaccacagccgctgcttgcttttccgatttatttttttttcttctcctgagaaaaaaaaatatcgcgcacgataatattttctcgccctcttcgcccgcttgcctttcctaattctgcgagatcgaagacctagagggcggcgcta

SEQ ID NO: 4914 - DNA, 2000 bp, Oryza sativa
ttttctggttttcttcattcactaaacacaaaagccatacctacccgagggaggttggatacatatatatagccatagctggctgctagcctattgctgcaccctcctagtctaaaattcgaaatttgaatgggatgctgtcctagagggcatccaaactgaataaagcataaaggaggcataaaggagatgctaactgctgctgtcctactaaccgcagctgtcctagcaactgaaaaatatgctaaagggtagatgctgtcctgaaaaaggtgaaactacccaaaagcaaaaagaagaatcacgaccaaggaccacaaagacttatccaacatatgmawcaaatgccatamtarargaaaaaaaataaaaaggtttaacagaaaacacatagtcgaaatgtaataaatgaggatgccatatacttagtcaggcatttcattatttgacgcttaagacctaaccaatttcagagaaactaaatacatttggcaccacaaattttcaagagcctcacccgtttaactgtgttgtagctgaactgtaggaatttgtcagagcaagagcaacaataattgctactgataattgaagaccaacaaacttctggacacgttccaaaccgaggtcctgcattaatacaataaacattagtagttgagtaggttacttaattactaaatgtctcaatgaaaaataaagggaaactaagcgctcaccttaactctgatggaaaataaagtgaaggagagaaatgcagacaacaagcagtatgaacaagacgtcccaataaatctagtgtttagaatatataggaaataagaacttgcagtggccattgaagtagagatcagaagtaatgttaaacgaatatccagatcatcaattccagggaggaacttcttcccattttcttgaagagagagcgttaaaaccaaacccatatgccaccagaccaagtmgtggaagaggaatccctgtcaaattagagagagaccaactgttaaaactacagagcacatcaccagtttgctttcatcaaggtaacaaacgggaaacatcaagtttagtcaaaacaccatcatagatatatcaatagaaggatagataattagccatataataatgaatatctgagaaacactatcatcagccactatttcagatgaaattggtacttatacttggctttcagtacacacttcgatccttacattggagaaagtatagttattcagaatttccacagtttcaacggacatttagcaggaagtaatcggcaaaagcgctaagagattaccgaagacgacagagtagtcgctttggagcacgtcgccgcagcccccgccgctaaccgggcagaacgcctcggagcccgtgagcttgatataactgaggtaggcggtctccagaaaccccagcccggcgacacccgcagaccaggtgctcgtggaaatgccccacagggacgacggcgacgcaggaggcttcactggtggcggggccggagtcgaggggttctcctgctccggtgaagagggctccgcgcagcatctgaaccgcgcgggtcgctacacaaaccacggagagtcagagccgccgaggaggctcttgtgcaagcagcrgyyggkttgggggwgtttascttgatacgccaggaggaggaggaggaggtagtggaggtggaggtggtggcgacggcgaagcgaattgatgaagggaggaaggagatggagagagtcgcggagattgtcgccatggccggcggccgaggaggtgagatgtcgcctcgagctcggaggctttcctcgcgtcaaggtgaaggatataaaatgaacttattccatgtgcataagatatgcgcgcagccttgactctctgggcccatgagccgacgtcccagatgcggctctgcgtccagcccagtagcacacgtctaacctaccggcccggaggcgcaacctgctcgcactcacctagccggcggccgcgggcgagtg

SEQ ID NO: 4915 - DNA, 2000 bp, Oryza sativa
gttcatgtgtatagaaaaattttgacgcgatgaaaaagttgaaagtttgaagaaaaagttgggaactaaaccagtcctcgatgtggactaaggctactgatcagcgatctcttcatctgatctgcattcctttcttctttttaggaaagaagaatgagaaaggttatcacgtagtactaaaaagtagtggtaattcagaaaaggttgaagctgagagtgatctgcaggctgcagcggtggtaacctggcmagtgcctaatatccctcttttttaaaagacttagtgcctaatgattctcttgattactccactcagtgtagtagtactagagtagcacttgcacaccagaagcatggtagtgcatgctgcgtgatcagtcgtttgtttgcttacgtgcgaagaattcgccaagaactatgagttagcctacacgcacagtactgtattgtatacacaggtacagtgtgatcgagctgaataaagtttgattgagtatgctcttttttaatagaatggaacgatgaatagatgaatgattttgtgatgaatgtaatagaatgatgaaaaatataaacgaacagattaactattaaaaagctgaaaacttgtttttaaaaagaaattataataaatttatatatgatccattcaacgtgatccattcatatactcaagaaatgtgtcatccactcatctactcaagacgtgtgtgatccattcaacgtttacggtgatgaaatcattgggagaaaagggagcatcaaccttggaacaacatgacaacatgctggttttcactgaataagaaaatcttatgtcaggtatagatcggtgatcagaatggatccgataattattaagagctttcggtttctctggggctgaaaattcggacggcatgttgcatgctcccctttctcctatcgttttgtgccgcaaaagcggaggtctgatggacgtcgctgggccgatccaaaccgtccaaacactgtgcccacaacgtgacaagcaaaaaamcagaacaaaagccactcgcttaccaacaaaacaaacaacaaaaattttgtcccactacctcaacgttcacaaaattcaaactggtcagaacatgaaccccgtcgcaaatcactggaaatttcatcgaatcctaccaaaacgaaccggctcgaattttgagttcggtgtgcatttgcgagctgctggctcaccgaagccggaattaagcaggcgaccggtgctagaattacgttcataaaagtattcaatacttcccaaaatataaatatttttaaagtagtgctaaatcaaatatttttaacttttgttattaatagtaaaaaaaataaaaatgatcaatcatataaaattgatgttagtagatttatcattgaacaaactataatatgcaactctttttatttaaaaatcttaattatggtggttaaagtagcacatcaaagattatgttaaagttgaataatattatattttgagacggatggagtaccaatttagcagtgcgctaccagatggattccaattcagaattcttcactgtaaaatggagtactaatctcgcggtcgctgcatttgactcgcgtgctgattgagagatgattcgagcaaaagtcccaagcggacscagtcccaatgattgcagaagaaagctmmsmattcgsgcadttgcggagcaagcaacggcctcctctggttataaagccagcagccgccatcgcccagaggtttacacggccacgagcacgagcacgagcaccacctcccccttccactccaccacgcaacgcgcgacctcagctcagctgcgcgtccgcggattcggggttatgggcatcgatcgtgcccactcccccgccatcgccgccgccgccgcgattttagccatccaaacgagcgagcgagcaaatcttgtcgaacaccagatcccccaagctcaatcattcaatcaaccgtgtgagtcgttcttgattcgattttcgag

SEQ ID NO: 4916 - DNA, 236 bp, Oryza sativa
ttatgatttgagtaacgcgacattgagagttgtttatagttgggtttatggatttagggtctcgggcaaaggcgacaattacaacttggtttagggtttaggctttatgatcaatgctatggttttgaacaaggtgacaattaagaattctattttctttttggcaggctagctgaatgatgttcctggcataggaagggtggcattgtgaagtgaagcaagaaaagttgttggac

SEQ ID NO: 4917 - DNA, 2000 bp, Oryza sativa
gtagtaagtaccctctctatctcaaaatataaatattatttttagactcagccacggtcttcaatatgctactttgatcaacaatatctttaaaagtaaaatggtttaagtagaaagagttacatattataatagtttatttaatgataaacctagtagcatgaatttgtttatataattgatcttttttattattttagtattaatagtcaaagttaaaaatatttgacttgtcactatataaaaaatgcttatatattatttttttaagtactcatcgagaacctatgatctctctccaggacatatataatttataaagaaatactacatctagtgacaatggttgtcccgtctgacttcactacatctatatggatatccattgatctcacctcactgtgttccttatgtttgagagtaccatatcaaacattagcaactatctatattctcaaatagtttccatgttaagtgccaaggcacagcaacagccatatcacatgagacagttcatctatcctctaacataaattatgttgttctttcaggtaattttaccatcgaaggtattaggtgatatcacattttcaaatgtaatgtaaaatttgatatctcaagtactaaaattttaatataaaattttggcacctgcggttactttttgaattactccattcatttcatattataagtcgtttaactttttttctagtcaaacttggagaagtttgactaagtttataggaaaatatattagtattttcaacacaaactaaacatattatcaaaatatattcaatgttagattaaatgaaactaatttgatcttttagatgttgctattttttctataaacttaataaagtttgaataggaaaaaaaatcaaatgacttataatatgaaacaggggtagtactatataatttatcttttctttcattttcctaacaccacaacagaaatcacacggctaaaaaatatcataatatatgttggcacgtaggtcgagatcgtcttgtatgccatcaggtattattaagcgtggcgctctggggcgatggaggcgcgggccacgtcaccccttttcctcccgccgtccgatcaggcatggatgggagtgatgaggcatgcggtggtggaaattttgcaaaaagaaaaaaaaaccctctgttttgtgcgtaattcgaaggaaatccctcatgaacagtaccacttaggtgatactttacgtggaggctcttctagtgtacaatgatattttgcaacaactcaccacctatctctgcaatggtattttccaaattctctctttttactaacgcaaaattgtgttttttaccaatataaatgaaggaagaaaactactccctccgttttaggttataagacgttctgactttggtcaaaatcaaactacttcaaatttaactgagttaatagacaaatatagtaatatttataataccaaattagtttcattaaatcaataattgaatatattttcataataaatttttcttrggttgaaaatgtwatwattttttctacaaacttagttaaacttaaagcagtttgactttgactaaagtcaaaacgtcttgtaaactgaaacggaggtagtaatatacaacagtacaaagagcaagagcttaaagaagattatatatgtgtgtgcatgggagttaatacaataatcctagtgactttcctctgttgcaacctccctccctgagattccaagctttccctctcaccaccaaaccattaaaggcaggcacaggcacagcagctcagcttcctcctctcctctgcactgcttcctcctgatgcttttcatggtggagatggcaagaagcttccctcttcctcctcctcctcctccccaaaggtgcaatgccctcgcctttgcatcatctttctggttaatttagcttctcccctttctcgtgtccttagatttcttggttcttggtaacgccgcctctgctgccggaaa

SEQ ID NO: 4918 - DNA, 480 bp, Oryza sativa
gataacattgatgtaayctagagtakaggtwcaacatccgacatgaaggggtagcatcacataccttgcgcagagcaatttctaacctttttttttatttcccgttgcaacggacaactgtgtctcgcttacttggcctctgtttctaaataatatttgacgccgttgacttttttaaatatataattattaattttttttctatcatttgattcattgttaaatatacttatatgtatatatatagttttacatatattttacaaaagtttttaaataaggtgaacagttaaacatgtgttaaaaggtcaacggtgtcaaatactccgaccacgacatataaaaagttaaacggtgtcaaacacatgttaaaaagttaaacatgtgttaaacatgtgtcaaatacgtatttagaaacggagggagtagtacgtaggatcttatataactgtctctcttgctctcgtcgagaagggaagg

SEQ ID NO: 4919 - DNA, 2000 bp, Oryza sativa
cagaactcaccccatacttagctaggcagtcatccactttcttgcaagacctcggacaataccaaatgagacagctaacgaaatgagaggaaacaaagacttttatttggcgaaataagcatccatcttgatgacgatcaaagtccgccgatgtggcgatgtgagagcacgtacgctgcagttctgtggcatccgtctccagtatgattcttgtcatcccaagctgcacaactttctcgatactgtggagcgccgcggtagcctcagcctacaacggtgttcgtacgtactcacatcaaaagatgcatcagtgttgatcttatatgtataaatagcagtgggggtctgagcatactaggtagagttacagtccctcctcccatctgcatatggtaaaaaattttagtggggtcttcgtggggtctctcatagttttcacgtcagtagtgggggctcgaaactccgctgccccatgctggatccgccactgcggccggtggcgattcccatttttcattcatcatcatacgtggagctcgatccaactgcagtttttcaaggtccattgtatggtaaatgatggcatcacacacctctgaacccgtgagcttcttgtcatccgcattggccttattccctgcataccaccactcaagaggatttttcattgtactcaaaactgaacctttttagttttgttcagtttatccaattactgctagtagtttatttctccgagggggtgtaccataatgtaataatctgttcgatcattgaatgcaaactaattaagcatttacaaattagtataactaacttttttatgacataaacgatttacatctgttagtataactgaatatatatcatatttgtagccgatcgtgtatatgaccatatatatatctaactaaaaaatacggaaggattcggtacttttttggtttgtctttttttcgttggtttctttttgcccgatcgcttccaggttttctgtccatctggtttttctcaaccgatccgttgcacgcacgcatagcgcgcctcccgtcatgggctcatggccacgtcaatatgtcttcacgtgtgttttctcctttaattgactacaaaaatcgattctcactttcccttatcattttcctcatgatttaccctaatagcgatcatagtgcttcactttatcgctaagctcctaccaactattgtatcactgaaaaaatatctttaactgttgcaacgcatgggtatttttttctagtgtatttaaaaggattgtatttgttctttctgaagtatttaaaatggatgatgtaatcttatcttcttcatgtagctggtgttgagtagtttctttgtgcgagggataactatgtctagtcaattctaacatttatcttccccgcaaaaaaaaaattctaacatttatcttagcaatatgttattatgatttgtctgtgcagaactgcagatatgggttcatttgcactaaagaaaaattaaaccactcctgcatgacattaggtagcagcatcttcttgttggaagacgactgctaatacagtagtcaagatgcgagtattaagtttatgacctcagaaggtcaagatgcaaatgttactaaacaattaaagaaagcagttgagcaatgggatgttccaagattaaagaaaggtgattactactcctttgaagagcatcttatattaactttgtgttgtaaaaaaatgatgagcaggtaaggcatctctgactctacatgagagcacatactttggtcattaatggtgattataatgatatattctgtatttattgtttgctgcattcagtttgattggttgctttgttcagagctgtttctaccaaatccattcaagttgaaacatctccaaaaaaaaatcaattttaaacggactgggagctgtccatgctgacccatgttgctctgtacaagctttatttaaatgtgctgcaaatttgattgcaattccatcacg

SEQ ID NO: 4920 - DNA, 2000 bp, Oryza sativa
gtgtatatataaaaaacaattcactaattgaaagtacgtttgtagtatagttttgtacaattcctttcactaattgaaagtacaatactcttcatcccagtaatatataaattcgtcatagctaaattttaatgttaagtctggcactgcacagagacagagctggcaaagttgtcttgacacgttctttccacattccagacaaatttaattaagcatcaaaactctccttaccttaaatatagcaacatttctagtgcaaattaaacatgaaagttaccgtattttggaacgaggacgtctagaccgtcaatgaaattaaggtgacatctttgaaaattgaaaatatgaagaactttgcagcaccacagaatatatgcacagagctgataaaagttgtagtaagaatatatgcacatattatctttttaagagacgatatagtataaatgcagacgcacactacttgaagttagtaccatgcacacgtgagacatgtgggcataatttggctgattgcttcaattactagaacattagcgtgctggttggcacgctttccttatagcccgatacattgttcagtgtgtgtttgaaacatgaaaattttataagatattttagcagttagttcaactttcatgttccattaaatattgtattctcttgcatatcattctgagcataatctcctgtaatgttaatttgggattgtgtgttctctacgtttccggtggacgattaattataaatgttgagtttctaataatttcttgatataattaaatactattaagtattaaaaaagtagaaagtaggtggagttaaatattagacggactctaaaaaaaatattagaagattaataagttttcttaaaaaaggactgattgtaggaaaaaaaaagttatgggaaaattgtaagcttacaaagcttgctctcgatgatctataatactcgatccaactcctaaatgctagaagcagaatttgaaattaagttttggcctatgggcggtctttgtgttcactccacccctcatttttctaggtcactacagtctgctcctttctctttttaagtaaaagcagcaaaaactttgttgggcttgagctacagaaaagctgaaaagccctgccaaattgatcagtacgtgtcgtaacactcacctcttatttaattttcttcatgtcttacttctaaccattctgtcattttccaaccatattttatttaataaggggtattgtagttttttcactccatacttgatctccctaagaaaaagggcaggaatattttatacttttggagaaagtacaattgattcgcaagatatgatgataacaggaaacagaaaaacggaggaattgaaatggtcgattggcttggtgctacacagtgatacggtagccgaggagcatgtagctctttttttttattttccttttttaataactctaagttttcttctatcggatatttgaatgcatctaggagtgatgttgctgcaaagggctataatctagatatataaatttggatctagatactttaactggacttattttaaattatgatttttatttgattggttctagaagtctctatgtttattgcaagtgatgtacagtttagaagctaatctggaagcttgcttaactttttttttctaccgcatttatctgaatatttagctgtgacaagtggaccaataggcacacatggaatgtagattaggcgtacatgggagcttagtactcctaggatttgctctggtccaacaaaaagtatctcgaagtatcggtatctcatgttatcaaatcgtttccgatcgttagatctagctaggttggacaatcagaaacgatttgatatcgtgaggtaccggtacgttgagttacttcctgttggacggaagcaaatctcttatataagctagctactccaactccaagctcattactgtgtctcgcttgctctcgtcgacaaggagaag

SEQ ID NO: 4921 - DNA, 2000 bp, Oryza sativa
tgtagtgtcatttctgagtttttccaaggcataattgagcgaggataatcctgattttatatatatagctagcttgcttcggtgtaccgccgaggcaaacctcttgaagagacaaagattgcagtttcggtgcatgaataatggatgttaatctgttagatatgatgatccaataataacgtacaccgaaactgtgtatggttcaattatagttgaaatggagccccacacacaatatagtactccttccgtttctaaatatttgacgccgctgactttttaaaatatatttactcattcatcttattcaaaaaatttaagtaattattaattcttttcctatcatttgatttattgttaaatatacttatatatatacatatagttttacatatttcacaaaagtttttgaataaaacgaatgatcgaacatgtgttaaaaagtcaacggtgttaaatatttagaaaacggagagagtattgtagcaaagagccaaacagttgtaatttctctgggaataatcaatggatgtgtgaatgtctacttcagtactattcagagatttctggcctttcgatcgataatgactagccatgtgagccgactgatccaattcatcgtctacaactagctagcgccggccactgcagctaaatagctccacgtgcaggatgtgacgtactccacaaataattggtcttctcatgctcctatttaaataaacaataagtttctttagagagcacccaagaatatgctttaattggcactgatatttattgaaatgatgaattatttaccgaaaagtaccggtggtacgattaaatctcatattgtggattcatgatttatcaatatccgtgtgcaattcacctatgagatttaaattgtaatgcacacggatattatatacttacacacgaataatgttttccttttttttccaaaaaaaagagcagattagtaaaattctgtttcttacctttgacataatcacgcgtatcatctactacatcattttttaatatatgacaccgttcactttttgataagcgtttgtctattcatcttatttattttttttgtaaatatataaaaaaataagttatgcttaacgaacatataacgataaatcaagtcgcgataaaataaataaataataagttcataattttttaaaacaaataaaatgaatgattaaatgtatctttaaaaagtcaatgctattatatattaaaaagctacataggagtatctatctacatatttctccagtcttataaaagaccaatctagtattggatgtagtatatgtaatacattctagtcatacgaatctagatatacttatgttcagatttcgttatactaggatgtgtcacgtttagttttagtttgtattttatgggacggatggagtatatgatatgatagtagtgtatatctgtcctatatttatgggacagatgaagtatatgatatgataggagtgtatatctgccctatatatgatcgatcgattccctgtagctgataacgatcgatgaaactgtatgcgagatatcacatgagattgatgagcagtgaggacggctagagatagcttagcttagcttaactagttagatatagatagatagatatagttagttgcagctggagacggatgagcatgagcatatgcgttgcaacattgctgacgccatagacgaccacgcacgagcccatgccgagtcatgccggacgcgaggaataacgaatcacccgattggccttccgattctacccctggtgaccccgaagaattacaaacatttgccactccgcgccacgtcacgctaactgacaaggtcgctcgtgcatataagtggcccttccctccgctgctccggaggatcgatcgatcgatgagcactcgctttgattcgatcaatcgattgatcgagctataggtagccaattacaagctaattaaagcagtaaccgtattagatcgtcg

SEQ ID NO: 4922 - DNA, 2000 bp, Oryza sativa
tcccccttcacattttgatagtgcaaaaccaaaaaaaaacattaaattctgtacggctcaaattagacaaacataccattatcaggttagtaccaattttcatcaaacttttttcagttctacaatcagaagtaccagattactaaaaaataattatcagcctttttgcaagagcacaaacattgataaatgagcacaaaacataagtgtaagattaccatggacaatattaccagttttcttttttcaccagttttgatacaaatttagcatttctacttacagaagtatcaggtatcaagttttaaaacatctatctagtataaggtatccagttttaaaacatctagtatcaagtatcaagtttcaaaacatctagtactaggtatcaagtttcaaaacatctagtattaggtatcaagtttagatgaaaatacctatcaacgccgaggagtgttctggttgtggtcagcgccgatgaggtattgcccgtgcaagccgaggatrtagttggcgtcgcygacgaggtatcgcgcgtggtagygcgcgatgccgaggatgtttttggtgtcgtcgacgaggttgccggccgtcgccgacgaggtrgygcgcgatrccgagkaggmkckygrtrtcgccgasgaggtatcgtgcgcgygatgccgmsgamgatctgggtrtcgycgacgatsttgcgggmcgtggccgasgaagatctgggtgtcrccgacgakgtwgcgsgcsrtrgcygasgargatctgggtgtcaccgayrccgacgaggtatcacgcgctccgcgcgcgatgccgacgaggatctgggtgtcgccracgaggttgccrgccgtcgctgacaaggatttgggtgtcgccgatgccgacgaggtatcgcgcgcgatgccgaggaggaacctggttttgcgccttgatttttggatctgggatatttaggacatatcaccgtaaatcgcggggaccgaatcgtaactaccatattaatgttgtctccttcgaacagcattccgttttgtagcgtctctcttttgatattgaagttgaaggtaagtctataaccgtttgttacccgaattggggcgcaaaaccgctccacatawaaggctccctcctaatagrtgargaataaatatggtagagaaaagagatgatgtatttattaatggcccactttaagaaaccatgggttgtaaaatatagtttttattgtgatgtcttattgacatggcatcatagacattacttatgaacactatgaattaagactgccctcatgcatcatcaacagcagcagcaaaaacagcgcgattttgctatatctcactcgaaagattttttcttatctctcactcgattttctcactcaaatttacagtgcattttcttataaattacagtgtaatttatgaaacttacactgtaacttttgtaagttacactgtaatttttgaatcttcgcatgtaaattttaaattttgtattggatttggtctttttcttgaggatatggtaatttagtgtccattatggtgtttcttaattgctttttgctttttattatatctatcggattttaattcaaagattaaaaatatgtgtgatacaatcataaaaatctttcgaaagatgtataggtactcccaaacagcgcgcacttcaagggggagagcccagctgacgtggcgtcacccagccactgacgtgtgggcccccaccccaccgcttttataacctcgccgcctcgcctcctcctctctatcttctcgctcgcctctccctctcgctgtctctcactcgcactcgcctcgctgccgccgccgccgctgcggcgcctctctcgccggcggggaggggaggtgaggtgagtgagcccgattccgcggcctcgtgagccgagcccacgtattgtcgcgtcaattttcggctgattttttccctttttttttgttgtgattctcaaggtttttcttaggtgtacggatttg

SEQ ID NO: 4923 - DNA, 703 bp, Oryza sativa
catcgataatgatatgaccatggatgatttcgtcaatctcaatacatgtcggtctgatgtatatgcttctatgtttgaaatgtgttttgaggaaaaaaagggagcattttgtaagttcatgcccttattgcattattcagtagaatttatattagatagagacatgttagcacgcgcctcatgtgtttaataaacaattcctcgtgtggatttcggcagcgcctgttccatcttcttcctcatcgatcgctattgtgatgaagtgagatcctaattacgccagcttaccatgtctgcagagaaaacactacactgaattgatggagtgtctcctgccagcacgcagtatggtccttagtactccctccatactaaaggagtcgtttagtataatgtttaagtcaaaccttgaaaatataaatcataaatagctcttaatttcttgagtttgaaaatgtaaaaattatatgaatgtatttgtcttgaaaaatactttcataaaagtatacatatatcacttttcaataaatatttttatagaaataaagagttaaagttgtgttttgaagaccgtgtcgctgtcctaaacatcgggagtactccactactacccctcccgttcatcactctataaatacccgttagagctgcagctactggaggcaattcagctagctcattctgaaccccatctctcgctgga

SEQ ID NO: 4924 - DNA, 2000 bp, Oryza sativa
accaaaacagcacccccccctttttttccccaaattttgggtcatggattagtttcacgcttataaaaatatttacttcctaaaatattttcttctactatatgaagttatttctgaagtttattttctaaaatatatttttttattaatcaattaaacaatccgtctcaatagtctgtgaaaaaaaatatatttcaacagtgtctaaatgaaaaataaaaatcgaattaaattaggcgaaatgaaaagaaagtccctgaccgaatcacgcgtggacgaggcggccgcagacagcaccacggccagtgcagggggggcccaccggcggttggtggcgggcgagcggccgcccggaggtggggcccacctcgtcagtgtcagtgtgtgcgcgtgtgttggtgggtgcgggtcgctgtccgccacccaactcctccctccccacgtcgcgcggcgcccaccgtccgatcccgaccgaatcccatcgtgcggccgcgcccacccgcctcccgtggtgagggggggcctataaatgggccgcgcgagaccaaggcccatctcgccgtgcccggtcggatctaattaatttacctcctccacctcctcctcctccccccgatcggatcggcccggctcctcctcctccgccgccgccaccgccgccgcaggtgagccgccgattcccctgtcctcgttgctggtagcgttgtcgcgtgtgtgttgctgctgctgctgctgctgctgtccggcttctcccttcattcttgcggcttgaaaagggagaggagggttttagcgttcttggtaggatcaagctctcaggttggatctgagctcgtggttggttgtcttgcggacgtatcatcgtgcctagatattgatttgtttgtgctggtttgggagggttataaggagggtttattgcttttctttcgatcttgtggtatggtagatttagatggggtttctttggttggatttaggtgttgtaagttttatttttgtcatgcttgcttattattatggatggagatggagagagaagcagtaggatgacttccttttagatgtttaataccttgatgcttatcaaacggcttgctgataaacaacatgctagagcagtggttttagtgctagtattatgtctttggctgtcagctcatttgactgttctgcggtagattcgagtcatccccttggtcttgggagttggaattcttataaatgaacggaaaatggaaaaaaaaattgattggtgccacttcaaagttaaatatgccaagacgaattgatatgtttctgctgttgttttatgctcttgattagttgatgcgcatgttcaatgatttatgatgtttgtctttgtggaaagattacatgtaaagagtatagtagaacccctaaaagctagccagcgatttcgctctttttttccaggtctccatgatatgtttacccctaaaagtggtatatttatgtgatagttacaatacatagtggcaccacgattgattatgcgtttatgctgattccggcagaaaattgttagattccttgtgctctatacctgcttgttgcgcttgtagagaatattacaaatacctaacacttgcccaaggaacttaggaacttagtcaactctttgtagggacaactattttagcccaaaattgtggtcttgtcaggtgccaacaaaacagcatcttggcgtacataagctatatagaggattaaaaggaatgttttgttccttgctactgtttttttaacctgtttactcaggacaaattttgttgcataaaccatttgttctagggatcagtattgtcctctcagtgtgttatgtaagcatttccagaaatcaattgtcgctatcagcttccctcacattagctatcacttatacccctttttttctcataggctcaccatgtccattttattcatgatatttctttgtctaaagtatgtgaaataccattttatgcagataggagaag

SEQ ID NO: 4925 - DNA, 6 bp, Oryza sativa
gtatct

SEQ ID NO: 4926 - DNA, 1692 bp, Oryza sativa
  misc_feature (1)...(1692): n = A,T,C or G
aaagccgccctkgttgggctccttaaaggcaacggggaacaagcggcggcgartttggcccargcggtttgccaagggcyttgaagsgtttccgcggytggggcnttcgggaaatttaagggctkgtgcartgcaagccggaaatkttgccgggccggytkccggarctgcctggccggcataatytcstgggtgaacgatcccgaatamtttagsgggarcccgaccgggagggtttttggggtkcggkgcaamtamtggtacgamgkggatccgttttttcccgggaarcccaatggtgggttttgaagggccggsgtttgawgtatcgccgccggggccatcacccggtccggtggcggcggamacgamaccaccgggggacaggggcaggggagtttttttttgttctttttttttttgacagttgatagagatctaaaatttttttcttatactttctctgtttcacaatgtaagtcattctagcatttcccgcattcatatatatgtctagattcattatcatcaatatgaatacggaaaatgctaaaatgacttatattgtgaaacggaggaagtggttagctaccaagaaattcttaatatctccggctctctagatttgaaggtcggccgacggaataactaaattgaccgccaagggcattttgttttcttgtagtgtcagtgacaaaatggtttacatctcaagttagtctctgccgtgccgtcaaccctggatggattatatgattgtgaccgtatatcgtatttagagtttatgttcaataaaacatgcaattatagaaatatggtggactctttaatctttactcctacttataatactgtagtttagataaaacaaaaggctatatcaattacaaactggagtatttactaatttttatatccgaattttgagcaaaaaaaaaaagacataaaagtgctaattataagcctccaaagtccaatatgaggacaaccctatatttattaatctttaattttgaaatattaaattgaaaccccaacactaattacttatgattaattccaaaactccaaaatattaaataaaacacaaaaaaacacagaaactatattactaggatggattataaaatcagtattttattttattctataatttgaaattaataattgacaggtagtaactgctgtagactattctttccatctagtaattcaatatgattcaaaatgtagtcaccatatgattaaaattttaatttgtacattatttcctctgtttcgaaagagaaggcacattttattttgttaggacaagtttttgaccaacaatactttattataatatatttaggtgacacaaaattgaatttattatattcgtattcgaaagtacttagttatcattatgcttttataatatgtatcacataagatatcctaatagagcaattgttgatcaaaattttgtcctgccgaaacaaaatatgtttttatattttgatatgaagggagtactaataccaataacctgtggagcgcatagtttagcgactagcgagtaactgaagagtcattttttcataacataagttatgtggtatacacatttctctgtttttttttaaaatgttctagttagttttacgaggtcaaataagaaaagtcaggctacaaagacatcaaaagaagaag

SEQ ID NO: 4927 - DNA, 2000 bp, Oryza sativa
ggagaataccaaataaaaagttgtcgaggctcccattttttatgtattcataaacaagcaacatctcatccttatggacgcaaaacccctgtagcctaacaaggttcttgtgctgaagctctgccaacaccagcacttcattgtgtagctgattcagtccatgcccacaactttctatgagcttctttactgctatttcttggccgtctggtaattttccctgaaacagactctttctcataagaaaaaggacctgcaaattttactcttcattttgcttgcataacagtaccttatatacagtaccaaatccgccttctccaagcttatgcttctctgagaagttctcagttgcctctttcagtgtagccaaatcaaagatcgtgcattttcctcttgccattttcttcaatactgttgttgtgttttttttttaatgcaatacatatcaataaatgtaaaataagaaaacagttcctgaacaaacatcaagctactcatcagttacttacagttgtctttctttgcagccttctttctcttgaaacgaatgaaagcataagctgacagtatcaacatcaagacaacgaagcaagcgacgcctgcagagatccctgcaactctccttctcctcgctgcatacaacaaacagacattcagagaagttgaattgatatgtgcagtgtcaaagtttgcgagaaaaaagtatcgtttcttcaatggaagaagaagaaaaagaaggcaattcttttacctgttctagtcggcggagcagcaagtgaaggcatggccggcggcggtggctccggcggcgcagaaatctgcagcattggctggccctgatagaacggcttcacgctgtacctcaggttgcaccaaatcccaagaactctccctccgggcttcccgttcaagaaccatgggatcgacgagacgaagccgccgaggcagctccggcactgcgccgccgtcatcaccggcgcgcactgcgccatcccgtaaatcttcgggtagtgcttcgggtcgaagtcctccaccgccgtggcgaagtacttcttggtgttgttgctgccgctgccggcggccacggccgtgtccaccgtcgcgttcatcagcgcgacgacggcggcgttgaaccaggccaccgggacggccgtgatgttgctgtcggcgtcggagtagagctcgctgaccggcgagttcacgccgacgaagtcgaggaaccgctggtcggagaagcggacgatgcagccgtcctggtaggtgtggcgtccttgctgctggggcagtcccgccgcgcgacgcggaacgacgccgcgacgcacgcgcggcacgccktggcgttcgcgtcgccgcggcacagcgccagcgcggacacctggtccgggcaccgcgccgacsgtggccctggcgtarccggccgccgccgcggtggacgcgttgccccggagcgccgccgcgaggacsgcgaggttcgcctcrtacgtgctgttcgccgcgtargcgccgctggcgcatgacgagaactgcatggtctgctgcgccgcggcgagcggcagcagcacggcaacgacgacgactacaactgcgagcattgccgcggccggcagaatgcaacgtacaattcctctttcccttctttgacggacgaaccttgcgcggcaactctgagcctgagcttaactaacaattttttttcttttgcaggaaaaaaacgcgcaattggcggtttttgaccgagacaatgatcagtagctctcgcccgccattacagttgcgctgtttgtcgtttgagaatattcatttcctctgcgttgccgctggtacttgtcaagttctcgtcatcagataaacgtacagcaacttgcattgccaattggctgaggtcggcatttccgtgtcggaaggtgaggcccattctccccggcgaactccggtctcgcgtcggtctccctacataagtcgcctgcctccacctcttgacagtgtcagctgtgtcc

SEQ ID NO: 4928 - DNA, 2000 bp, Oryza sativa
tgacctaaaacggaggaagtacttttttttcttctaaatataggtctgttcagtttgataataaaatgaaccttttcggaatttgataatgttaaaattttggtaaatcggcaacattgccaagttctactaggatgtgctcagtataggccctatttagttcctagggaaaaacttttcacctttatcacatcgaatatttggacacatacatagagtattaaatatagacaaaaaaaataaaactaattatacagattgcgtgtaaattgcgagacgaatcttttaagcctaattgtttcatgatttgacaatgtagtgctacagtaaatttactaatgacggattaattaggcttaataaattcatctcgtagttcacaggcagaatctgtaatctgtttgttattagtctacatttaatacttaaaatatgtatccgtatatccgatatgacataccaaaacttttcctaccacgaactaaacaaggccataatattatcaaaattctatggacattaccaaaattagatagcaaactacatatagctacataattattaattttatcaaataatgatatagtttaaaataccatcaatttaaacaagcctataatgatacgtaacttttttgcaggttcgggggaaaaattaaaaagatggagcacgtttccctacatgataaaatcgattggttttcaccgtccgctttttgtacgaatttggtcgcaagttactagagttcggctcttctggttcctatcatctcctccctcgttttccgtgcgcacgcttcttaaatgtctaaacagtgtattttttgcaaaaaatttctataggaaagttggtttaaaaaaatcataataacccatttttaaattttttttagctaatacttaattaatcgtgcactaatccatcactctgttttccgtatgggaggtaagggttcctaaccctcacctaagaacatttttctctgagggcctcttaaaatcaatttgatgcggtaatttttttttgtcaaaagttttgatagcaaaaaatttgacattgcaattttacaagttggtgtttagatgtatggtaaagtattttcattttaccattaaaaactgatttgtccatattaatggcaccttattaattgctgttgtctctgcactctagcaatctctcttgctgctgctagtgtttgtgccggagcgaaggaggcccttgtagctttccattcccggccacccatcatcgtcggagttgacgtcgaggggggccatgcctatcctgaagcactaccgttgtcggatctaataaagtggtacgggaagttggtgaaagggtcttacccgccggcgggggaaagtgaatcggcctgcgacatgaagtccctcgtgccggagccgtcgccgtccatctccggctaggtcttggactggtgcggcggacgagttcggcggaggtggaggcggatgcgggcatgagtggtggcagcgacgggtgagatcagcggaggcagagccggcatgagcggcggcgcgagcggagcaagggtgagagagcgagcggatagggaaatttttgggagcggatgagagagagagagcgagtgaggggcagtgcgcgtcccgcatggggcccaacgcttttttgccaaatttgctgctctggactcccaaatgataaatgtcaatttgtctactttttactactagtgtttagatctattttgctaaaatattgtccaaaccgacaaaaaaaaattactattttagtggatctaaacagatcctgaattttctttgtttgctgagctgatgaagaagtccgaggtcaaacaagagacaagtcacatcacttcaatttcttcttcaattttgtctctgcagcttcatcaccttgagagcagtaggggtcctatacgtcagtcacagcccgcacccggtcaaacgaagcgacagtacttagcttgacggagagcatctccgcagtccgcagcc

SEQ ID NO: 4929 - DNA, 2000 bp, Oryza sativa
agacgtgcatggtacgatatgacagaaaacaagtcactactgatttttacctcattttattcaaaggggataatactagatattaacattaagtgtattttgaaattaaatagttaagttcacacctaacatttttagaatttagctactttgcatgatagctctctgtgtttgcaatctgcaagaaactgcaggataggttacgccattattccactgatagtgggttttatggtgatctggtgattgatattaagatagaaatctatattgttatgcgcaatcaagtcatgtttatttcagttaaaatatttattatcatggtgatggaaatggtgataatccaattttacttggcattattcacatacgttttccatccataccactcagtaatgtgaaagattttgccaggtttaggtatccacataatgccatcatgaataagtcataaaattctacatcgttcttcttgcttttatgtgtaaattgatctcatttatgggaaaatcatatcaacaacagtatactctacagctaatacatacatctgctatgttctagtagtactagtaatgactggagactgattggaaatcactaccgtccatttttcgttacttcagattatctcacatcaggatacaaatgtataatcttttagattccacagctgtgcatagctgcaagccaatgcatagttaggtgtatcagggaaatgaacgaacagaatttcttcacttttggaccaactttggtttctgccattgcataaaagaacgatgcttgtttcatgtgaatggtgccttgtcaaatgaagaaacatggactagccagaatctaccaatttggttgttcaggggaatgaacggtgggcatgcctataggtgcttgcttgtctttttttgtccctcattttttaatgttgagttgcgcttttgtcgatccacattatagtgtcttcatattttctatagacaaaatataaagctaaacgagtgttctcgattagatatcacttttaggtggcccaggaattcaccatttgcaacagttttatcctctggagagaagtgcaatctgataaccatcaaacataatatctaccttttggagttcatgcagaggtaagcccaactatgactattaatgttagaaaactgcacataattaagcgcattaacaccctagtagaattgttttagaggtctatagaacctatgctacctacagagatctatccacagtcaactacagggcaaaagcagctacactcttgagatctcttgctacgattcttcaaacaatagacacatgcaaataggtacatgagtccaaattctggaaaatttcaaacacaagttgcatgattgccttgccagaacccatggtagcataacaaacagataataataaaaataatattaggtaggcaagttgcccaagtgtgcctttgtctcttaccagccagccattattcaacagaggatggtttcttctcagccaatgagccaaaccgtcaagcatgacaatatagctcgcaaatcagaacactctggattgcatatttgcattactttttgtaccacttgatcactttttttttgttgttttttgtattgcctctgtaatcattctttagcatagagccagggacacaagacatgctaaaatataagttataagctgctgtctttgttaagaccagaaccggcagtaaacttgttggtccagaaaaagcttaacatgccttcagcagaatatgtgctgtactatctgaatgttccgatttctgaaattattggaaacaatgagaagcttgacctgcaactctgtcaacatcaaagctactgttctctccctttcctttcctgcccatttgcttagctatatatcttgcagcagttctccatgtttggtgattacttgctcatgcatgtaggttcctggcatgctactattagaggaggagacgatctcttccccgtccctgcaggatc

SEQ ID NO: 4930 - DNA, 2000 bp, Oryza sativa
ttcaccgatcgcgtcgttgcgcgcgatcgagctaccgcgttgttgtttgaggagatttagctaggtaaggcttgcggtgttcgccaccagcccacacaccactctgatctcgcgccggtaaatgactggacgcctgggcagcagctgcgtcgtcgtcgtcgtggaggtcgtcgcttcctttgtgacgtgcctgtcgtcgtccccgtcgccggagaagtgcgagctgccgccgctgcgcgtccgcaccggagggttcatcagcgaaggtacgcttgcacaaagagatgcgtacgtgttatgtacgtagggccggccggtggtgtggccgtgtgatatacactacatgtgccatcacgtttggagatggtagtggtaccctgtaagttatgaatagtctgatatatgactgtgcactgtgcacaagcttggtgccaccactcaagctccttgtttatcacgtaaaaaaaaggagtttcagctcgtatgggctgtgtaaacacccgactgacgtatgggcccccggaaaaggacgagggcccctttgtcggtgttaggtatcttttcttcagtcgtttcagcttttaattacttgcttagtgcatctctgacaagattgtctcgcacaggttaaagcaaaaaaggcccggaagttttcccttgataaaaaaaaacgagaaagtatccacaagggcgacgatatataacaacaaacagaaaggtaaggtatatccacgggacaatcttcaggcacaacacgagttctagttagtccagttcttcgcttggtgcacgctccagcgtaatgaacaaaatgttatatagagtaagaggcgaaatcagtcgaaactatcatcagcgtcagctttattatatagcgtgatgagccatcaattcaaacaatatcttactaaaggataattttactattcaccgaaaggtacaatatttatagcgtaaaaattttaatatagaaaacttgatatctcgagatattttctcaagtacaataaattttttctttactaaatgattttggaatttcatcggctaaccttggtgatgaacgtagctagctccgccctttatatatgtactccattctaaaatataataatttttagacttcaggatttgtcataaaatataataacttctccattaatattcttttcccaaccaatcacaatccccaccatttacttttcatacatacctccactactcatccaatcacaactctccactactcatttctaattactttcttaataatcgtatctaatcttaaaacttcttatatctgggacggaggggtattattttaaaccaagaagaaacgtttcgagcatgacattgttttcgctcggataagagtcacgcggcatacttgcttcatctgagtactattgcaagtaaagatgaactctggcctttaattgcaaagggtccaggaacatcaaaaggaaagaaagaaactaaacaactgccatctccatgtttctttttgaacgaaaggtcatcctcatgtatcgatggactttaaagtatcgaaccgaaacgatactccagctgacattaatggaagtttttttttttctacaccaaagatgtatatatgtacacaaaccattacgtatgcacctgtacctacgcacacgtgagtgcaaccccttgtctcttcatcggacccatgatgtttattgtccaacataaaccacctaattggtaggtggaaatgcaaacctagacaattattgaaaatgaaattgtagtttctggaactggcaaagctagaaaaaaaaaagagcttaggtgatcggcgttttttttttcctattgtttagttcttatttggctacttgtttcttgaaataaaattttaaatcagccattaggtgatcggcgttttgttgtttgtttggaaaattcatagagcaaggcaatggctccaactgctgtcgatttcgaaaaggatttctgacatcactgaagatggatca

SEQ ID NO: 4931 - DNA, 2000 bp, Oryza sativa
gttccagactctatttatttttcgtacttggacatgcgctgaatctccttgagatggagctgaatcatatttgaatccttcctttgaccatggaatgctgattttttgaatcacatcagctacctgctttatttatttccaatgccataaacttgaataacacgttgggctggaattttcaaattatgaaactgcctctgatataaatcaggtatacaattgcccagtataactgttgtaggcaagtattggtagctcttgatactgaaaatatttcgttatcgtatggtatcatcgacttaacatcctaattgcattgtggcctcttctttacagagaaggaagatacaatggttttgattgtagcaactctagcatggggtctacgcaagctttcacgtgcaatcactttgatgctactgtttcttcttgtggtgaaacctggctttattcatgctgtttacagtatggtgaaacattcctctcagctttatttgttttttgatggtggctattgttatgtgttgtcctatattgggggaaatagttgacccaatgaatagtgtactttgttgataagttaccttatttaatactttatatatggattgctcgaattaataatacatgaacagctcatactctgttacgaattgtgacaagcatgtgcattatgttcatgttcctgtaaccaatccttattagatgcacttagggtttattttcgattgtccccatcatttattgatacttgaaaattgtaggctatgctctatcattatgcaatgtattattacgtattwattttctgtctagagcaagtatttatcttggtagttgctttgtttatattgctgatatattttaagcatgtgcatgaagggtagggttggttctctagtctttaccctaccaattcttttgtagtgccaaaatctagacaagtttcagtactaccaattctttggtttgctaaaagtgtgaagtcaattttaatatgatgaagaaagttctagattggtaccaatgatttgatatcaattcaaacattcacaagtactattcaagttgccaaagaattggtagggcagtttttagtatcaatctaaaacggcccgtaatcttttacctttttccttactaatttcctcaatctaaataatgcagctaattagagttactttttkgtttcagtgtgtttttttctggtgtttctgttgaatcattcaatcaaaaagggactgcgccagatcttagtgctattctgtgaggcgcatttttcaatactgtacattcttcagcttgatttagtttccagtgctttggagcgtagtggttccctaacaatggaggtactctcacagttaggtgcgcactcttattttctgtaatcatgtattttctgtactgattcatcacctaagaatcaaagatcccatctatgcttatttggagagacaacatttttgcctgttacatatgatcaagggatgcagtttatattgcacaagatctatattgataattgtcatatgcagcattccctaccttaggcgccaagtgcattaggctagaaacagctggggttatagttaggtatgattgagttgttatctctagtttagtactccctccattccaaaatataagacacaaccaccttaacccgaagaccaagaaacaattattatcatctcctagtttagatcacctaataaatataatgcatgcgtccaatagaattagagatcttgagggtggagtatttaaaaaagtaataatttaatggaaaagaggtcctagttaattgcatgcatgcatgcatgctatatattatggaacatctaaaaaaaagtagttgtgcattatattatggaacggagggagtattatttagattctatgtcttgtggagcgctctatataagggctgccaatggattgaatgaatcaaacaagagttatccctagtctatcctttctctcatcctcctccctac

SEQ ID NO: 4932 - DNA, 2000 bp, Oryza sativa
aattttctatataaaaattactttaaaaaattatattaatccatttttaaagtttaaaatagttaatactcaattaatcgtgtactaatggcttacctcgttttacgtatcttcactaacgcttctccttcgctgatgctttttcttcgctgaggtatttttaaatagaataggggaaggatgaaatttaccattggctatctaaagtcatggtatttatagatgaataaattgttggaacatgtctttacatgagaacaatggcgatcaatgacacctctcctcgactctcgagcatgaacatctcttcggctttcaccattgatcaggaggggagctagacggttgggccgatacgtttcacatgagatggccacaccaaactataggctggatgcaaataatttgtatacgtacacacctgagttggaaaaataaacattgaacagatgtacggtgatcaaaaaaaaaacagatgtacataattgatgtaaacacgggacaaactacatcctcttttagttttctcatacgtacacagacctcaaaacaaccatatggctaggctagctagttctgtaccaaaaatacccccatcatcgtgtgctagcttgacgttatgtcaactcatcgtgaaagtgtgtagcccaactcccataatgaattatgggtctcttttagatccattggcaagtttcttcaccctgtcatattgaatgtttggacatacgcataaagtggatcaaactgactggtatacccgcatctcattaacttttggacctgcactggagctaagcagatcttccagaccgttgtgttcgttgacttagttcgcgccaacacagttctggtaccaccagccaagcgcggatttttcgtcaacaaatctatatggctaataaaaaaattgtaagacttctgatttatccgtgtcggttttctttatttccccttttttcatacggttttttctgccgctgtttttttcgttgcggttttttcacacgcggtaagggcttttggttttcttttcctcacgtccttttccttcgccaagccgaaccctagctccacgttgatctttctctccatgctttttctcctctaattgattgcaaaaatcgattccccctcatccttcatcattttccccatgatttccccattcaatttggttttaattgaccgaatttaatatcaatttaaccgttgccgattatggccggccggctagcttcctcgaccgtttttatcccaagtttttttcgctccgattttggaaaaaatggaaaaaagaagatcgagtgaatcaaaagtcctaaacaattttaggagatcgagaaagattcggccggatttgatggggagaatcagctccagcatcgtacgtgcacggcaccatcttctagaggtagaagatgtgtgagctagaccacggctccattgggtcaaatagaagcaggccgagtggagggagatagcagactgggctggactgaaaaaaaaagaaaggatgggttttcgacctaaaactaagaaaagaatataacgtatactgattaaaaacatcttagccgttgcaacgcacgggcactgattcaaaacatcatacccattacaacgcacgaacatttttttctagttatgtataaaatattctttcttagtgttcagggtgagctcttcgttggaaggcccaaggcccatcagatgtgcgagtgcgacggtcccaaacccaacacctccatccatccaggcagcgcgggcttcccccaaaccgttcaattgtgggcgggaaacttgggcttaacaagttggaataggcccccccccccaccccccacctctccgccactgccaggtgggccccaccttccccggtcccacccgcaccgacagttcatttgcattgcatcgcctccctccctcctcctccgtctccatccaacgccgacgactcgagcctcgacggcgacgaccccacaccggcggcggag

SEQ ID NO: 4933 - DNA, 2000 bp, Oryza sativa
ctaaagtagaaactgaattatctgaattttcctggcatttgagacagcaatcaagcctgtgtacaagtcctttacacatgcctgaaattgtgagacactaacaacccagtccatgaagtccaccaaaaatacgcatgagtactactaaaacatttggacagcagtgacaaatataagaatttgaactttgtcagaacatactaccgatggccaaggccaaatgtttcaagtttttcggctttgtcatgtctaaggtcagaattaaaatcacatttacaaaaatataaacggaggaatcgctttttaaagaccacttagataatttgtacagtaagagcagagaaatcgagtgcaccaaatgcttagatcccatttggaagagaacattaaactctcacgtgagcctgttgaagtccaattccaaacaaaactttagtattttcatcgcagtacataaacagaagagaaacagacacctatatataacaggaatgcagagctagctggaaacgctccggataggcacggcaaatatcatatggacctctttcttcagttggagacagtgtgacatatgcaagtcttccctcaaaacataggattggtaggcaccgggaactccttgagatctcaaacacagaaccttagccatctagctagtatgatagcagcaacgcagcacacagtttcctgcctcatgactgttttcagctccagcgtgtgatctccatggagcacctggaggaaaatttggctgcagacctacaataaaagaccagttaaaatttaaaaagttcagagtacagataaacctttttagtcaatgtcatctccgtagtatttgcggcgaatatttgttttttcattatctaaaggagctgaaaatgcaactgcaagaaactattacatggccagcagcttctacagcactgtggccgacatgtatccgtggatccatagtaaactccattcatttcatcagaatctaatctctctacaagaaaaatgttcctcctcctaatagtagccaggcacaagaagacacagcctcaacaccctgataccataattcaactctggcagcacatgggctgtttgcagatacccgatctccagcacaggggtgcagcaatgtgtggagtagttaagcagttaaatgatcctacaaagaggacaatttatttatgttgtcaaagttagtacaagaagtagcaatataatgtgtggagcagttaaatgatcctacaaagaaaaaaaaattatgtacatgttgtcaacgtttgaaccaatcatataatatcccagctactttttccgttttttaggaaccccttacagttacagccccactttacaactccattaaggtattttttccataaataacgactccattatgtagtagtaccccaaaaacagtcaacaaatggtcccaacactaataccttcattaagaagcaagaggcataggaattacggtgtgacaaatgtttaccactgttacctaacaaggaccaggctggtgttcacagaacccaaagcagagcttgaacaaagagcaataggttaaaccagaagcattcagtgagaattcgaaaaaactgcaagcagagggatgcagccaagcatgccctaccatctgaaagtccatgcactgctcacacagagtcaaagaaaggatgattaagatcccagaatagaattttactccataaaactttacctatacaagctaaccactccaaagcagaggtttgcttagtgcacattacctctactgtaccagtctacagaagctggatgcatgacagacaaccatgcagtcctgcaatgcaaaacgcattatcacaatccatctgctccaacaactcagaagattcttcattcttgttctcctccccctctcctaacccctgcttcagcaaggagatgctcaccttctccacttcatcctcatcacagccacattgcattcgcaaccactccaccatctctcgccg

SEQ ID NO: 4934 - DNA, 2000 bp, Oryza sativa
aaataacttttattcgttataatataattattcagaaataatttgtgatcgaagtaagatgagtagatgatgataataattaacagtcaggttattcgagaatggaagaaatactctttcctcgactcatccgcttttgtacgtgtatatcaataaatatactttctctgttttacaatgtaaaatgtaagtcattctagcatttcacatatttaattcattaacattaatatatgtctagattcattaacatcaataaaaatgtagaaaatgctaaaatgacttatattatgaaacgcaggggtagtatataagtgctaacacgattattatgaatggtcttcttgctttcaaaatagaatacccagtgatgctgatgctaatggtactaagtcgacggttattctagaattagttggatcacatggagtactatttagcagccggaggcataggcaggctcatgtcagacgtgacgactgacgacttgtactagtaaactgtagaacctgagcttccatttgaaaattcagtcaatcaacgtgtcaaaacctgagcttcagcctcaagtccactagtattccctccatgtaaaaaaagcttaaccttgtgtactagggctgcgttggagagagtgagtttgtttgtttagtttttcacgcgcacgtttcttaaactactaaacggtgtattttttataaaaaaaaattatatagaaaagttgttttaaaaaatcatattaatctatttttgaaatttaaaatagttaatactcaattaatcatgagctaatagctcaacttgttttgcgtatcttaccaatctcctcaatccccttctcctcaaacacaccctagatgctgatacatagtagttaggggcaaatcacaaaccctaagaagtaggagtaaaatcacaattgaactagaaagtaagggcaggaacacaattgcccctagtagttactactcctacgtactaatattatgaatttgaaccgctgtacagatttatagtactaagatatattaatatttagtatgaggttaaattttttttgaaacggagaaaatagacaagttaagaatcaacatggaaaatgcatatgcacgcaccgtgcagtaacagtagtaagtagagggaaatgtacttatatgtgtagtgtagtaatatgctctacagttttataatgggtgaatagctaatttagtcccttaagtttcaccgaaggcttaatttggtccttcatgttttattttgtccacatagctcctccaaatatttgttttgacttgaaatcatccttggacccacttaatatgttatatggctatttctagtcaatatttctattaaaaaaatgtcttttttgcccttaatttgcatagaactatatactagaaaaaagaaagtcaacatgaataaacaacattacagatgtacttcccattatttcaacatgtgcacatgaaacttaagcaattactatcgtatacacttgctagtacataatttattttcattttacatcatatactatgtattatctataaaaaattcaagcatgcaatttttctcttatatatgtgaatgatgaggggtataagtgtcatttatgaatagagttgttggtttaaggataagtttgaactaaaaagaaaactcgaaggactaatatggatagattgaaacatcaaggactaaactgagtctcagatgaaacttggaggaccaatttgaccattcacccttttataatactgaaattgacttgggaaaccatttcttcaacgactataaaattggtaacaataaatccttgcagtatttgacattaattcctttttctttcttgtttgtgagtaaaatattgttgggccaccaacccacagcttacattgccttgtagactagtactagtataaatgaatgggatatacacgtagtaataatccaatccaatccagtaatatcgcaaattaagcagcaggtgcaggagg

SEQ ID NO: 4935 - DNA, 2000 bp, Oryza sativa
cagtgtttggctaatggtttaatattatctaattatatcagtgatatttttcttacagtcagaccgattcttcaatgccttgaaaggccatggcgcactatctcgtttggtgatactcccttttgaaagccatgggtattctgcgagggagagcatcatgcatgttctgtgggagactgatagatggctgcagaagtactgcttaagcggtagtagtaaaaccgattcagattcagtagctgacaccgaaaacaagacagtgtccgctagtggtggtggagcaccatgtgaaggtcctgaggccgaggggttctcatcaatgcaaagatcgcttctgtggtaacttctcttttatttccgcttttctcatgggagagaatacaattatttgttgcttactgtggctctttacctatcctggtgttttctcatgaagcagaggtggaacagtgctgtcttaagcagcagaaatgtatgccatctgatctagtagcagcctaacattttggtggtgatgaataatattatttaataacaggatagctattgaagatgggaaaatgagttttcacgatataagttaattttctaaattattggattgaaatgagaaatcaatccgtataccgaggccaaagacagaaaaattaggcaacttagaaatagcaaaaatcgttttgatactgttataatgagaattcattctatactctcttctgttttatactttatttatgctgcatcagtcttcagaatatcgccttgctttggctatgtgaaccctgtttttttttgtccaatactctatataaacattgatgctttaaccaagaaaatgactgacatattctcttgaattcacacagatgaagtggtttcggttggctgtttgtgagctcatcattggacagtttgtacaagcctgaaaggatcataaatgcagttttgtgcttgaaccagaactggttcttcttgctgcaagtggcaaggagtcactacattatggagtattcgattggatttttgctgaaggttgccattccagtgatggaaaggccttattgatgatggatattgcaccctgattgattttactcaattgttttctgttggtatagaaaccagttaaatctaaaaatattctcacctaataatggctctgtagtctgtccaagtatatataaactagtgcctactaggactatagacgatggatccacttgtcttgaacttgttagtcagctttatgcttgcatcagtatgcagtgtgctattgtttgacagcaacataattaataatggatcataccatattgacaaacaatcatttttggccggtatgtagaattgtagggaagatggtcttacaacttattaatagaagctcacctctcgttcattgggggcatggaagtatgatctcttcaatttcttcaaaccttgttttagctaatcggatcaaactactgtaaaaggtgaaaaagatcatggaaatttaaatctaaccactcaccattgcctacccacatgaatccaattcacttaccgttgcaatcccaaaccttgcaagattttagcttctaaaccggggcccgggataaatcgatcacgtttcacaaacatctagcacaatcataagatttttttttttaaaaagcatatgcgatctaaagaagacaaaataagcaaaggaaaatgtcgtcctcttcaacaccagccaggggtgcgcagaggcatgaaacaagcctcattgggtatgcacgcatgaagaaggttgccaattttccatgcatgcataatgcgttccacattcttcgactacgcttttagccaatctttgaggcaattctcctgctatatattgccccattctttcccatttcaaagctcatcaagcagctcaagcattccacaagcttgccgttttccactgacagctcaagtgctcgtgcaacattagctgatcagctcgtgttcccaaccgcgacaaagcttcacag

SEQ ID NO: 4936 - DNA, 2000 bp, Oryza sativa
gatccamggcccggaaaggcacgggcgcaagttcaggcttggcggatccggcaaccgcagarccgcgggcggcggatccggccgccggaggaccgcgggcggcggatccggccgccggagggccgcggggagcggatccgggcgcgggcggcggcgcgcggctgatccgggcacgggcggccgctctcggacgccggcggcggtgcgcggcggatccaggcgcgggcggcggctatcaggcgctggcggggaggctagatctgccgccgccagatcggcggcgcctggctggtggtcaccggggagctgcatgctagctgcagagaggaggcacgaccgcacgagaggatcctctcttcagttcatgcgttttgttctgatctgtttgcacgtggtggggttcaactgctcattatgtttgacgtttctggatcatcattttcttctgttcacgtgctcattttcttccttcgaattccagaaaccatttctgcagcgggctgcggtggaggctgcggcggggctctgtgcagcggcggtggaggccggcggggctcggcagcggcgtcgtcgaggcggaggcagtggaggcttgaatgcttgaatttttttatgcttgaatgcttgggggaatagaaatttttgactgtaaatttaaattgtgcttgtgtgaattgaattttttgactgtaatttctgcttgggtgaatggaaatttctgtggatttttgaatggtggagcgtcgacggaggcagacggagcggtgtcgctccgtctattattttttttaaacttggccacgattaacactggcgggtgacacagtgttactcgtattttcgctggctggccagggaaaatgtgtctttgctggcggttggcttaagacgactgacagcgaaaataaattatcgctggtggccaaaaaccgctagcgaagatagtgattttcattggtttttgttttttggcggctcaaaattctgtcagcgaaaatccaaaatggccgctatgaaagatggttttcgtagcagtggttatactacacactgtaaggcgtgtataaatctgtgaaaggataaaattggcaataaattagatgtcactagagtaaattagtaggtccaatcaaccttaatctaataacgttagcacatatggcccgccctaaacttttgtttgtgtcaaatcgaaggccatgccagttcaggtagacgattcatcgtccgccatggacacttaggccgtgtttacttctttggctaattatttttaaagtataccgacacacatttgaaatattaaacgtagactaataacaaaacaaattatagattccgcctgtaaattacgagacgaatttatcaagcctaattaatctgtcattagcaattgtttaccctagcatcacattgtcaagtcatggtgcaattatgcttataaaattcgtctcgtaatttacatataaattgtgcaattattttttttcgtccacatttaatactctatacatgtgtctaaatatttgatacgatattttttgtcaataatttttgggatctaaatacacccagatctatggatagttgcaagttgggcaatttgtcatttattttatcaatatacacgcgatcttcaggaaggcaaagtggtgcccaccggccaccgtccacttcagcaccatccgggagtgaccatacgcgagaagcatgaaatcggccttgccaagcgctacggaagcgtgaagcgcgccttattagcacgcgccgcttgcagcctcctctgtccagggctccaggtgttctaccggacgcagaatgcatccaacctaagctacccaacacacctgacgacttgctataagtatcccctttacagccactccatagctcatcaagcagttcgaacactccatttggttgtcattttcaactataatccaccacaactcgtgcaacatcagctcactcgtgttcccaaccgcgacaaagcttcacag

SEQ ID NO: 4937 - DNA, 1312 bp, Oryza sativa
gaagtcgtacaccacaagctatagggtgaactttctattttttgtggattcatgacaaaagatatctctacccttcgaaataatcaaaactattctggggaattttattatctactttgatgactggtaagaaattaggcagataaacatgttctagatatagcacattggattactagagtctgaagtctgagctaccggggtaggttcatgtgccaagtcagaagtcataccggtttaggtttagtttaccaccatctcaaagatcttccatctgatgccgtaatgactcttccaacactagaaaaatacacatttttttttatcataagtcgccgttgcgtcaacaaaggagacgctgcctctccatgagaaaaatgccatggaagtcgccatcatgggccaaatcttaccccataagaacgactccttttttgttagataatatttgcatgtactatctaaacataggatatcaaaatcagtaaatcaccatctcctttccaaaaaggcagcaatgcaagaccgcaagtcgatccatcgtggaaagtcaccgtaaaatatttatctttgtgaaaacttgatgttaaaatattttgtcaatcaacaccagtatgatggtattacagtcaagtacgacttggtaggaggatggttcataataccggtttgttatagtactataggatactggcgcgttatcaggaatatctaaaaaactgtcgcaaactttttgagtcaaaaattttcagatgttacactgtaactacaccgtaactacaatataacttattaaaacatgtattcaacaatgctttgattagatagcactggaatcttacgtatgacatttctttgtagcaattttttttcttcatgtacaaatcttgagaccatttgatagtcacaaatctgaaagttttggggcagaaaaaaaacttgcgaaagttttttagcaaatccctttttttaattaaaatcccattgcatgtgccatatactggtgtctaaaaattgaagaaatggaggtagtacatccagccaatagccgcctcctagccggtcgctggctcctggtcggttatctgccggtccacctgtttttggaaccatcgtgctcagtagccacagttcctggatgcgcgcgcgacaaagcgaaaatggcgaatgcaacattccattgaatgagtaggcgagtgttcaatttgcacaagtattccagctaaaacaaggtgcggttttaaaatttttctcgcccatcttagtaggagccgtgtgagtgcgtggtgctttcgggcgccacatggtcacg

SEQ ID NO: 4938 - DNA, 2000 bp, Oryza sativa
ggagggtcaagggccccagccctccagcccctgagtacgaatagatgcctgtaaactgtagcttgattacctaactgttgcacacagctacaatggatttttcgaagtggacaattacactggattttgatgtgactgaagagagattgaggaatgaattctcaagcaactctgaagtacctgcaattgcactgattgcagacttcacctgttttcatctccacaagtttaaggcctcaaggataagtgtaggtaccatagataaaatgtaaagtttatcatgagagaaaaatgcattcagtttgagcctcttgtcaggaaggcagatagcatagtttatagttaatataagaaccttcagcagtgctgtatccagtaccctgatcatgtgaacaattgaagggtcctctgcgatttcatgacatatagtccttaatttctaaggagcatctgttctcgtttggaatgttgtgcgcattcaatcgtgtgggtctacagggagctagattctcttaacctgctatcttttgtcatgctttcaggctttacacattcctgaatttttcttttactaattatcactgacacaatgcgtatttagagttggtagtagtgagttagtgaccatttgaagacaacctaaagaattcaaccttggatttgtgtacttaccctcttgttggtgcggtgcaggttgcagaatcaatcttccaattctgaacagccaactgaacaccagttgcgtccggggctgtttggagttaagggcagcacaaagatgcaagagacacgaagctgatcagtcacattcagatgctccaaggacgttatgcacagtacaacaccctctgatcaatcgtagtatccagcaccggcgcttatgtggagctctgaatctaatgattgatccacctgtgctgcttgtgactatgaagacgatgtgccaacgagaaactatgcaaaactgcatatccatgcttgatcagttcagttcagcgttcaagaatgtgcatgtcttaaccatttcctgcatgtgtatagtatggtttttactgtactactggcagagatcatatcctgtggaagtttaccatgatactagttcggcaattaactgaagatgtggaccactgtccactattaaaggaaaagctcatcatttaggcctaatccattggttgggcagctactcaactgttcttcccttcagtttgtcaatgaaacgtgtgtcggtatgtcatatgattgggaagatgaattatatatgtgtgaattaatagaattatcatatgattgggaagatgaattatgtgaacagtgaattaagtttctgaaaaaaagttaagatagtgtgtacgtgatggtaccttttgtctgatccatgagaaaaaattccaataatttctcccaattggagccaaaataccaaaacagagtaatggaggaaggaacatttcgtggagtaattcaccaaagaaggtaaagggaaaaagtttcaggtgcattataagcatatatatgatattcgttgctgctgatgtgtagtaaccgaaagtgaggctgcaaacttagttaccatcggaagaaaggcagcatgggaaatcaactttgttaatgctgccagtaaccaaaggtatgcagtttcatggtgagaatttgcaaattcactttctcaggtttcctgttttcgtgaggcgtcaacatccaaaatttgtgtgccgtatcacacaaaccctctttaggggggcaacatcctgttcagcctttatgccagcagtgttcagtttcatccaaatctcccagtttttgtctctacctaagattcatgcaattaacttccttccatccatcaacctgccatcacttggtcccatcccatgcatgcattagtagccacacatcatcctataaatgactcactccaacaagtgagagattcatcacaaagaagaagagaaactagtagcccatcattcattcacatcactataactgacaaa

SEQ ID NO: 4939 - DNA, 2000 bp, Oryza sativa
gcatagaagctttaattagtgtagtaaatgacaggtatgaatggcgtaaatatcaagcagacattttattttattgcacaatccttattcttggaataatttcatttttcattacacataaaacaatgtatcactttttttattacgtgtcgaacacaagttcataaattgatgttagatgtgatgggagtgcaaatatgttagtatatgagacaaaatggtgaggtttttgaatagttgccggcactaagaaatcattagctcttaacgtatgaagctcactagaggacattacacattgtatagttgtacaccattaactgcaaaacaacataatagctttaatcagcgtagtaaatacctgatgtgaattgtgtaaataccaggcaaaccttttatttattgcacaatccttatactttggaataatgttttttttttcacaacacatggaccaatgtatcacattcttgattgcgtgttgaacacaagttcaaaaaactgatgctagatgggatgggagtgcaaatatgtgagcatatgagaggaaatgttaagtttttttatttcactcatcatagtagatggatatatgaaaaccgtttaatttcctgcaaattgttcctttttaatgttgatgctagcagcggattcttatatatctagtcataaaagccgcttactacgtccatagtttcagcactaagaaatgattagcccttaacacacaaagctcaccagaggagagtatacgttgtatagttgtataccattaacaacaaaacgacatagaaccttaaatcggtgtagtaaatatcatatgtgaatggtgtaacatcaggcataactaatgtatcacattttctattgcgtgttgaacacaagtttagaaaatagatactagatgggatacaaatgcaatatgtgtatatgagaggaaatgttgatgctttcggtttttataagtcatcgtagatgaactcatgaaaaccgcttaattgtacattttaatgctagtgctatcaacgaatccttatctatatagtcataaaaagcggcatggtacgtcgatggttgccagcactgagaaatcatagccactaatgcacaaagttcactagaggagcgtatacattgtatagttgtatacaattaaccgcaaaacgacatagaaggtttaatcgatatagtaaatgacaaatataaatggcgtaaatatcagacaaatattttattttatttcacaatccttatactttgtaattattttattttacatgacacatagatcattgtatcacattttcgattgcgtgtcaaacacaagttcaaaaaattaatgttagatgggatgcgagtgcaaatctgcgagtatacgagaggaaatagtgaggtatttggatttcattcgtcatagtaaataaacttatgaaaagcatttaatttcctaccaatcctacatttttaatgttgatgctagctggggatccttatctatctagttataaaagccgaccgatgcgtgcatagttgcctgcgctaaaaaatcattagctcttgacccacaaagctcaccagagaacattatacatggacgtagaagctttaatcagtgcagtaaatatcatatgtaaatggcgtaaatattaagctaaccttttttattttattacatatcccttatattttggaatatttttatttctcataaatgtgtcaatcacattttctcccacatatcgaaaaataaatgtagcaaagctacagaggataggtaactgggagtccaaaattttcatttatgtcccggtttgatttttggaaaaccggcaacgtcagggtccaggctgtaaaaacacgctttggccgcgaggcgccagctgtgtcgctcgtctgccctcgaggcgcggccaaggccaacaaatagcctcgcctcccggcccacccccgtccagttccacgaaaacccaaacggccaaacccctgtgtttgccgtgacg

SEQ ID NO: 4940 - DNA, 2000 bp, Oryza sativa
gaccggttaatctctctcccaaaaggattaaggaggattttagaagggatttataccaaacctattcaggcgtgaaattaatctacctcaaacccctccaatccctatctattggggattaatcgaatacgcccttatagaagttttagcatggaattattctaacttccattaaaacattttaatctataactcttatagatttttttatttattgcggaaattggaaagtattaatgcaatgatagatgtggacaagcgtgtggtctcgtatacaagcttgcctattatccttctgcatagacaatttttatatataagtatagatataggctatgtctagatttatatacaaaagttatctttttttttacgaagaaagtaggatatttatgatgcatgagtagctctccttctctaaataaggaaaaaaaaaaagcmaatggggtcaycctataaaaaaaaaaagctaacatcgtgagtttgttcactgcgccaccatagctttatcgttaaaaaaaactatttgcatttcaacccttttagtttggctattagtgtccatgctataccaatttgtgtcttggttgactagttacataaaagaccctatttttggaaaataaaaatagttactatatgttctttcacccactttccgctctatatatattagaaacgatatcctattttctccctccttcacttatccaatccacaattccacacctctatcccaactcatttccaatatatgaggtagcaaggcacacggtgacttgctatgttgctcgcataccggtggatctcatgcctatctactcccttacacggcgatcctctcctctatccatgttttgtaacaaatccatctctttcatggtaaccgtgactctgtccccatctgtaggcttgccgtcttttcccaaactccctagagtgggctctaccagatctgtagtggtcttgtaggatctagtcatgactatcatgacactacaatcctctgcctagggaggctaacgaggttggtgcttcctcgagattgccatgacaacaagtagaggagattggagagggtgggaacctagatcgagatccaggtgcgccaacctaaacatgaactttctctcgctagaccaccttctttctccttaagtcactaaggcacttcgacacaatacgatgcaacttatctttactatggatgacatatgaacttacatgaagtttgagggcactatgtatgactataatatgtactccctccatctcaatataagtgcaacctagtacagatgtgatatattctagtgcagatgcacttatattggggcaaacaaatatccagattcgtacttctatgatatatcatatttgtattatgttgcacttatattaagacgaagggagtttttttaagtatatataatttactgattaatatttttcgtaaaaaagatactgtctatttcctgcttactataagtgcgacaaaattagtggcatccgcttttttttaaaaaaacaacaccattctatcctatttttgttctaacgcgtaatagtaggaaagaaaaagctatagagcacagtcggcacaacacaaagacatgaagacacgctttcttcgtgcgagcacgaatcaccacgcacatccaacggacgccaacgagctactactagctaaaatcccccacccgaattccaacctcgccgccacctcacctacttctctactctactctacaccccgcagcctttctcctcctcctcctcgcccagtccacacccgcgccgccgccggcgagcctagggtttgctctcgccgccaccacttcctcctcctcctccgacgaagctccggttagctcggccgccgccgcccccgcgctcccggtcgtccgctagggttttgcttctttttttttyctttttycttttgagctgctgcagcgggggtgtccgtgccgaggtaatggtggtggtgktggggaggg

SEQ ID NO: 4941 - DNA, 49 bp, Oryza sativa
gaaagcgcggggattttktgaatccgagtarattgatcggttaagcgca

SEQ ID NO: 4942 - DNA, 2000 bp, Oryza sativa
tgcatccatcgccgagttcgatgagatcgatctgaaagtcttttgaccctggtgctattgttctgcatatagcctgcacttgaccatggcctcactgcccctcacacacagcagtacatcactcactcactcacttcacagtttacaccaccggccggaagccatggcgccggctagggcgcaccacctcctagcctgcctgttggcttctgcgctgctcgccgccgccacgccggtgaccggcggtgggctcatgacggaccagctcgaggtactgtttggccagacgcagctgctcaacgacagcaatggcgaccagacaattgcgctgacgctagaccgcgagatggggtcggcgttcaagtccaagacctcgtacctctttgcaaggatcgacatggacatcaagctcgtcgccgacgactccgccggcaccgtcaccacgatatacgtaagtgaccatgaaacagcagctgcacctgcacagtgacatgcatgtgccaaatcgtcagttatatagttctgcattcttgagtagcttgtgatacattgcgtggtgcagttgatatccgagaaggattggaacacccacgacgagatcgacctggagttcctgggcaacgtcaccgggcaaccgtacaccctgcataccaacatctttgccaacggcgaaggcggcagggaggtgcagtaccggctctggtttgatcctacccaggatttccacacctactccgtcatctggaacccagacgagatcctgtaagctgcatttcaagatagtatgttaatggtgtaaaaataggcttgttgcgttagaaccggtaaaaaagcattgagccaaatgtgtatgccagtgtcactaaagtcggtgaattgcaggatcctggttgacaacatgccgatccggcaattcaagaaccacttggactccggcgtgccgttcccgatctaccagccgatgaggctgtttggctgcctgtgggacgccgacgactgggcgacggagggtggccgcatcaagaccgactggtcgcaggcgcctttcgtggcatacttccggaactacaccgccgacggctgcgtgccgagctcttatgcgtgggtatgcggccagggcccggccagcagcagtgactggttcgaccgggggctggacgacgtcaagcagcagcagcagctgagggaggcccaggacaagtacatgatctacaactactgcaacgaccccgagaggttccccgatggttatccaaaagagtgtgggttgcagtaggatagaggtggctcggtatgcatgtgagaagtgcgtgaaatgtaccgaatcaatattccttttttgaagattttactggaatattgagattgtttcattctttgccccgaggaggaaaaagagagcagaaagtttcagaaaaaattgaaggttttcgatttgagtgtttcggtctgaatgaaaattttcaaaagcatttggaacttttctattgttttgaaagtttttgttatgctcagacactcctcctgccccagatcagttggtatcatgagatacctcaagaacatgggcccagaatgaagtaaactaattctgtaatgaatatatgaaaataatggtgacaaacaattcattacaggagaaaaggttgataaaactcatgacaagagttttggttcttatccattccatcagttgactgtcaatctttcatgaggacatattctagtttaggaatcctactagcacctattttcctagtcttgatagttttaggattagtctatttacaacaatttttgcagttccaatgtataakgggggggggggggkgattttgcaggtctgaacatcatttggaagaaaaggtaaaagtatgaatggcgcatgcccctgctatatatagcaaatccacaaacaacccacttccccatccgcttaccacactaagtgcatgcactcacaaatttaccttttctttgccttaacccgttttgcgcgg

SEQ ID NO: 4943 - DNA, 2000 bp, Oryza sativa
gtccgtcgatatcgatggtgcacgtggtacaagcatggagtgaatgtgccgtcgccggtggccgaggcgatgggctgcaacggggtacctgatgcggcatgggcggcgacatctgcgtcaataaggccctaaggctcgctaatcggttcctagatcgatgtgtggttgcgcttgcggcaacggtgggagaaggtggtgcatgtgctgggtgacgcgcggtggcgacgagatcgagttcatggagagaggagaggatctatccgctttctcaggcttgtaaaggaatatgccatgggcataaaggccagtgtgcatgtgccaaactgccaacaaagaaagaaattgttgaaaatagagaaaatggcatgtcaagttggtctcctttgatagtgtcatttcaacgagaccatatttcaaattaccattttagtgaaatcccatatcaaaaatggcacaatgtcaattttctcccaccatcaaataccaaggagatgcagtaccaccaagtaacactcgtttgcacccataggattggcatggttaaaatcatcagttggaatatggtattggctcctcatttagggtttgtttgatagtgctctaaccactaaatcaggatccggagcagagttgtggagcaatctgtgttctccagttatagttgggagcacttccctcgttgcacacaaaacgaagtgacagtttagcgcatgtttagttaagtatttgctataaaacttggaaaatgaaataatatgattttttttaaaacaacttttctatagattttttttaaaaaaaaacacactgttgagtagttggggaagtgtgcgtgtaaaaatgaggaatgtgaaattggaaaagtagactaaagaacgcaggctaaacccggtttcacctctatagtttatttcgagagaatatattttcaatggaggctaaactcggttggagagatggtattcccatcgtttcgcttattcgtgggatggtgaaactgcatatttacaaacgagaaatgatttatgaataaaatttttatatacgtgttcttaaccatctaaaagcaaatgttggaaaataaattttgattaaaaaaatctcaaaatgagttacaaatttaaagttgaaaattcatcgataagtaccagcacaagtaaaaaagataagttctacttccttcgtttcatgtaagtcaatggagggagaacaaacaaaggggataaattcctgtttagcgctgggctgctggcccatggccataccgtggaggaaccgatgaacgcgtcgcgtcgccgtcaggtcctcaaacggaaccgaccagacaacgtcaacgtcgaaagggccgtggagatgggaaggccgcgccgcgttgacgtgggctgcggactgatgcgattgactaattaattgactgggctttggcattgggaccgacgtgcgcgttgcgtcgcgtcgcgtgcgtctcccctctctttgcgttactaccttttccttttccttctttcttcgtttctttcccctctcttttgagatgatcctcccttccttttcctttattttcttgagagatgagatgtgttcgatttcagctttgattatgccaagaagaactccgattatatactactccaccgtactagtagtatagtagttgtaaagaaagcaagttgggtcaaagaaatcgaaggcgatctcgatctatctatctatccgtgtagcactagcagtagcagtagcaggcagccatagatcgatcctcgtcggcgtcgcgctgtggttgcggcggatgctgcagcgggcggcaagcaatgcctactcgtggtggtgggcgagccacatccgcaccacgcagtccaaatggctcgacgccaatctccaaggtttgtttccgcttcgatccccctttcttagtcttactacttgttagggatgtgatgtgatccccctttgtagtcactacactagatgagagtactattattttggcgcacgcagag

SEQ ID NO: 4944 - DNA, 862 bp, Oryza sativa
gggggattggattagattgcgggatcgcccttgttgctcagacgtatagagtcgcctcacctctgcgcggtagctgttcggtgaaatgccctagtgtggtggggttgagccgggcgccccaagcgggcgaatttggcttcatgccaagtctgaggctgtctcgcagcaatctgttgctgctggttgcggacggttcagctcaccttggtagcatgggctggagggttattgtgcgtcatgccagtattttgcctttgccatcttgtagaattcagtctagtgctgatgacatggcctcatcatttagttcgtaaccttaattagtataaaccgagtgaacttatgtgaccagttgaggacagccaaaggagcaattttaaacacaatctcagcttgaaacaaagttccaattttacaacaaaatagcaagcccgcgtatatggaaatatgaagcatttaattgttccaattgtttcatgatcaccctaaacattgcttaatatgtatgtatactgattgcctgtgaacagtactcattttccatcaaagcttgaaaaccttgcttttaattctgatttcttactaatttagttataagaacatgttataaaatctgtttaaacctataaataattggaaatatgataatccattcttaaacacattactggactcaccttttatgttaaagcagcataattacttacatggctaccatatgagctacttaacatcaattttcttctatggggtacatctcattatcaatgtcatgttggcctgaatattttggcattttgtcaggttgggcttcccagtatagcttgtctcttgctgcactaagctcttccaatttttaaaa

SEQ ID NO: 4945 - DNA, 2000 bp, Oryza sativa
cgcccgtcgtcgaacaaaattcccattaaacggggcttttgtttgaaaattgggacacacatggttttaccaagctcatcacatgttttcacgaacttcatttttctgtacttggttaatgtcgtgtttgtcaaggtcgtgtttttcataattcgactaaagaagcgactggctgaatcattattcataatatgtttgttgctgtttttgatgatagaaatgcataatattagcatgtggttgatgtgaagtaaatgtcgattggtaggcccaaagtccagtattgctagtacaatatatcagtgcacgttttcccgatggatctggatcgattctagaaacttccatggaggtgaacagtgagttttcaaaactggaaaccaccattccaccaagcagcagccggcagtagcacccggattcatggcccctcatcacgggcggcgcatcacttccctctgtctccgagcttactattttattttattttattttcttgctagataaaatatagtacttcctctatcttaaaataagcacaactataagttctcacgtctaattttcatcgtccgtcttatttaaaatatttttttaaaaaataaaaaaacataagacacgaacaaaatattattcatattttataatctaataacaatwaaaataataattataaaattacttaaaataagatggataatcaaacttgcacaagaaaagtgtgtacttattttggatggagtagtacgacaaatttttttttaaaaaaaaaactcacccaccaccttgcactgcaggcggctgcgagggcaaagcgaagcgcgctataaaaaaggaggggaggagccagccgcgccgcctcggccgcgcactcccaactcctctcctctccttcccactactctcgcgaggaggaaagcgaagccaagcgagagaggcttccgccgtcgccttccccttcgccttccgatcggtcgcgaggtatatccccttgttcctgtggtgggtttgacctcttcggttctccctgttcggtgagggtttgcttggggttttgaggtggaggatctctcgtctcgtctcgtctctcgggtggatgggatctcgtgttcctcttccttggagaagaggaggaggaggaggatcgtgtggggttggcgcgttgctgtttggaaccatggttttgcgctaggatgattagattggatgaaaacgatgcttagatttgggccgttctctatgaacatgtctgtttttttttctatttggtggcgagatttaggtttccgggattctgtcttcgcatgaacaccagaggaattcaatccacatgcacggttacatctagcttgttgattcgtgttttttttttcgatttttgtcaactagatcgtgaaatcgggtgtttaatctatcaagttggtgagaaattttagaaagaaaccgattgtgtcgtgtccatggagcttcgagtgaagggtggggagcgcaagcaatgcctgcctttctcatactgctccagatagtaattgcggccttctcatggaggaatggatggccccttgtgaccctatttccttccatttattggtagagataccgttggcttatatatcatctccattcctcgctttttggtactccgtcttttatgctagaaagaatacggaccgggaccatactgtgttggtgttgaatgcagtaacatggttagcatatgaccctttctccacatgttctggtggacaaggagctttagtgagaaacaaattgtagttgcagtaagcaccatgttctttttattccactgttaagaggtgatgttatcatcaaatttgtgccatggtccaatcaaatgttgctcatcatgttgtaaatctgtgcactgaatatatatgccttgtgtgatatcctaaactctgttcaagttagagcatggcttttaatggtggaggtacttactgtattccttctggatttgaacaattctaggtttcaag

SEQ ID NO: 4946 - DNA, 2000 bp, Oryza sativa
tttttagctcattaaacctcagcctaactcttttttggtttcagccatcatattttgtaggctaaaatgttgggcacatattaccacccctatgcacaagccgttggttgttgccatgatgcaaaaccagtaaatgctgcatagcttaacctacctgaacgtgtcctcttggacaattggattgtgtatgccatctgcaaatgttgtcaagaacctcattctggccatgcatctaagtccactgtagaataataagagtaactgccgagaacgtgagagcccatacttgaataggtgcagatatgggccggaacgtgttcgtgcatatgctccgcgtagctaagcttgcgtctactagcattcaagagcaactggcactattacgaatagggtcatatatccatcgctggcggccttaacacgatttcatctgtggatggttgatcacgccgccagcgacaacagtacagtgaaaacataactttttaaaagatataaagcttgattcaactagttattgagggtttatttgaaatgcaggatagaaaaaaagtaaaacatggtgtttgaagggattagttaaacacataaatatttcatagaatcatagtaaggctttgttcggaacccagggttcccaaccccactccatcgtattccactcgcacgcttttcaaactgctaaatggtacgttttttataaaaaaaaaagtttctatacaaaaattgcttaaaaaatcatagtgatcaaacttttttaaaaaaattagctaatacctaattaatcacgcgctaatggaccgctctgttttccgtgtgtactgcgcgtgttgggaagagatacttccgaacacagcctaaatcaatcaagcttgtttatgattttttttgaaaaaattatagtcacaggatgttttgagcattaattgatttgtcttgaacttagggaaggaaaaaagaattggtagtacgttgtagtggatgtctaagtttttcctttgaaatctgtagcaaagatatatttcctctatttgtcctataccccaatcgtccatttcgaatgagtgaatagctggtatcaattcctatagcaagttgaaccctccacttttcctccacaaatctttcaaactcagaagaagaacattaggacgagcccatcatgagtatgctactgacccctttgaagcgcaagaaattttcgtgacacggatagggtgaacctatatatttctttataatagatgacaccgttaactttgggcatgttgttttaaaaaaaaatatatgtgtgcgggtgcgcacgcaaaacgataagtcaagtttaaaagtttctctaataataacgtttatacattttttaataagatgaatggtcgaatattatatcaaaatttaatgacattatctgtcaagaaaaatgcagagtactatggtagtttcactaatcaatataccatctgcactggtttgaagcaaatattttttcccattttactatgagaattttaatcatctttattcaaatgataaaagaacgtatttttatgtatatcaacttaattcccataaaactccgtttgatttttaatcatccgtacccttttgaatcacgataattctcacaagtcacatcccagccgtcataaaattcagtttgccctacaccgtctcaatggcttcttgcaagttaaaccagagagagagagagaaaaacaggcccaaaaaaggtccaatagcatcaacttcacccgaattaatcgggctggcacaaatcatcggcccgatatccttaatgggccagaaccggacaaatatgctcggcccatgaaagttgtgcttttgattggcccaactccaacccttacccggcccatcctgtagatctactactgctatgacctaaataatccctccgtcaaaaaaataaatcaatctcgcatttgatttgagacggagggagtacgagggtaacaacaataatgcaatatactaccgct

SEQ ID NO: 4947 - DNA, 2000 bp, Oryza sativa
tgcttggaggctctcgtcctgacgggatggggcgaggcgtgcgtcagaccgcctgtcgccacctaacccacgatctgaccggtctgtgactgatcacagaccggatgaacgagcgcgctgcactgcgttacatgcggcgtgacgcgctcgtccaaaccgcaataaatgcggttaggtgagcgccgctgcgctcacytaacccatacacgcggcgcaaaatccacaaggggtcggggcgccccagccctcggggccgagacgggagcggtccgaccctcggggagacaagagaagggcggccgtatcacctcgggcccgacccccccccccccccgtggagggttaggccacgtgggtgatcgtgtctgcctcaagtctctaagtcatgatactcccggtctcatgtcaccgacaattataaaagggtagtatggatgtcacatagtcatgttcttttctccaacaagacttatatgaagatttagatttttgtagcacgcttttcaaactgctaaacggtgcgtttcgtgtaaaaactttcgtgctaaacggtgcgtttcgtgcgaaactttttatatgaaagttgttctaaaatatcatattaatctatttttcaagtttttaataattaaaatccaatcaatcatacattaatgccacctcattttgcgtaaaaaacttaatctttatctttagaagaaaagaacaccacctatactctcgttccacatcagagttgactctaacaatactacctactcgcattatatattgacttacaaacatctagtcacacgattgccaaaaaagtcaaattgctacttcttctatttccacttggttgtcactattgatcaacactattacaattttgaccattaaaataaattttaaattactatatttatttaacaaaaatcaaatgattatgtttaacatatgcaacatgtttcattaatatgctaaaattattttctagatatttataagtttgtcgttgaaataagagcttccaaaatttacctaaaaataatatttatagtttaattggttagatttcttgtggtgaaaccaacccacatgagcttaaacatagacttgacacgggtgcttgtatttacagctaattattttttcagtggcagttgatgtgtctgttaagagcgatgtgcacatggattttagtggtaggtaatgtacccgttaacagcgatgcactcatgatgatttcgttaatatcaagatatatcagtcgagtcttctggaggtgatcatagaaatgagtgcggacgtgttgtaaacacctgtgtttatactgtatttataaaagatagtgtcatagtgataagcatctgagaacagaatgagtatttctttatgttcaactgaagaacaagattttgcctctagtgcatatataaattggcatgccgtgcgcgacccactacttgttactgtactaatacattcctttttcttttcgtcggctgtccttcaccggcctggtgaaatggaaataacctgccgaacctgttcatccggtcaaaagaaactaatcatttgatggttgattaacaagctcagtcaactcgccactcaagaaagacaaatgagcttttttttctttagcaggtacctcattcgttacataaaaagtccaatactaacttaaaaatattaaaaatttggagattatatctaaattatgattgttttttagtctttttttaagtcagagtagtacactagtactccttcctctgtcttcagtaaaccagcataataaccagatatgaacattatcatgctggcttatttgaaaatgaagggaagacgtaattttttagataacggaagaaggaagggcacatacgcctgctacacaatttcccttacaaaaaggaacgtcgagttcatgatccttccgtaagcaaagcatcatttctgaattttggatccccggagcttaggcagctatagccagagcctccaatttagcc

SEQ ID NO: 4948 - DNA, 105 bp, Oryza sativa
atctttgttacacccaaactctatccgcggatagatagtagtgatgactcagcacgaacgcctgatcaatactattgctcggcacaacgacaccggtgcctagct

SEQ ID NO: 4949 - DNA, 2000 bp, Oryza sativa
cggtttccaccataccaaaggcataagagttactgcaatatcttgatacacctcccaaggataggcaagaaataattgatgtagtagtttgtaagacagatacagctgttatctgtctatcatttgcagggcccatcctaacatttttgctggaccttttcttgtcatttctgggctatgcaggctgctaatttgttgggctgaattcgcactatacataggtatccatatgcacatgtcctgtagccccaaccatgctgttcccattgcccagatgccagttttactacggtgatagcataaggaattactggattaagattagctgcagttcctactagagctctgcatgatctcatccatccatttatccaacgataggctctgatccactatatttcacctttggctaaagtaaatcgacattgttttccttgatgaacagttccttagaaaacctgagcccttcagttcacatcagacagttctaatgtgactgcttaagttgcaatcattaaagaactcacaggaaccagatccagaatgcctgagacgcacatttgtcggtagtacttggtacactcatctttgttgtgctaaggattctgtttagtctgctgcttcctacaaaaatcgtcactctcttggctaagacctcaccaatagattgacgaaacttacatgtttccatgtctagatttacctagttggccacaatgaatgaatagcgatagtttgttgcaagcaatgggaacagcaaaacaacttgatgaccattgtcttcttggaatagcaacattttgttaatagctactaggatcaccatcatgcctgagatgtacttcttggagtagaatttattctgcttctttttgtaaactccttgaacttgaaggccttgtcttgatcttcaatatatatttttgccaataaaaatatagaggttcttcacttggccaaatttcctactcgtttttcttattggaacaaaatcattcactcatttgaccatgttccctttcttctttcttctgtaatggactaatggtcttccaagttaaggtaatttcacgtattatccaactagtacttaagctgccaatatgaatagcttggccctctattgatttttcatttcccgataatttgcccagtcacatccaacgaagctgttcccaacctatttctaacagataatgctattattttcctgtatgttgttccgagaatttcctataggattaccaatactcaagctatttttccaatttgcaagattaatagtgatattaccattgccacccaaacatttcttgtcaattcctcaaaatcaagttctcctaacaccaacactgcatgaattgtaagtctgagaaattaacatgataattgataactgccagaagaattccccttcggacaggttcattaatggacgttcactcactcagcatctggcgcagtaactgtgaacataggttgttgcattgatacttgatagtaaaatttgtaatgcctcatagacttgtttaggcttgatctcctttagtctgagcttcctacaatttttatgttttatccccagagggttttatgtttaataaatttagctttaagagaaactctcttaataattactgtgcaatgttgggatatcattcagtgtctgatccattgttggcctagcggcggtcggtcacgcttaacagcggccagtccggtgctagccttctcctgggtttgtgtgttggcgctgttggagtgtgggtggtggtatactttctttgtttcctggttacgaccttccagggttgtaatcttgtaatttttttcagctctatcaatagaacttcgcaccatctagtgcgagtcgttcaaaaaaaagagagtaccgagacctagctgactttgtactaattacatcccccttattagctggaacttgtgtctctcatcactaaattacaaaagggaatttcactgtcgtgttgtaatcttcc

SEQ ID NO: 4950 - DNA, 2000 bp, Oryza sativa
gattattaaagaattaggtcatggggttaataatacatggaaatacagggtctaatgggcgacctttgatcgaggcccagtactggttatgggcccaataaactggtgcaaaggcttcatgggctacaaagggagatcatccacaaaatttgtggggtccaagatagtcacgggcccattatttgcaacatactccctccggtcccaatatataagagcatccccagcagctcatctaaatttcatcctccatactcccatttggatagccatccaaaaaaattctcactctatataacttttcacttcaacagatcatccatattacatcctaaatataccaacatcctatattttattaatatttttcaactaccacacatttttactcatatccctctcacctttcaccacttaaaaaaaatctcgggaagtgggtagttgaggatggagtgaggagagagaacctccatatttagcataggaagggctaggtttggagaatctccaaaaatggagtatgtgatggtgactttgctggagcactatttttctcctccatactccaaatatcggatggatgactagataaaggagctgctggggatgctctaagaacctagaaccggataaaacattttatagtactatgaatctggacatcataggctacctgtccagattcgtagtactaggaaatatcccatccgattttaggttcttatatattgggacggaggaagtactcatcagcttccatgtttaatttccacgataatttttttcactaaaaaccaaactttcttcattcattcacgggagaatgtggactggactgtcagtaccgcgcgcacacaatcaacatgaccaaaaagcatcagatgccgctagggatggcaatcgggtgcgacgggtacgggtagtgcctatccatacccgtgcccatgagattatttttttccgtgggtatatctattactacatgacgggtaagaatggttgcccatgcccatcgcccacgggcgccttgtgcccgcaggcgtgcccgtttacccgccactacaaaagtagtggaataaaaagtctacaagcttctaagttcgatatcgaatttaaaacatcaaatattctctgtctcggtgtggtgtctctcctctgacggcgatagagtaagagggagagataataagggaaataaaaggaaaaccgtagaaaacmaagaacgtggcttatgtattctagtggattttgcttctagcctacatgtaagttagatttcgtgggtaaacgggcaaagcgggcatgggtagtgattacccatacccatgcccatttacccatcaggcatagcttttaacccaataaaatatctatgggtataaaatggagaacaaatttaatcctaatagggtttttaaccacgggtaaatagaaaaacgggcacaattgccatccctagatgccgccatggactgtctccatccaaacctacgtgtatcttcaggatgagacacgccgacgcgtcatgccgcctcaaaggccgcggaaacccaaccgcccgtccgccagcccagccgctgtgacgtgctcactgtttcggcggacggacgcatatgtgtccgtttcgcaataaacacacgggagcaatcgcatcacgccgacccaaaaaaaaccgtcccgtccgctccgcggcgcttgacaacgcgtggtgcacccaatagctctagcgtgacaagactcctacgccgtcacgcacccacgcacgcacgcacgcacgcatatatgtgcagtgtascgtgatgtaccacttctaccaactggtggtagtagcattgcctactttcacatacgcgcggcgccgctggtgctggctggctggcgcgcgcaccggcgggcggagagcgaggtttttcgccggtgttttggttggcctccgccgttccgcgcggtggtggtggtggtggttgctgtggtagcgagggtacgctttggagacggag

SEQ ID NO: 4951 - DNA, 2000 bp, Oryza sativa
taattgtgtgattgttcaattgctaatccaatggttaggtgcaccggctgctggcgtcacttggaaggacatggtggacttgcacgtgcgtttcccacgtgcattggcttgaggttaagccaattttcaaggaagggaggatgttggggaggctatggtgacgatgactacaacatgtgctccctcgaagatgaagtcaaataaggtgttggcaatcaagatgacgaggaacagagcggtacagcaagaaggtgccttcactgaagagaagcaaccacacaagaacaatctaaatatcacgggccgatgtggactatgtaacgattgttctatcttgggccagtcgtggcgtgcctacggaggagagaaggtaggtgaagtataactgtacaccgtccactgttagcaaactgaactagaacctggcggcattggtggcggcaactccgtcttgttgggcgagagataattccaaaatctattccagatatttcatgtgttcctgtggtgttctagtattcttcctcctgttttgcgagatgcgctaacattctttagaatatatttattaatatggatatgaaattgggctatgaaagcttctaatcagtctatatgtatggtaacaatctgaaagaaaatgaacatatacaaattgtcaaaaaaagggattgctgcttcttgctttcgctaggtacattattgtactatctattcttgcagacgaagaaggcaaaggtgttgagattcagaatcagtacattgaataagacgggctatttttcttacagaaaatttgaaaaccttcatgccacgcttgtcatggttaattaattgtagagtggtatgtagcataaactattgttttaatcgatggaatttgctatgcatttcatgaagaagttctaatgggtgaacatggaggcttgaagttctaattgcctagaaaacttaaaatctgaagatattttagtgtttttttttcgggagcgtatcctatgcacacaggccctcgcgtgtacacaccgtgtacaccaactaaaaattatcacaaaaaattctaggaaaattcatacatgtactttcaatagtatacatctacatgcaaagtcgcatcttcaaattcattctacatagagaataacaaaaaaagataaaattatgacaaaattgcaaccttaaaactgtcagatttttttttgttacggctaaaatataatgaatttgatgttaagattttaaccctaggtgtaatacaattgaaagtatgtgtatgattttttctagattttttggtgacattttttagttggtgtgcacgtgtgtacacgtgaggscctgtgtgcataggatatgttggcttttttttcagcatgtcttgttaaattttatctcgtagaggtattcttttggtattataaactctgcatggtatgtataggcattttcttgagacattttaagctttgcataggcactttcaaaactagatattagtaacgcaaggtacaaacgtaccaaattaaattatttttgttaactaaaacatcaaaagttttctggccacttacaagaagataatgagaaccaaaatattgcacactcaagtaactcatcaaccgttggttcaaacagggtccgagagcagcaaccacgtgtttcatgaaatatatcgcgcgatgtcaggcgcccgacggcatagtcgcatagttgcctcctgccgtaatctgctcaccgttctgattgatcctaggtgctgcatgcccaaatgacttatcgtcttggctaaaaatactagcatatgcgataaatagacacatatggatgcatgcacaatggcacactccctcgtctttctgctggccaccaccctccccgtcttccttggagataggtggcaggtggctagagagggatcaagggtaggagggagaggaacggatcgcgcgcgcgcgacacgtacaccacacacatccactcacggcacggtacggccggcc

SEQ ID NO: 4952 - DNA, 2000 bp, Oryza sativa
gaaaacttttgtccggcaaagctatctagctactcccgctatcttgagaaaaaaaaattattttcaacttgtctcagacagatcaatatatgttacaaaacaaatatgctctccattaaaaccatatgttttcctagttcttgatatggctagactcttggcacatccaagctctaattaattaataacatttgcacatgataattagagtggtaggccatggtctctaaacaagagggagaaaagaacaataataaagaaggccagtggacccattactgaaaataagtttctcttaccaaattattgagttaaaaaaaataaggtttttaggatggagagagtatagatttaaaaaagaaagaaaagaaaaacttttttatctatgcttcctgggtttaggattgggtttttttgacggaggaagtagcgaagtaatacgcgttgatgcgcgaacaattcgccgtgatgtgttgggacagcaccagatggtcgcctggaagtaattaacaatcttttcacctgctcatggtttctttcttctccagttcaccctgaacaacaacaagtggctccctttggaacatgcagagaacgaacagaggccagaaatcgagagagatttgataattgattgttcatgggacatgggacatggtcggctccagatgggggaccgaagaaataacaaaccgccggttttggcagggatgaagatacactactacagtactgtactctcgctgcaggattggaagtttaaaagaaatttggtggtgatgacaccaagaaaatttcgagatgtggttggggtggcctacacaatttgcatgcatttaggattggccattacggggccatctacccagaacacggttcccgtgaactggattttggggggaattgttttctccttttatggcgtttttgttttttggaaagtgaagttttctgtctaggtccctgagataaaagtaatttagatagcctgacatgtccttcatgaaaggcttgaagttatgattatttccttggaaaacaatatcgatgtaccaacacaatgccccattattttctccttgtaaggtacacattgcaaggacaacattactacagacacatcctagtataaaatttctatatgacaaaatgggcataaagtcacatcaaaatacaaaccaaaacaacataccctctccgtctcaaaatgtctaatagccaatagtaatttcacttcatagcaatgtgagagaaacaatcttctgactttcctctgatggggtcaatagatctcggggtcaaatagattttgcggtccactcatgggatgggaatacatatcatcaaatgtccttttcctatttccccatgacggggtcaatacatctcacggtctactcgtgtgatgggaatacatatccgaagccatcatttcgcttattcacggaataagcgaaacgatatatttgcaaatgaaaagtaatttgtgaataaaacttttatatacatgtttttagcgatctaaaaacaaaggctgatgaaaaataaacttcgatgaaaaaaaataatcttaaaatcagtttcaaatttaaggttgaaaatctaaatattgactgataagcataagcgaaaagatgaggcaacatcgaatgtcattttcttactttcctcctacggggtcaatagatctcgcgatccactcgtaggatgggaatacatatcatcgaatttccttgtcacaattgtataaaaggcaatgactaaaatgcgaaaaatagccggaccccagaaaataaatggccccccttttcctttccctctcaaagccttgtcagtttgtctgacggaccgcgtttaaacacgcacccctcctcgtcttcatctcctgcagcagcacgcgcttcggtacttcacttcactgtggttttttcaagtttcagccgccattaacgctcagctgcagccgagagagctgcagcggcagctcaagcggagcaacg

SEQ ID NO: 4953 - DNA, 1848 bp, Oryza sativa
aagccggggtccggccaattccccgsccgckarcgcccaratccgtcccgccsgtkaattctgcctgcctgsgaatcctgccctcctcctcctccaatcggcttgtgtgctgcctgggaccatggaagtcatgccaaccacggtgttgtgcsgggctagcgggcagcgggatggagatatcgggattttttttttgttcggatgagtctcacggtgttgtgctttgatggatgtgagttccctgcgggagatttcggcttgttgtgttctcgttttcggtttagcgtgtgatcgcagttcctcaagccgttgtctgaggatttcgccggtgaacggtgcaggatttgcgaatgtttggggatcgtgtgtagtttcgtgatttcccagtgacttttttttggttttggtcgatcgaaatgtgtgtgatctggttctcgtctaatcacttcggaatatgttagattcatgtgcggttcactccctctctaaattttgatgcaactctcgttttattcatgtatcgattttttgcgccgagttttaggactcagccagttcgtgagagttttttttggagttgtttttgtgagttcgtattttgtcgttttacatgcagtgcgaacaagttgatgtagcagagaagtggagaatttctaggatcgaattttgagtgattttgtttttgaattctgtgtacgggaaatcgatttgctgtgtgctgggggtatttgttaaatggagctgtgtagcttttccagagatcatttcctttaatctatattctggttcactcatggttgtattgtatgggatttaaatctatctgctgcacttgtagtgatcgagattattttagatgactacactatgctttatagacttaccattcgaaaatcaccatgtttccaccgtgtggttgactgattcttatgaccggctttcatcagaccccccccccttttcccaaaaaaaaatagtctcgatctaacttacggagtaattagaactgctaagagtttcgtttgttccaagttggccttctgaaagttattggcggggtgttttccacatgatttctgccgtatattttaaaattttaccatcaactgatgatattgtctgtccggggttcagaccggagcttgctgtcatacatgatggacaaaactatggtagtacaagctatttctcttaccggctttgatgactcccatagctgtcgacaaaaggcttgtgtagttgtgtacctctgactctgagaagtatgaaaaccagaagtaaaccaacttggcaagatgtgctcggtgttacggaactatagttacaaaatttcggaaactagattgacgcttgcagcggtacagatgatctaaagacatttgtttgttgaaacaagttgaggctcgattaaggcagcactgtagacaatttattgtgtcaaatatccatatattttcccttgaattgcttttgtaccatggatggttgtcttagatacttcctagctttgccctaaacttacttaaacctgtgaatgttgaaaagctacccttttttttataaatattttaggtttcatggttcaattcttcgttctcaggatatttgctgctcaattatgcgataaagtgcttccagttgacgcggagttggtggagacgccttgctctataatctattctccattgctcagcagtgatcagttggaagattctgcctttcttcctcttgctgcctgtttgtttgcttccttggtggagtagacgagaggaggagggcaagaagataaaggtagcttctttcagccactctatgtccagggacttggattgtcctgttcagacacag

SEQ ID NO: 4954 - DNA, 1233 bp, Oryza sativa
atgactatacaatggattttggctatatatttatatatttagtataataaaattaaatagacttatattcagatttattgtattaagatatattatactctattcgtccaaaaaaattaacctaggactgggacgtgacataattttagtatagttttttatttttttaatggaaggagtagtgttcataagaccatcagtgacgagcacccaccaccagtccgatctgatcatttgtgaaccgtctgatatgtggagaaacagtacaacctgaggtgggctttaaataacgcctccgcttcccaaaacgccaaaaagcgcgccaaaccaagggacgctgcctttgccgctgcgggacgggcccacgccgtgtgtgtttttgcgggcggactgagcttaccgatgcgacctgtccctgtcactcccgcctcggtaaccggcgcgctaccctcgctttcgcttgctgcaagagcgcatggccgtggactccatggaccccctcctcctactactactgggagaatgggcccaagctcctgaaccagaaagggttttctcaagcatttaagcgactgttttctcaagcaaagcatctacccaaatgaaaaccaggagcccaggatagaatatgtcgctaatgagcctgtctaaacatggtaaagtacactccacacgagtgaagaagcatcaaaacgcgtaaacgacccggttctaaagtcattttttaccgcggctcctcagctcgaccgacatgtggtggtccatgtaaaagaatctccccagccgcaaacattctcgcattctccacgactccactaggcacacttttttttctctctctcttggtccgattaccactgatacggacgtgggccgcttttgtttgaacactctcaacccaattttataacgcccacctcgcgtccgcctcggcacggtcacgcacgcactccactgcactgcactgcccgctttgttgctctgtgcctgtgggctgtggcgtctgtgaccgtcaggcgtcagctcgtgtcctcgcctgctcgtcctccttcctctccgctggtgctctctctctcttccctccacgactccacggacggtcagggcaagggcacggtctcgcaccgagccacgggcgcacgcatcgcgaaagcgcggccaccggcttgtgttgggtaggaggactggcaggggcaccaggcggcggagcggagctcgggggctcggacgcca

SEQ ID NO: 4955 - DNA, 2000 bp, Oryza sativa
aatagtactgctccacgcgaaggatttctcgcgaaatcgtcacgtaccttacggtggcaactcgtgtatgcagcgcccaaggatcgagctgtgatcaatcgtgcacgcgtcaagcgtcagcgaaagaaattccatggaaattttcaccatgttaattcgtgaggcttgagtacatttgtcggtgtgtacacaatcagttcatggtcgatcaagtggagtagttccatccggtaagcgtcaaacatcgtatcacagcacgattccgacgacaaggagttcacccagttcgatcggcttacgtgaaaattcccataggcacggagagtacgtacgtgcagattgtaagttgcaaaacggtgccaaatattagttgatcgatctgacatgaccacttgactatgatacggttgtatgaactcaacaagagtgagagcgtgcgaatatttttcgatgttcaattcgttgatatgcagagaagaacgaagcaaaattaaatttgtgtagacataggtacggaggttatttggagagtgactggccgttagaccacacgtttgttaattcgtgttcacggtttttttttttggttctttctcatgaactacacatggctgattaacggatacctattaattattactagcaactgtgtccggtactacgtacgtatatcttatacaatcatatcttaatgagaatcacgagtagatcaaatccaataacaatacaaagatgactaaactagcagctcttgggcaagaatagcggcggctaatcaccactgcttgtgttctgattaaacgccgtcatctacactagctactactaatatagtactatgggaatgtttagatgcagaagtgtaaagttttagcgtgtcgtatcgggtattatatagggtgttatatggggtgttcgatcactaataaaaaaactaattacagtatccgttagtaaactgcgagacgaatttactaagactaattgatcagtcattagcacatgtttactgtagcaccatattgtcaaaccatgaaacaattaggtttaaaagatctgtctcgcaaagtagtcgaaatctatgcaattagttattttttttctatatttagtactttatgcaagtgtttaaacgtttcatgtgatatggtgtaaaattttggggtgtgccctatgataccacgtttactagaaggaaaatattacaagctaggtaagccgactagccgaactagaagtcattttctttagctcgcattttccacagaaccacaatttcccaagtaatagtactacactactactccaccatgtccatcgcacatgttgcttaattttccttagcaaatattcaagtcaaggtcctccattcacatgatcagctcgccaaagattcaagtgagcatcaccgtacagtaccaagacagcaaccagcgtcaaggcactgacatgcgggcccgcctaacgccaggaatcaatactgtagtaccgtacatccagcgtcaaaaaggccggcgttcaaacttcaatatatccaactatatatccaaatttccaaactgctgctcctacttgctctctccctcttttccaaaaggagctcaaaaagctttaaaaaaaggttttaatttggataagcmaaaaaaattaaagtgggatttgaaagtcttgtgctgcttatgcaacagtcgcagacttgcggcacggccagcctccggcccgtgggccgccgggaaagccgtcgctgaccggccggctagccagcccgggaggcgacccggcggtgggtcccacctatgccacgtggccgcatcctgcctctccgatgcgtttgaaatgtctccccccgtgtgatcgggctcccactccctctctatatatagcgagcggcttggagccctgtgagttcatcgtctccatctcctgcttgctcttggtagctagctagtggagatcgccggagaggagagagacgacgagagagagagagagggggcaag

SEQ ID NO: 4956 - DNA, 2000 bp, Oryza sativa
tatatcttttcaggaaaggttgaaattcatattgcttcatctcttccatttttccttaaacaggaagcctggacatggtcctttctcattattcctacgcgtattttctctagtagataaagacatcccgttttggactttttgttatgaataaattattttttgcctcggcgtaaaaatatattaagccaaattgctctctctgtcacatattataagtaattataagttttctaagggtctgttcactttgataccattttcaaccataccattttttggcaaagttgccaaaattgcaaaaaaaaatacatttagtttgttgccaaatttgatcaatacataagaaatcttaccaaaattttagcaatattgccaaaacttggtaatgtttattttggctacaatatgaacatgccctaagtcacaacatttatagaaaaacaacaccaaattagtttctcataaaattaaatttaagttctacacttaaattagtttgcttaagaaaccggaaaaatatgtcaagcaaaccgcatatataaggatagatataaaaataaacggctatgatttgtctacgttacaaacataaaccttttcttctcgtagtaaaactcatagttaaatcttagcgtaaaaattttacttttaatgatatagacaaagacgttcatttttattcaacggttgtttttagatttttcaatatatatatatataataattatatcacatatttcttgttttagaaaaacaaagtagagtaccaattctttttatattttttaatataatagaaaaaagaagagtaaataatcaaaagaaacacaagatgtggacagaacgtcagaaaccagatggctccatgtgctccaatcccttattctagtgggagctctctcacctccagaccaaacaacaccaagagaaaaattttttttccaagaaacgaaagcgaaatcaacctgcaattaccagcataaatcaatcaatcggaaaagcagaggccacaacgatctctctctccagtctcgactccccagctaccacctcctctcctctcctctctcctccatgagctttgcctagatcacagctggatttcttggccgcatcctcctcttcttccaggtctcttccagctagctagcttgttcttcccttcccttcctttttgccttgtgcccktraggatcagtgasctktgcggctctctttcctggtccttgctggactgctgctgccttaaaagatcctgcctttcttgctcactttccccggaggagagagagaggagatccacatctctgatggttcttgggatctcctaggagttgtttctacctgtgctgctgctgctgatttcttcttcgatttgctagcggctgtgtggtcggagctcgtcttcttggttcgagatctcggtgagttgaagctgtgtgttttatttttggctgatccatcttgttcttgctgtggctgtttatttttagttggatccattcaatttggagttgatgtgcttttttttttgggttttcaaattaagggggtcagaaaaatcggtattgttgttttacagattcgtgascccgagtgctttttccaacaaattttttttagtgtttttgagtttatkggtttgagtatttttgagtatattggcagttcccttgtctcttcgaggaatgaagtttgctgcgaatgggataatgttcattgactatgtgctgtgaactttccttggcgactgttaattgacctcaagttattgtcttgtatgttcatatttttatctgatttatgcagtacataaatttgcatcttgttatcctggacttggagatatgcgtacgtatggcccccatccatacacatcgttgaatcatgcggttctgacccctaagcagtttttgaaataaaaaagaatatcacttgatgttatttatccccataaaaaaagtaacgcttgctgttttgcatcatacatgattgac

SEQ ID NO: 4957 - DNA, 1557 bp, Oryza sativa
tcccaaaatcmctaaagaatggacggtgagcagctgatgagtggtgaattggacaattcgttcaacgcactcatggtttctggagagggtgagagtggacaggcacatcatgagggcacagggactaccttgttaggttggaaggaccttcccatggagctgctcctgcggatattatcgatggctggagacgacaggatggtaatcgtgggctctggkgtttgcaccggttggcgtgatacattagaatggggagtcacgaatctttctctttcgtggtgagtttggcaatttgccttctcctcccattcctgaatatgattctcacgaaacatttagattcttcgtgtcgtctctatctgaccttttatgggtagatggctcacatagtattgacatgttgaatattacagacatagaagaattgttatgtgataatatccacaaaatagttatgtaacttttaaattggatgcttttatagctaaagaaactccggattttaattttgtagtgtttatagaaacttgcctgtttgccacttatgatgtctgacaaaaatattctgactggcttgttccaatgttttctattgagtcataaacatcttttttgaaagaacccagcgaactggttttatattatagaagaagttagagaacacaaaaactgtacagaacagaagaggagaggcattcgtgaaggaactcttcctgcctgcactcctgagaaaaaacaaaagcctaatctcttaacataatacacttcactcccttggcacctaccatttcccacaaataaagctcatctatgatcttgccagcaagagctgatggtgtagactccttccctctgaaaatgcgattgtttctttccgtccaaatctcccaaagcgtggtcaagaaaactgaacgtagtcctttctgttgcaacttttctgcctcatctgtttgctcgcgccaccaattgagaagagtattgtttgtggtcacattgagtcataaacatcatttgttgtgttactagttttttgcaaggtggtgcaaatgcttgtttgattgaaacttttgatactaagacagtcatacgagagtttaagaagcatgatcagataactttgtattggcaatatggtttaggagtatgctttattcagacatattgtttagtgactgcaaaacctcgtcattctgaacaaaattttgattgcatctgtggacaataaggctgttggttaaccatggagagtgttgttttcaggtgccaggctcacatgaatgacttagtgatgtcacttgctcagaaatttacgaagctgcaagttctttctttacggcaaatcaaacctcagctcgaggacagtgcagtggaggctgtagcaaataactgtcatgatttacgcgagttggatcttagcagaagctttaggcttagcgaccgatcgttgtatgctctggcacatggatgcccccatcttacaaggctcaacatcagtggatgttccaatttcagcgatgctgctttggcctatctcagtagccagtgcaagaacctgaa

SEQ ID NO: 4958 - DNA, 2000 bp, Oryza sativa
gccttatctaaaatcagcacaccgctataagggatcataggtgatggttatactgttggaccgtacgtcacatacaccatacttccgaaaatgtgctggcagccccatatatatactccctctgtctcttaatataaaggattttaacattttgcttgtactatttgaccactcgttttatttaaaaaatttgtgcaaatataaacaacgaaaagttatgcttaaagtactttggataataaagtaagtcacaaataaaataaataataattccaaaattttttgaataagacgaatagtcaaacagtgcaaacaaaatgtcaaaatccattacattaggggacggagggagtatatattagtgctaggttagaacagacacctaaaatcttacgtaggtgtcggttcttaaacaacagcaagtatcagtacacccgagcgagctgagctatctatgcaaccatttttaccccaagaaaaaccaggtagttgatgatacctctgaatccgagcgttgtcaccggaggtagttgtaccacaactccacaagttgccctagtatatgcatacgtaaggtcatgataatatatgaatatgcatgcatatgagtagatcatgatttacgggaggcatctcggccgatgtaccggcacatgcatcgcttctctgtcgtctcgttagcagtgtccgtcagctgtgtcaagaggtcatattaattaatatgcatctgaaactttgaggacataatttatcgccatggaaacttttttaatcttttctttcttaaccattttgagtatatctacaccggtacaatctgggctcatacagtataatcagcaatacataaatttccaatccattggttaacatgcatgttttttttttctagttagctagaacaaacccggcaaaagtgaagacaaatgaatttatctttttttcgtaacgtaaggtgatttagtttttctctaagtcaaatttcattaaatttgaccaaatctataactaatatagcaacatttttaatatcggacaaatgaattaattataaaaatatatttaacagtatatcagatgaaattagtttgatgttataggtgtcatgtttttccataaacttggttaaatatgaaatagtttaacttagtgaaaaaaaacccaaaacaccttacattcctaattaaacggagggagtagatgggtagaaaaatacatacgctagctacacggatataaatatattttagatgagatcatgagattatagatgggagctatagttgacaagaaatgacacgtgagcatgatagctcaacgacgacgacggtagtgcaccgcatgcatgtatacgaatatatcactttatattttctatatatgcgataataaatatttgaatcaagtatatactcctccagtttaattataccccggcatgccggccggtcgccgcttgggatgcaccggccggcgatcgtgttggccggcggccggccggtcgccgccttcttgtgctgcatatgatccccacgtatccggccatcagatgaacaactactagcttatatattccttggttttatactatacattattttgattttttaagtcaaatttatttagattaaataagtttctagaaaaatttgataacatttataacaccaaattaattagccaaattaattagttttatttataacattgaatatattttgataatatgttttttttctgaaaaatagtgtcgctttactttttttaaaactactaagaaaaatcgaaatgactaataatataaaacgaaggaacaagtatatgtttattgtaatcaaatttcaacgacgaccagttctgcaccgctttagttaattaaagctactatacgtgcgagctactagtataaatatgtatacggatatgcgtctacaatccattcatcccaaagcactcagctacaccggcatagagagagaaaacaccaagctcgatcgatc

SEQ ID NO: 4959 - DNA, 2000 bp, Oryza sativa
agagcgattgggttaacgtgagaagctgcacggcacggcgcagcgggtgtggccaaagtgagttattaagccaataaaacacggtctaattttttttgagaggaaacacggtctaatcttaggttggtagtactattagagtattattatagttttgtctattactccgtataagtcattacttaatgtccatgcattttttttcctccatccctctcttctaatatggcattaaaaaaggggcagttggttacttcgtctactatcctgatccacgtgtacaaatttgagatgaccgtttgttttgtaaacggtttttatatatctcctcatagattctgctgacgtggacaacctaagcaagccaatatcttgtcccacggataaaacctcctcactcgtcaggctcctaccgaactcgtgccgaaataacctacaccaagaaaaactcgacgcgacgtggcaggacgactcacgatgagccgaaccccaaagtgccaaacacatgtaacctgtacaccttagctcagagatctccaaaatctgcctcccagaagcgatcctataggccgggtcggggacaaagcttcagaatagcgtggggaaacagaccacggcggaccatgccacgctacgccgacaccgtagtccgtaaataccccctccctttacacgagatccacatggtcgtgggacacaaactatgcgaacgaatcgatcaagcacccttctttaatcaaaagtttttttttaaacacccgtctcgatctcaagtctacccctctttcgtctttcccgatccaaacaactagtagttttgtactaatccaaagtcgtctccaataattatccattataaaaggaacgcaacacacgcactccaggtaaaccctacgactccagctaataaacgcaaaggaggaaataaagcgaacgggagcgacaaggacggggaagattcgtgccccgattttttcgtgttcgagacgcgcagggaggggggaagagattgaggtggtgggaggatcggaataggatctggtgcccccctctcgtcgtggttgcgctctcatcaactcgactcgaccggtatcgatcgcgactgccgccaccgcaacattctcatttctctctctcgtccccgccccaccccacccaccacaccacacccccgtctccgcgcgaaaattcccacgccacgcgcgccggaagagagggaaggcttttcctccgttctccgccmacgcgccgtcatcgctgcccgcctttcttcctccgctttgtttgggccggagcggggggcgcaccggcgccggcgacgtctctcttccgaatcgggtaagcgtcatctcgttccgatcttggatacaggttgcgtgagggagcttcgcgcggggcgggygggtgggtgggtgtggaatggggatttgaattctttggtttgatcttctcagttgcgccacctgcttcgggttcacgcctctctctctgccttgctctccgctttcccgcatgtgatgcttcctgcacgccttcgtttgtctctcttttgctcttgctctgcctgcacgkttcgtcgtctgatccatccatacttttctgttggaaaaagaacgtgttgtttgaccaatccgaagcgttcgttctcgttttgttcttcgacttttagtttttatagacagctgctcctgcctggtggtttcctgtttttgatttcgtgctttttgttcctgatgatttgactcaggaggcgggagccagttcatggaatctggtggaattgatgctcaagtcagagcaatcgagcagcgcacaagattggagattcctatacgtgattgagattgcaaatgtggcgcctgttcaatgagttgtgggatgttctaggatctgggtttttctcatcgaggtttctttaatccagctcaaatctatttacacctcatccgtttgcaccgagatcatctctgtgtgtgtggtcaccgtgagattaggaggag

SEQ ID NO: 4960 - DNA, 2000 bp, Oryza sativa
atgtggcgctgagatgtctaagttcagcgccacatgatttgatgttgagcaaaagggtcagatttaaaataagttttggcagcggtttatttgtaaaattagtttttgcaaagggtcaaattgttaaaatttgtgtgttttcttcctgtttctcccttttcgggagtaaatgaacgatcagtatggactatgggatgggccatcgttttgtagcacgaagttgtagtacgtccttgacacgtgtagaacttttctcctactgtgttacgaggtagtacaagttagatatgactgtgctgtaactcctggtgagcccaattagaatgtgaaccggttgaagggtgtggacaatgattcccactgttaacatcactccgcgcttaccattgaattttgatttacatcagatatcttcctgataagatagagtattactccattatttggaattgatcatgggcagatgggatcatggcaagagcataactctgttgaccatatgctggtgtattttttacaatttaaccctttacaaaaacttattttaagaataaactgcgccaaaaacttattttaagaataaaccgcgccaaaaacttatttcaaaaataagccgcaacctcagcgccatcagtattggcgctgagttacaacatctcagcgccgcaaatattggtgctgacctccatccgaggtggcatgtattagccacgtaattagaggtcagtgctatattctttggcgctgacttttgtacaggttaaagaatcaaacctctccatttataactagatggtatgatagctcagttgtggaattgctctaatccgacacagaggggccaaggttcgaacccacggtacagcaccatttttcttgtttcatctattttacattttttccctaccatgctcgaaacttataactaaataatatgaattaatgttatgtatattattattattatcagtaggaagaatttgagaacatattttctcaattttattaaaataaaaataaatttagaaagcatatgacgatatacatgaaatttacaactaggaataactataaatgacaattaaaggtatatagaaatttgagaacattcacaacattcttcttacatattttctgaagttcaaaataatttttgaatgttggaaaaatattataaaattattactctataataattggaaatatctaaaaagttttataatatgtatccttttcatatttgtcaagtccagaataaaatgattttcataagccaaacttatgatcttggtagcaaattaggctagcagattgcaagagaaagtattaaaaaaatgtacatgttgcagagttcaaatccaagatcttcaatcttcagttctgtaaccactacaccagcgatacctataagatataaatcaccgtttcttagttttagccactgtaaaggttagcgctaaagagtatggcgctgacctcttataacgtggctaatatatgccacctcggatggagtcagcgctgagatgttggatctcagcgccaatcccgatggcgttgaggtcacggctcatttttgaaataagtttttagcacagtttattcttaaaataagtttttataaaagtttaaattgtcaaaattttgtcgtatactgtccctaccccaagtccccaaggcccaaccatcgaaaacaacggccgagcagcgtgaacgaattggctgcgcaaagaatccggctgggtgcctgacgtggatccttgctgttcccgtgtcccaaccaacaggtgggccccactgcccgtccccaatcgcctcatccgctccccagccgggcccacccgccggacccaccaccgccaccactgcccattcgccacgtcccctaacgctccaggtttatatataggcagcctttgcctgcctagtggaccgagtcgctgagcgccgttgagcaaacagcccaagctagcagtagaaaagatctgctgaaacacgtc

SEQ ID NO: 4961 - DNA, 2000 bp, Oryza sativa
cttgcaccatagttgtaacacacgaatcatccatttcgatataaagcctcagaatatccttctagaccaggatttttgcccaaagattgctgattttggtttagccaaactgtgccgcaccaaggagagcaagctttcaatgacaggtgctagaggaacaattggatttatcgctcctgaagtgatctatcgatcctttggaattgtttcaacaaagtcagatgtttatagttacggaatgatgttgctagagatggtcggaggccggaagaatgctaagtcaatggttgaaaattcaagtgaaaagtattttccagattggatttatgaccactttgctctggatgatggattacaagcttgtgaagtcacaagtgaggttgagcaaatagccaaaaagatgactttaattggtttgtggtgtgtacaagtattgcctatgcatcggccgacaataacccaggttttagatatgttcgagagaagtttggatgaactggaaatgccaccaaaacaaaatttcagtgaattactgtaagatactttctctacacattatgatttggactggtaataattttcagtgaatttcatctaggctatttctgtttttcagagaacatccagctcaggagattaacacagaaagtacgagttctactataaataccaaagctgcacaagctctaagtgaagtgctaagggttgaggagacaagcctcgttaattcaaaggatcctacagtgactaccaactatgcaaaaagatgatctgcagtcaaattttggcatagtatcatcacacattcatgggtcatggcattgactagtgtgtttaaggtagctgaatcgaagatatttctgaattctgtccatccccctaacttgtttcataatttaattcaacaatttgatctaccagaagctacgatttacgattccgtgccaataattatcacattttcccacttccctagtttgatctatgggctcaaaaactagcatcatcatagtgccaaaattttcacggaaaagtagtacgcaaaagagcaaagagcaagttacttactggattcctccacggttcctctgaagaaacgaagaagcagcgggcacctctactcagccttcgaacttttgatgagttcatctgctcgatctatgcctcgcccaacgcagaaagtacaggacaggatgcccatctccccggctccccgttgcttgtgtttgtaatccatccccaatccgccgccctaaccagtcaccaccgccaccaacgcagcggaggagaacactagcgttgttcggcgactccctcaatgcctacggccgagcagctggcgtttactgctgcggctcacgaagcgagacggcagcggccgcaatcctgcacggttgcaccgccgccgacggcgacgccgcggcggcgccggggagaagggaacaaccgaacaagggctgcacggacgcatcacaaaattctggcccgtactatgtgatgggtcagaatttaggcccatagtttgggctgtaaagcctattctggccctcttcagctaacggcccagtgagacaagtacctgcattcctctgcgcttttctttatccaacttgcatttgaaatattttgaagttccgtacgctggtatcaacgaaggtgcacactcaccaaacactgcgtgctgacgtaatcagcacgtactataatatgcaccaatcgcggtttaactttaactcgcatgcagattaatatgagcagtggcaactgccaaccccaacgaactctccttaccgatcttcgtttcgtttcatactccgtactactccagaagaagagagaatggtccaagaaagtgaccaagcaaatgacgcaagtggtgcacgaaaccaagtcaactacacacatgtaaaattcctcgtctcctcgatccatccatcgatcgcttcgcctataatacaacgcctcttcctcgccgcatcgcgccaccaaccgtcgtcgcg

SEQ ID NO: 4962 - DNA, 2000 bp, Oryza sativa
catgtgccgtcgtcgtcgaggagttgccgagttgaggataactgaataagatcgagactcccctttttcctttcttttgttcacccggacatgtggtggggaactggagattagtcatgtgggcccaatcgaaatggacggtgggctactagggcagccaatgggctggaggcctggagcaacatggaagttgatactttcggtcttcggtttcttcaatttgtagccggtactgagagcaagtacagtaagtcacctataacgatatatcaagaagaaaaaaagaaagagaagtaagtgggctataaatttaattgccagtaacaacacggacttcaacacgttgtatgtatgaggtgggaccggatattaattgtgtaggatatttgtgtaaataactattgtatgaataggctattagattagttatagatgatttggagctaacatttggctatactattaaacttgctctaaccgaaccggtctctcccatcgtgcaaccgagcaaacgaccgaagaccgctactttggttttttcggtttcggtgtcgattttttaggtacggtattcggttctcggtttttatgctcacccctaatcgtacgtacgctaaccgctgctagagcatcaccaacacatcttaaaattttattcccaaatttttagttatggggatgcaaaaacataatttgaggtgttaaaaattttctcactccaagagattaggtaaaattggtttcctaaaaattaaaagggtgggccacgataaaacctccacgaaaaaaaatatgttttgcgctccttcctcccgtcagatcacgtgtgcatctcttccccgcacgtgaagcgccgtgattaggagccaaaacaagacaacacatggatatattccgacgaaaaaaaaatttagcttattatttaattttttttaaatgttgcacgatgttacaccaggtatatcgaaattgtttcactaagtagatcgaaaatgtttcactcgtttaaatcaggtgttgtttcaccttataaaaaaacaatgtttcagcaaatagcgaaagaatgtttcagttcactgcaacatttgatccatacatagtgaaacattgtgtacactaggtgaaacattttttttgtggaacaaaaaataaaccaaattcccttaatagggggtttccaaaatatgtgagttttttttttgcaatggaatatttcgttcactacaacattagatttatacatagtgaaacattgtgagtacactaggtgtaacatttttatggaacaaaaaataaaccaaattcccttaatagagagtttccaaaatatgtgagtttttttgttgcaaaagaatattttaattcactgcaacattagaaatagtgaaacattataagtaaattaggtgaaacatcttttgtagaaaaatgagagaggaaagtgggtgggccgaggtacacacgtggggatggttgtggaaaaatgggagagggtagtaggtgggccgaggtacacacgtggggaggggcgcgggggagcgtccgatctggctcctaagcgccggtcacccggctacaagtattttcggaattttgggaatgagattagatttggctcccatcggttgccattttacccaaaatggcttatttggcttattagaaaattaaaattaatttataagtaaaacttttgtagatttgttcgtagcgacttaaaagccaacattaacaaaaattacgttaaaagcatttcaaaatcaacttcaaaatcaagttcaaaaattcaaattttggcttattctttggctgtttaggccaaacgatggggctatctgataagatcaattttttttcaaaaaatatcttcagattattggatagagaataatataccgattctgttggactgttggtgatgctctgaatcccgccccgagtcctccttgactatccaaaagcaccgcccgccgccgtcgccgcgamgccgcctagaaaaa

SEQ ID NO: 4963 - DNA, 2000 bp, Oryza sativa
atatcctggcaaaattttacatcctgttacatcgaacatttggatacatgaatagagtattaaatatagacgaaaaaataactaattacacaaattgtgtgtaaattgcgagacaaatcttttaagcctaattgcgacatgatttgacaatgtggtgttacagtaaatatttgctaatgacggattaattaggcttaataaattcatctcgcggtttacagacggattctgtaatttgttttgttattagactacatttaatacttcaaatgtgtgtccatatatttgatgtgatatgccaaaactttacacctctggatttaaacacagtcttataagactttctaacattgcccacatttatatatatattaatgaatctagacatatatgtgtgcctagattcattaacatctatatgaatataggcgatgctagaacgtcttataacatgaaatggagagagtattaaataattgacgaagtaagcatagctcaactaaggccgtgtttagtttccccmtattyccaactttccatcacatcatatcacatcaaaaaattttcctacacatataaatttccaactttttttccaaactcctaactttcttcaaactttcaacttttttcaggaactaaacacaccctaattaagttcctcgtggttgatttgacacgggtggttgaactagtccaccacatgagctggttaaatttcttgtggttgaaccagtccacccggattcaaattttagatttgacacggatgcttgtattttcagctaattaagttttttttgttgttgaaccaatccaccgggttcaaatcctaaatttgacatgaatgctcgtatttttttttgactaattagtgtaatttcatcaatcttaggatatgccgacagtcttctatgggtagtttgcactagtagaatcagtccatccgggttcaaatcctaaatttgatactgatgctcgtattttgggccaattattggtgatttcgtaaatatcaagatataccagcccagtcttccaaatatgctcagtgcaggtacaatagtagactataacccatctataaacacatatcgaggagagagaagaacaatggactacaatttataaccaactgcagcacggattcctagacacaatatgtgtataaaaggtgggaccatgtattaatagtgcaatatatgtttacaagggcaattgcaaatttaccactactttgaatcgttattgcaaaattaccactagaaaattacaaaaataccactagaactgttattcgacatccttcaatatttaaaaaaactggtggcaaatttacaaatgcccagtttataagtaaccattgtatgaattgactattaagttgactataagtgatttagagttactagttggctatactattaaacttgctctcaaagggctaattattagtgacttcgtcaatctcaagatatgccggcccagtcatttatggatggggtgcgcgttgtgagctcctgcgtttgtactgtgtttaataaaaaaataataataactgagaaataagggtctgttcgatttgatgccattttcaaccttaccaaattttggtaaagttgccaaaaagtgattacatttagtttgctgtcaaattttggtaactatataagaaatcctaccaaaattttggcaagttgccaaacaactatgtaaatttttggcaacttgctaaaattttaataatgacaaaacttagtaagttttttttggtatcaaagtgagcaggccctaatattgccatgtggggctcctctcctcatctcacgctgacacgcacgcacaaacgctaatgacgacccaatcagcagcagcagcctctctcctactaataatctccccaagattggatcatactctcatctcatcatagtctccgcccatccgccatcgctcgcagatctctctcgctctcgctctagctctcgctcgaggaggag

SEQ ID NO: 4964 - DNA, 2000 bp, Oryza sativa
tgaatgcttcatttctgttttgtactttactttttcttgtatgcacccaaagacaaaatcggcttaccatttgtgccaagaagacggttttgcataggttgcatgcttgcgtattggtttgtatctagtcaatatttgcaacgagataattccagaaaatttctaatacggctgtatattttatttccatccaagataataatgaaatatgtttaattagtcagagagagttttctttggctgtattcttttgaaggggttaggaacctcttccattcacacgtaaaacggagcaacggattcatacatgattaattaagtattagattagaaaaattttaaaaatagattaatatgatcttttacaataacttttctataacgtgtgcattggtaacaagggagtagaggttaggaatcttgagttaaagattatagcctaataatggggaaaatcaactcttggcctccagcatctagttttaattatccaatatgatttgagataaaatctctaatgtataaattcttactcctattgtccttttattaccgatatgatctcgtatctaatttttactgaacatttttatctgtaaggaaatgatattggttgtgtttagttcacactgaagtttggaagtttggttgaaattggtacgatgtgatagaaaagttgtgtgtgtatgaaagatttgatatgatggaaagttggaagtttggaaaaaaaactttagaactaaacagggccataatatagcacatatgctgctctaaaccttagtactactgttagggactactcctagatagttctgtgtggaacaaacagaataactcaaacaaagtcaagaacaaaatctagatctcatcaataaacaaaggcatttttcttctgagatgaaggaataaacaaatttagcaacagtacaatcaccaacataataaaatgattactcctactagtacaatagtagcagtggcaggaccagggacttgccagctgaggaaagacagtacacactcatgggcaagaatccaaagagaaacgtttacttctcatttccatagcaccaaaacttgactgccgcttttgatttcagaagaaattcggttggaaaaaggtactcttttttttgtktgaattttcaattcagatggcctaatttcaattccaattccaatttgtgtgctcctccacctactaccatccagtccaggcatatgctcttcctgcaacttcttttatgactctgcatattgccttctcttcccccctctctctctctctctctctctctctctccgcaccataaatcatttctcatttttttccccatcctcccactctcttctgtcaagatttctgcgcttttgccaattggacggcggcccacctcggcggctgtgctgttggtggcgactgtggcatcaaagcttgatcttggggaggctttggggaggaaagattgagattttggttggttttcttggttctagaggaggttttcttggttgatatttccgggtagctcgcccaatcagtcccaaatccgattttctgggctctgatttggagattatttttctttagctgtgattattggttcttcgctcctgtaccaaagctcccgtttttggttcttgtggggatcaaagagggagggagttcgatcttggaaagagtttaagtgtcaagattcgaagtggcattctgatttggattatgcaagctcatgttcttggattatctcttcgaagattagcctttgcgtagaccaaagtgacaagaggttttggtggtggatttgaggattcgggttggaattttccggtgagagagagttctacgagttgtggttgatctttgcttcggtggagaagctctggagttccatttgggaagctggaagcttccatttctggttcgagcaaaggtcgctttcagccacttggagagttccctcgtgtgaggattcgaggttgaaggagacccaccc

SEQ ID NO: 4965 - DNA, 290 bp, Oryza sativa
ggagwaatttacaaggwtgaggttttcggtaattcttcccgaatctttgggatcagtcagatctgttctttttcactgtacagttcatcagtaatactgttggagcttcgattggaatcaaagtttagattctgcaaaccattcttcttgattgcatggcttcatttaatcatgcttcttctttttcttcagtttttttaaactgtactgtactagaggcagttagagtataactgttaatggatgaacttggtggctgaacttctaatggtgatgacttgagcagagaa

SEQ ID NO: 4966 - DNA, 2000 bp, Oryza sativa
ctaataaaaaaattaaataagacgaacagtcaaacgttgttgatcattgaatataaatagtgtaagactacacattttagaatggagagagtatttttctgtaaactttgatcaaatataaaaatgttcataggggtgagtgtgtgcacgttgtgagcgcctgcgtttgtactgtgtttctaaaaaaattgtttgataaaaaatcaaacgatttttaatatgaaacggttggagtaggtcacatgactgcgactggatgaatgactagcggttggcgtcgttccgctgtcccccagcggaaaatattgatggctgacaaaacggcgacagcgaagaacgagtgaccgtcgtctttgcatcagcgttgatcagatacaaacgtggtacggtggtcggtggtagcctggtaggtgtgctcttctgcagcgttgtagaatttgcgctgccctgatggctagtttgggcctcaatttggcccttccacatgtataggccgggagattgaactaaaattttggcctatacacatgtattgaggcccaccaaaacgaggcctgtctgcgctttgggatgagagctttgcccactgaacacagtgggccgagtattgctgatcagtggattgtgctgggccgatccgggccgtcatcgaatacgtcaatttaaaatgttttgggattgttattgctaggatggagttgtcgtgtctttatcgacaaagactttaaaataaaaaaaacgatctaaataaagttataaacattatgcatcttgagtgcttattggaaaaggacagctgaacattttctcggcgtattgatctcatgttgttgctaatataaaggaaaaaagaattcgtattactgcttgtactcgatataaatttcataaaaaccttatacattacttagtactatgttcgtttcagattacgagacgtttttacaaatcaaactgttttaagtttaactaagtttgtagaaaaaatagtaacattttttaactcaagacaaatttattaagaaaatatattcaattattgatttgatgaaactaatttagtattataaagagggtgtgatcggtaccctcttttcccaacccctctctctcgttttccgcacgcacgcttttcaaactactaaacggtacgttttttttgcaaaaagtttatatacgaaagttgcttaaaaattcaaattaatctttttttttaaaaaaaaatagctaatacttaattaatcacatgctaatagatcgtttcgtttttcgtgcggaaaggattagttcccatccaaacacaaccttagtcaaacttgaaacagtttaatattgactaaagtcaaaatattttataacctgacacagagggagtagctaatataaaggaaaaacaactcgtatattactgcttgtactcgatgtaaatttcataacgaccttatacattactacctcgaaacattgttcatgaattaacgtaagtcacaatattattctcttaaggattacagaagcctaagttttcttggaggaaacgtagaggagtttttaatcaaggtttccttttcgttacgtttcgtgcgcagcgcgtccaagtcgtataaccttttcgttacttaaaaaccaacgcaaccccacaccttttctcctacccaccacccgtctccgcaacccacacatctccattgcgccaaggaagaagaaaccctccccctccctctccccaatccaatccaatccaatccggcgagtcgcgtgagtttccgctcccctcttccgtcgattcggcatcgggttcgccgatcaggggggcttccttgtccgatttggtggttgattcgtgtttttgctcgtgttctccaggaccagctcagtctctcgtaagggtttgatcgagttgttgtgtttcgttgcgcgattggcttcgatcggtgtgtttctggtggttaattttttggggggcgctgatttggtgattgtgtgcaggaaggagcgcc

SEQ ID NO: 4967 - DNA, 2000 bp, Oryza sativa
ggactattaatccgtgccaacctcctttagcttcaacgagtcatggcagctctagcgaggcatcaacacccccaaccagtttaggtcggggagagggggctttccctggagcgtcgacggaaccgtatggatggaggctggcagtgggccagcgtctacgcttggcttgaggatcggaggagaggtggggagcaagctcgctcgctcaacaaaacaaggsgtcttgtttggatccccagggtattagataacccttcggaatcttactatttaagagtattaaacatagattattgacaaaacccattccataacttctagtctattttgcgagacgaatctaacgaggtatattaatccatgattagcggatgattattgtagcatcattgtagaaaattatggattaatatacctcgttagattcgtctcgcaaatagcccaggggttatggaatgggttttatcagtagggctatttaatagcaagattccgaaggactatttaatagaccggaggatccaaatagggccaaggtcacaaagagaaggcgtgcgaagaaaaagaacgtgaacattaggtaatgacctaatatcaaatataaatagaatgagtgagacttcgaactcagaccggctagcccaccaccttatgaagctaatcagaagacccctggacatttctcaagatgcacgtagaagaaaataaggttattgttcatgcatggatcttaatgcaatcctagccatccacaaattaattgaaatcaggggctgtccgtcaaaagtccaataacatagatgcgatcgaacgatgtacgcagtagtatacatcaagagatctatggtagatttgactgaaaacgttgggcatatctttgaagaacacgttagtccatgattgttaaccatttgtgtgcagtgttgggttcagggtactgtacatgacgtataaattaattggaaactataggagcgcaaaaaaaggaatcaccatatatgggactatatatagtacctcataatgttgtatcagatcggtacatatatataagatgctaatgagctaggatcgtattagagtgaattgctcattagcaagtagtgctaaaacacagttagctagctaagtagttagggattgttgagccggaatagtatcatccaggtacttttgagtttcagtcagtgatctgatctatggcacacgatcaagaaattcagctaatgataaaaggtactccttcagaatcgaacccttcctgattggttcaggttgtactacttcaacttatgcgtgggtcctcttatataccttagtaagtactctctccgtcccgatataagagctatctatattcgtagtagttagacttatattgagacgggagagtagcaaactagtacatgctgtcatgattcatttctgcactttcagactcgaacctcgtaatatttgatagatcaacggtaagcatgttatttttttttaaaaaaaagtactattggaattacacattttaatgattttttccaatagttccattgttgagatttttgtttaattatgctaaacgaaagactaaatgcgttttagcttcaatggaaatgtaacctcttacaaaaacagtagtatgaatgccctgcaaattctagccacacgattggttctcttcaatttgattgtcaaattaaagcaacgggtagtacactagtagtagcagttcacggcaaccttagctgcgcagtgcgtacgtacgcatgtctcactgcgtacatcctttaatttgtctgcgttaagaacaggctcagacaataattaaacttcactggttcgatcacacttacaccacgtacgctaaattactgtaactttctttctgccaagatactcccggacaggaggaatcctgccatggcgaaatctgcaaggggcaagctgcgcttgggccgccgatcgcgaggagaagaggcgttcgacgatgtcggtgggtgccagtg

SEQ ID NO: 4968 - DNA, 2000 bp, Oryza sativa
tggattataataagccgacatagaataaattgttagatgtttgtttctcaggattattagccgggttgttaggtgttagcaaaccaataatgaaaaaaagcacctttagagtggattactagattatagtaatctagcttatagattgtaatattctatcgtaataagctatctgtttgtttcagtttactcataataatacagattataataattctaagctgaaacaaacatgacctaagaaaagcmaaagcattgccacttttgtatagtkggttttctctgtaacagagagagcaatcctgtagggtcatacgatggcatggcattacatggttactcttgcttcatagtactagtagtagctctctcctagtgctatggcagcggcagagctccggccatcggagacggaagggagacttcgatcttgtttctagctgggccttttgggcccaaacactaatgggctgcggacgatgcaatcgccaaaatatttctgcaattcgatgatgtcgaatattacaagtcgagcacgctaagcatctgtgtgtttataatgttgcgatagcagccgccggtgtcgatacactactacttggtacatgttggcattaattcgcaatgcactttgatagctctagattaagaccggatttaatctgggttattagttactctatcaccttcacgtttctgtcgaccggaataaatccgggttgcatgggccggacgacggagaccggcacaaactaggcaacaaaagcaagcatggcagatcgatgaactgaggagaaagaacaaaaccgccacgccaaaamttygccaaaaacgtagtatgctagtcatttttaattaattaaatcttttaagtttgattaagtttgtaaggaatatagtaatattttagcataaaaggggtggatattcaagatagtgctacctctaatcgctaaattttattttataaattttatcaaacctgagaagagtcaaaatgacttattatataaaacagagagggttctatagagtaatttaaagtcacatttgaaacagattgagagttaaatgatggatgacggagtaatagcttggaaaaagcaatgtaatcaatatcgataaagaaagttttagagagttaccataaatttggaagcgtgacacaaatgatatatccgctagataatcaacattctgttgctggcttagcatctaattatctgcttcatctgtttttaaatatatgatgctactgaattttggaggtaacatttaaccatttatattattcaaacatataatacaaaaaatgcaaagagaaaaagggcacatttaaatacatctaatggtaaaacaagtccataaaataaatgaaaaagggataaatgttgaaacatcatattcataaagtcaacatcacgatcttatgttcaaaaacggagatagtcttatcttatcgtatataggtaaagtagcctgtttggcacagctccagctccagctccacccctcctggagctggagctcaaccaaatagtttcagctctaccaaaactgggagtggagttgggtggagctctctcacaaaatatactagagttatggagctgggtttagacagctccacaactcctctccagtctcaactcctggagttttatttaggagttggagctgtaccaaacaggcccgaattgtcaaagtctccaaaggaattattaatgccgatctcgcatgaaacatgtgcgtaaaaaaatttcgtaggaggccgacgggcacgaaagaggcccggcccaccacgctgctaggtgggcccacacatgcatagaccatagcggtgacttgtgcggcgtcgtgcaccccgsaccaccggcccacgtgccgcgtcccaccccaatttcatttccgtatccaaatgctccgcctagtagtaggagtactagtttaggtggactcgccamtygcctctccgactccgaccatctccgcctccgccg

SEQ ID NO: 4969 - DNA, 1310 bp, Oryza sativa
cmccttttaaaaacccccaaatttaacatcccamacawtccgatgggaccagggattaaaaattttagtccctmatccaaacagcgtcttaggaaggtctatatggagaaaatggacaatatatggttctatatgtggggtttcgataaaatgacactaaataggatgcactggataaaatgcctctcagtatgtcgtctaccaaataaaatgccacttcgaggagtcataactatttctatgaccaaaatgcccctagctatggagagagggagggccaggcgggtggcgctcgaggccttgttgggaggcaaaggcgacagtgacgacttggggagaaggatagggcggcaagcaagtggctgcggggatgacccccatgcacgagtaacacaatggataaagcaaaaatacaagcatatatatacaaaatatgttcgaacaatccaacgaaagagaaaaaaaatggaagaataattaaaaaataacaccgagaaaccatcaacgccatcatctccgcctgatctgcccacgagaagccgccaatgccgttgtccttgccggattcgcttgcgggaagccgctggcgttgtcgactcgtcgtcgctaccaaatctgcccacgggaaaccgccgccaccgccatcggcatcggatccgcccacggtaagccaccgccgccgttgggagtgcgccaccgaatcttaaaggaggarggggggggggcttcgcaaatgctgcttccratycggaaggacmccatcgttttcgctmatgktkgggaagracttcaataaaattttggagatatttgcagtatgtacaaattcaatattttttacacaagcagtcttacctatctatatttgtttgattttcacccggtgcaatgcacgggcatatttgctagttaatgttaatgaatctagacatatacattaacatcaatataaatgtgggaaatactagaatgacttatattatgaaacggaggaagtatttaattaatccgctctaatcgccgcttgttttgttttttgtgaggctcccgaatgtccccatattgacatacgccatttcattctagcttagcgagatggacgtggctgagcgccgccaatgctaaccattgaccaaatttgtgtccaccgtcctccttaattgtattaccgcgtcatccgatagatactgccctgaatgaatgactgacctgaatcgttgctgaactcaatcattgacggcactcgctgtggctctacaaaaaacaacggcgcattgagctatgaatggactactatccgtgaacaagaa

SEQ ID NO: 4970 - DNA, 2000 bp, Oryza sativa
gatccaacctgaagkaaaaaaaaagttcccctyttcccctttaccctttttttttttgttctttggctcaatctatgttgtttgaggttgagatggttggtgatcttgtttagtgcttgtgtatttgcttgtcacctcttagttctcgtagtttagttttttgagtttgggtgtgttttatctcgtgttggtttgttttctctatgcgttgaccaaattatttgagttgagactagaagttctggatttgaccaaaagttttgctatgtactaatcccactaggtagtaatttctaacctgccagagctttcggaatttcttaaatctatcactgtagttaaatctacgatattgtcaatatcccctaaagaaatcttatctacctcccggtttaatgcaatagctacctgcatgggatttacaggttattccatagataaggctgcagcccaaatatggattttaatctctcgggtggacatccacccgcttcttacatgttaactaaacgattataattttttttaaaaaaaataacaaaataaattaatatataatatatcactccacaaatatgcaagttcgaattcgacttttataagttgtatcaaaaaataataaattaaattgtaactagtatacacatattcacaattaaatttattatttttgttacaacttacaaaagttgaatttgaatttgtatttttgtgaagtgatatattacatattaatctattttattaacaataatttaaatattttcataaccatttagttactaataacgggtgcacatctactcgagggtagtttttcactacaggttgctgcttcataaaggattggctacgtaattattccttctgggtgcagcactgtagcatcatggcagccgactagctccatagccacagacaatccgtttttacatcagagcaaagctgccgacacattgttcctgaggccaccgaaggcagcgattggcaccatttacaccaactacagagacagcaagatcggctacggctgtgttcgtttggagaacaaagcgagtgagtttatttcattttccacgcgcacgtttccgaactactaaacggtgtgttttttgcaaaaaatttctataggaaagttgctttaaaaaatcatattaatctatttttaaagtttaaaatagttaatacttaattaatcatacgttaatggctcatctcgttttacgtctcattcttctcaaacacacgacgtcgccaaaagcagtgacatatatctgcctgattgattaatcggatggacgatcgatggcgcctgccttctcgaacaagcgggccgggtggcgattctctttgtaaccatcatatattttcctccagaactttgatcgacttggctacatcatcgcgaactccatatataataaagctcgcgaaagcgaaactgacatgcaccatcggatcgatcgcgcctgggaattcctccactcgataaaggtggtgctgaatctcctgaggatgaacacgaagataaagattgattgttccacatgattaattaagttttaattattataaatttaaaaaataaattaatcttatattttagagtaactttcattcacacgaaatataccgtttagcagtttgaagagtgtgccacggatatacgaaatttcatcacctcttattggagaaacaaacgcagccccgacaccgggacaactcggagcgcgggcgcctcgccgtgccgacgcgtgcctcgccaacgtgtcgcaacgcctcactaaacaaagcggccacaccaccacacggcatccgaagaagcccacgtccccgtcgcgcccgggccccgagttgtctcccactcgccactcgcggcgtcacacgcacacctcacaccaccaccaccaccagaagcagcgtcgcgaagaactcgattccctcgtccgcgtcccgcgcgcggccggcgtcgctgtcccggtgaaccgcccgcaacagcg

SEQ ID NO: 4971 - DNA, 2000 bp, Oryza sativa
ggcagaggctgacggcagcggcgaccaggcggtcggccaccacggcacgcgcgcgcgggaagcaacgggcggcgcggcgatttgagcggcgcggctcgggcacgcgtgctgactcgcggcgcagacggcgcaggcgcggcacgggcggcgaccgcacgggcgcgtgcatgcgaacaacggcgcgcgggaagcagcagcgagggagcggagagggagggctcggctcggcgcggctcatgcgcacgcgcgcgcggcgcgcgggcagagcggagaagagggagggagagagagagagcgagagagagagatagccggggagggaggggaagatgggccgagagagattcggcccatcgaacccgagggaggaaaaataaacttttgcggagggatcgatttgggaaggtttggattcgggattgaactcgacgatagatcggggatttgagatctgagatggcacggacactaggcaacaagcaaagaaacagatttcgcaaatagagtttttaagagatagttttcccgctaggcgccacgacggaacgggcgcgtacaactactagtagttggttggtagtagaaatagatatgatctattggattagaataagatatacgatttagattgggttctactatcggtaaaaaggattaaaaatataattatataaaagagatttccatgccaaatctaccaacaccattttctcatgttaaattttagtatttttgcatgaattaatcatttaagattcaaggtttgactgcacgcattctataatgctatttatttgagttagtgcaataattgaagtagcgggcttcaaaaattgccacatcaaatttgtgattaggtggagagatgatagaagatgagaataatagcggtgttatagatttgtagccagctatagcatgagttataagacatcgtgtgtagtaaatatttatgtgtaactattatatagatagactattagattagctgtagatgatgtgccaatttttgaagctaataatagatggctatactattatacttgctatttgagatcggaggtagtaaacaactactttctcagttttaaattatgagcatctctaggtttcttagtggagattaaagttgagaagaagagactctggcattaaaaatataattatatgaaagtgattttcatggcaaataagatttatgggtaggttaagcagagatgagaagagaggagatagagaagaaaagtgtgttacatatgtgtagctaacagtagcacgggctataagacggtgtgtgtagtatatatttgtgtgtaagtattgtatggatagagtattagattagctgtagatgatgtgccactttttgaaactaataattggctatattattacacttgttgtttgatattggagacagtagacaattgttctctccattttaaaatataaggatttctagattgtatagcaaagattaaagttgaggaggaaacactttggtgccccttgtgtaacaagaaacaacttgaggcaggaggtagttagagcctcttagaggtaagatgagatttaaaataaattattgatgggataagtagtattacaaatcatttttatatattgtaacaacatgaactagtgaggttgacctgtcatgctagcaatgccttttatgtctctgcactcatatactgtaagaggcaattttagcacagacatcgatcgaggaaacagaaagaaggttggagctactagtaagacaatgcaatgagaaccacatttttcccctactgaaaaagtcgcatcgcatcagtcatgtacacaatcacatgaagatcccaacatcagaaacgatgaagtggtcacgtgcatccatgcctagtgctgggatcatttcacctgctaagaatccactagtgtcggtttcgtaggacctcccttctcatcagtgcttggatggggatttcaatgggagctcattggagctcgttggtgtg

SEQ ID NO: 4972 - DNA, 2000 bp, Oryza sativa
gcggctatatatgaagccatattatcatttattttgtatatatacagagttacatctaatcatttaaaacattgattttatttgacgataaaactagcaaatcccacggcaaggcgcggggtgccaactagttattgtatataattaaacaattaatggttgcggctttcggcaggcacacaacaggccaactggggagggctacttgaggtgatgaatgatcttagctacaaatgcacttaccatcattcctatttggtttaggactgcaagcatcaatcatttatgtatttttattcgaaacaaaaaccatttcataatcttcaagagagatgtaatggattaatacgattgatgcaaaacaaactgatttcaaagattgctaccttaagaaatagcctgtgaaaaacgtattttaatgtgcatccagcttcttaatccgcatgtgtaaaaaattttcacgggcattttgtttggtcgttctgtaaaaatatctgaactctcaactagaattgaagcagatcagaaagcgctcatacaaacaggttaattatcagccgtctgtaaaaaataattaccagcagataagaaagcgctcatccacggcagattgatccactgcctcgcaaacttcggtcgtcgggatcgaagaagacgagggagagagggaggagaagcggcgggatccgcgagtagaccgcagccaccaacgtccccatcgctgcagtcacgccacgccatcaccgtagccgtagccatagccgttaccgagggcggcggatccagcactcccgagggcggcgccaccggatccgctgcccgccgtcgccgctcagtcccaccgccaccacctgccgcttccgaggtcgagggcggcggatccgcaagctgccgccactagctccagaggtcggtggcgggtgcatccgcccgctgcccgccaccgcccactgccgcccgccgccgccgctcccgaggttggggtcggtggatccgcgcgtcgatgtcgccaccgaggacggaggcggcccattggggggaaaaaggcggcccgtttggggggggggagagagaaggtacggatgattggaaagcggaggcagcgcggtggggagagaggcggcggcagcgcagtgaatgggagcgaggcgacgtgcctggtctagggttagggtctaggcgcggtgaattgaagtgcgaggcgaggcttttttccgtggatattttccagcatttttcttttcgtttgtaggtacaaaacattgctgacagataatcaatcactaagttttgctgacatataattggtttctacttataatattgctgacagatattttgatcaaaaaatatttagatttgctgacatataacatgtcatattacatagtattgccaacatataatttaccaaaaacctttactaccaaatagtctaacaataattttttatttttaccggcaatataatttaccaaaaacctttactaccaaatagtctaacaataattgtttatttttaccgacagatgtccgttggcaatcttgtgtcatggtgtagtgtagctagttgtatacatacaatgctttactttgctatatatcgatcgatcaacagttgcggcttaacacattcaagcatccaggcacacgcacgtacgtactatacacacggacacacctctgtctagcactgggcacacatatctgaagataactgagaaaaaccaattaaattaagtacacctagttctgtctatcttaacgccgtgtacgtacgtatctgcttaattataataagagattaagagtgatcagagacgcaaccagtaagtacgttgtgccgcttgtgctccatccatgctgtacgtacgcatagcacgtacaataatagttccaacttgacatgcatgaacgaacacgtagctagctaccttgctggcccctgtataaatacccctatataccctagctctaccagccagccaaacagtagcaac

SEQ ID NO: 4973 - DNA, 2000 bp, Oryza sativa
cgcctgattagttcgagcgatcgatttggcagtgaattgttaggttagtgtactacacgtgtaatggcctgatgacctgacggttgcagagtctgtgacatacttcttccttttttttgtttgcggacatgtctgatgactttggagatataaaaatcacaatgcataagttgttgcagaagttccagtcttagacaagtttcattgcagcgttcgattttaagcttcttttactaactgatgaaggagacctgttctcaggtttagcacgaagtcatcttgtccggattcagggcacgtagttttggacccagtgtaatacagagtagtttttttgaagttcttctcataaaaattttgtaaaatttaacagtacatgagggaaaaaaaaaggagaggtacagccattgacttgtatagcttaaaactttagaaagtcggcgtgttcatttatttatctggtgatgcttcttcaatggtagcattacctgtgttggagatttgaaattgacctttttgtaagaacaaatgagaggcaggtggtagatggccacctccagttcgtggagtatatgtaggaagttgacaaatctcgagctctgatttgtttgaatacaacaagtaggccttagcttgataatcatgctaccagtacaataatatatatctatcctgctaccctgttgaaaaatcctctgttatctaattacgccgtcctaagctgaccgcaggaactcaaaattatactacactttgcaccacttaccatccaaaagatatcatatgctgagaaaaaaaataaagaaaattgtgtactataaaataaaaatccattaaataattcatgctttctgaagagaagagtaaatccttatattaaatagaagatttaactaaaagtccaatttgaagtacaagggggcaaatacatataaactacacctttcaatttgtttcatttttttaatgtttattttatccaacctctacatggatgcaaccactaggggagccaaattttatctagttacaacaacaattttgagtgcctctttaggttgcggatacactaaaaccacatgaattggggtgacatgggatttagatctattatggttttattatgcctctcatcatctctgcttgttaccttattagtcgcaactcgaaaacataaatttggagttgattttaggtttttttaaatcataatagcattagcttataaactgttaataacacagagatgaaagttttatccgtaaattatattttgtcaaacaattagagcctaccactgcactacacgcaatccaaaccacctatttgttgatctaatggttcaaataggcaataattcgtatatctggtctcataagttgatgtaaaatgtaaatagaagtactcccactgaaatttgaaaaagcatggtaatcccatttgaaaaagtattccatcatatggtatcacaaagaggaccatgctttatgacacccaacaacaatattttgacttgggctaggaaagcagcacttaagtatgttgtatgtatctcatgtttcatatattgaaacaacaaaactgatttccttgccggcaaaactagaaaaatgcggtcacgattttgtattgatgataatcattgtggtcatccatagagtcaagccaaggccaatgaggtggtgaccaagttttctaatctcccatccagactcatccactcaaccaaacacaccctaaagtttattaggaagaattgtttgttgggcagaagtcaaatcctttgcaacattcaaatcctaaaaaatacaaaaatgagtggaagcactccactcttgcgctgattttttatcagctcatgctgcaacactataaataccaaggataggtgttgtcctgcaacattataaactctgagatcgatccctcaactcatgcaagtagtgtactcaaattcaagctacacaacttacaatatcccaaccctttgttacaacagc

SEQ ID NO: 4974 - DNA, 1878 bp, Oryza sativa
agtattgcctccggttttagttgtcatggcgcctatgtggctctgtggtctgtcccacattgcattaaagtggcgcttacgtggcaatttgatcgaaaataaaaataaaagaaacaaaaattaaaacaaaaaatggggtcccatacgtcagtcaaaccaaaaattaaaaatagcaagaccatatgttagtgggtctcacttcgtccatctcattcttaccctgttcccctcccttccaatcctttgcagcattttctccgacggacggggtgggagcgggggataacggggtcgacgatggcccatcaggcgcggcgacggcatcgaagcgggtgactacctgccagcttggcgccgcctctgcatttcctccacatggcgaggatggaggcgataggagacaaggcgggagcgagggatggcgggggcggccggtcctccgccgcgcaaaagcataggtggggcgtcggtggcggcggtggagcaactagtcttgtcgccggcggcggagttggagccgaggatgtggagatctgttgggaaaggaaagtggtcgttccacgcccgatgcactcgccatcctcgcctcacgcccattgcagagagggggagtgttcttcctcctcctttgcgtcatcaaagtcaaaatcgttgtcgctctactgcctcttgctcttgctgccaccggcgttcttggagcccgcagaccacaggtggtcgacggtcacctgcttcgamtccgccgctgtaggaatkgggttargatkgaggattgaggccgccaagaggattggaagagagaggaagatggttaggtggaggaagtttwacccactcatatgtgggtcccctattttatagattgttggcgagtwtggcccccctatgggtcccgcatattttatttcattttattagtttttttactttgtttcgtttaatttttttgtcaaactgccacgaaagcgtcacggttaataccacgtgggacgaagatctagtcaaaggagtcatgtagacgccaagtcaattaaaaccaggaacaatactatcgagggatctcgtttgcatgattttgtaatttgagggatgtgttggacctggtttttaggataaaggacgaaaattagaatgggcgagtgggacctaaattgaacttatttcctatgtacgagtgagaactctcgtgagcaaagccgcccgatctgtctacggcaattctcggttgagaccgacgtgtccgcatcctgccgcactaccgtctcccgcccgccgcgaagaagagagttgggcaatccagcaagcaagcaagtggaccttcgttctcttgtgcgatcgatgcgaccttctccagttctcctctcctctccccggcctcttcttctacagccataactccaatcacaaggtacagtgatcatctcccccttcttcttcccagccactaccagcccagacgacgggtcagaccgccctggaattccacgaacgcggcccccggtcgacagctaacgagcttttgtttttacggccgcgattggtggacgacgacctcgtttcgctgcagtcttgcgcgcgcgtgtacgcattttctatagcgagataccactactatcttgtagaattaggccggtgcggatcgcgaccacgcttgtctctacgctcgatatcgtatactagcacgtagcgggtggaaacgggcgccaacaattgcatggtacatgcatgcctgccaggaacttgtataaatagggggtgaatgcttttgttacatcgcatcgatctgcatgcgaagtcctgcagcctccgtagcagacacggtacaacgtaccgagcaaccttagctagtggcgcctgaaaattattaagcgcttcaag

SEQ ID NO: 4975 - DNA, 2000 bp, Oryza sativa
cagcataccattcgtacccactgcaaatttctccatttcctcaactttggccgacatggactcaacctgtatggtcttcctcctaatctcttccagacccatcctcaccttctctttctcgttagcggcttccgattcagcaacaatcactctcttcacaagggtctccatgacatcggtcaccacatgtatcgacttcagaatgtcttcgacatctacatccccctcattgggcatcgccatgttcggcaacacgactactatccgccgacgtttcatcatctaaaccctcgcaggaagcggactcgccgcccttggaccaatcagccagtggcaccccgttcctgtcgacgtaccccacgccatcctggtgcctaatcccgcaggacgtgtgcgcgaggtgcggtatcgccatgatcctggccttggatttgaggtaggccagcagcgtggcgatggtcttcaccctgcggcagaggtgatccagctccttcctcgagtcctcctcggagcacttcatcccgaccttgacctccacgagcctctcccgcagtgcgtcgacctgcgactgctgctgccgcagctcctccctccattcgctctccccctcctccgcgccactccgatcagcagcggcacgctccatgaaaccctacggaattcaaaccccccttaaaattgcatgtaaaatcggctagaaatggatctattcgtccccccaaattcgaccggataataaacgcgtaatcagacggatttgcgagcgagacggtggggatattggggagccatgtaccttcggtataggaggcaaggagcgcgtcgccggcggcgaactcccgctgcggcggcgctcctcgctttcttcgccgcgggttgggttgggttgggttgcgctctcgcgtcgcgtctcgcgaactagtcgctcgcctttcccctttcttcccccaacccaaactaatgaaatgaaatcattttgtttgcttacttatttcctaatccgatgattagattaggtgagtacgctaatggcaaaaagaaagattaataaatgcggacgcgctaaagcatccgtatgggccttgggcctcttctgggctttttttccaaaaaattgagcacatttgtaacacaaaaatcaaccattgtttttgtgcccgagaagcattgtaaggcagcacaacaatagcaactgtaaaagagaacgtcaatatttgtaggaagagtttttctcgtatccttgaagagatatatactttctcacaatttaagaggtaaaaactgtactaccagttgaactgattagaaaatatttaataaatgtgtagtcgagtggtaatgtaaagggtaggtgaagtaaagcatacccttggattccacttccccacatacccaagttactggactatcaataatgagggcattatggctaccgacatctaaaaatgacatgcattaatttggcaaacagaaaatttaaacctgttttttttttctcaaaagtgttttggtttggtaatgtacgtctcctgaacaattgagatttgagagtcggtggttaaaactaaaccgtgagataaaccaaccggtgctttaattaattttgcacccccaatataagcaacaacgaactcctacgtggcggatggtcgagacggtcatggcgagcctctaactccccaccaactgccgcctctcgtcgcctcgcctcgccggcgccacctccgcattccgttccgaccagccgatcggtttcttcctcgccgttgcaaccttcgagcgcgatcgatcgaggcggttgaccgccgattcgccgcgcggcgttgcattgcacgcggctttccagttgataaatcaatcatcatccccttgatcgatgcgagtggcgttcttgttcgatcgagaggaggagatcgtgatcgcgagcgatccgggcggggcggcgcgccatcgatggcgaactgcgtgcggtgctgctgctggctcctgggbgcatgctc

SEQ ID NO: 4976 - DNA, 610 bp, Oryza sativa
ggtggagtggagctgtggagcagcaaaaacccagctccacccccgtagtacaaatttgtggagctgctctgccaactccgctccaaaaaacagagaatttgtaccgtttggcatagctccagctctaggtaagttggagttgggagctggagctgtgccaaatagggtctaagtgtaaattaagtttcttggtggttttaggaggtggtagttttggttgagggtggtgccacgtgagtatgtgacattgacttgatcatcgtgcaaatattcatgggctgattcttatgggccgaatcacataagcaacgtttttcaaacaaaacaatggtggttggttgtaacgactaaggacgaccttccgtctattttggtcgttgcaaagcaaggtacgtgcgatggacacggcgtccgagcatctcggcgtcttggattggctgctaccctcctccgaaggtgcaaggtgctataagaagaggagggttgcatgcgtgcttggatgcttgcattgcctccatcctagctaggtagctatatcgtcgtcattaattggagctagctagggaggcagcaggcagagcgcaggggggcggccgggcggcgagggaac

SEQ ID NO: 4977 - DNA, 1333 bp, Oryza sativa
tatatatataatatctagatttattagcatctattataacaatgctagaaaatcttaaacggagggagcattagtactagggaggagtaacgtgaaatgggtggacatgtcacgtcgcagatggatcaaacagacggacggctctgctctcgtcaaccactgtttccatccgccgtcacccactctgccccccggtcggtcaatcgcaccgcacgggcgggtagcaacgccactttctcttccccttttacgctttcctccttcacttcctcccattttcgaacaaccaccatgctaacctttctatacatgcgaccaatcataaactacgtatcacaaaactttaaattagataaaaaaactttaccaaagaataagtatatgcttaatgccaatttaattatagacctataatatttatggctccaacataacagcaatactagggatttaaactttaaaatatatagttttgtgatagcttcaacataaagtacatagaatttttatcttagtcttaaatatgcagttttgtgataaatttagtgccaaatctataagtttatgatagaacatcttaaataattagttttgtaaaatttaggatccgtttggtagagctccaactcctaaatttaactatagaagttaagtctaaagtgaaattgtagagcagtctaaacccagttctacctctccagttcatttcgtaagagtgctctagtcagcttcactcccatcttaggtagagttgaaactgtttggctgggctccaatgactaggcttcaactccagaagaggtgaacctgtagtttgagccatgtcaaacatacctttagtttaatactccgtactccattttttttatgtcaaacggactcatccttgaaataatgtcccttggtagggttctctccggaaaagggggttaagcccataaacggatcattccgggtcgctggcacagtacacccctatctcacccaccaccatcccaaggcggcgcgacgacccatctcgccgccgcgaattctctctccggcgaactccaactcgaaccctccctccgccgactccgctcacgagacctaaaccctccttccctctcctctcgtctcgttcccaccaccatgctgggcatcgcgaggaggcgcctcggatccggatgcgtacggctcctcctcccctctcctcttctctcatcccgatgattgtttgtttttttttgtaatctcttctcgttttcgcggtttctgattatctgggggtgggggatggatttctgacgctcgccgtcccgtttcgatcgttgtgcaggcgctggggcaactc

SEQ ID NO: 4978 - DNA, 2000 bp, Oryza sativa
tatctttgtaaatatttggtttttccatgatgatattcatgggctttctcgggtctagaccctgtgctgaagccctagcagagagctcaggctcatcttggcccctgtaaacctctccagatggtactagttactacaaaagctgaaaatacatatttttgccagcaagaaattttgaccatcatatcctgttctttccagaaatgcgatccatcaagttcccaaaaggttataaaagatatagtactgatgaaagtgagaaaaaaatattaattgatttacctggtgtagagtactagagtacaatgtaccttttatgaacatcattgcatagtgattttgtgccattttgtgcagcttgaaccatattacatgaggttgcatgaaatttacccttaaataatttatacataaatttagcagttttacaccactatttgtgggtctatgtgctcagtacccaacattttacattcgcaggtcaaaattcacgctgcagagacaaagataccactgatttgggggtggaaaatcccctatcggcactaaggaaaacacatttttggtgtttctgcgatagcaggatgccttatttagatgccaacatttcactatctatatactactataaaagacaatagtgatggtggtggttctgcaccgacccccaccaccactacatttgcacgtcttacaaattagtcgttgatattttataatagtatataacacctaatatttgtttgaatcaagtgaatagcatgtattcaaataagtatgtgcattttaccatagcaaagcattggcattttgttagtgatcctagaagttgggagagatatcagtacaattaattgagccttccaagttcaacaagtccatctcacacaaggtaccccttgataatgcagcatggtcttgccaagtcactaatccttatgggatgcacatacgtaccactactggagaaaccatctttagcgagtcggccaaattccacaatagccccggttctttaaaaaatcgggactaaaaagcacttttagtcctggtttataactgcaatgggactatgtgatctttaatcccggttcacctcatgtcagaggctgtcagaccgccggggatctatcttaactttagccccctaaagtccatgtagatctttacactcggatgataaaaccaactggagctaaagttagcaacctttatataggtcttcttcctcctccagttcgagccatgcttcaaaatttcaagaggaggaggggaggtgctgccaaaatttcttgtaaatttattttggtgataatatacaaatcggagggatctaaaaggttagcaacttcatcctccaatgatttttgcttagcatattacatttagagatatgttttgtatacattattgcctctaaaaactttgatgaaagatgatgagagagaaaatttgtttagggaagaaagaatatagaaatttgtttatttagatttttattaaaaaaaagtgataaaagagatgagaaataaaaaatatagaaaattaatctaaaagggatagaaaactaagttaatttagatttaaaatacgtacaacacattaaacattcatttatagctttaaaaataattaaaacatgaacaatatgtgggattattgtgtatttattgtatgaataattatattataattactgtatgattatttacttggtttgacctttgtggattttttttatgattttgtgcatttcatgtagatggattggcaatggatatacaccgcggaccgatggtcgaaagagtttgttgacggcgtgcatttttttttaktgtggccgatgctaacaagcataagggttttatatgttgtccatgtgataagtgcaaaaatcagaaggagtattctacattaaaaactattatttccgcttgtttaagtcggggttcatgtctagctataattggtggacctagcacggagagctaggggttgaa

SEQ ID NO: 4979 - DNA, 2000 bp, Oryza sativa
gtgtaattacattgtaattagcatgtaactactccctctgtctcaaaatatagtggatttgggttagatgggacacatctttgttcaggttcgtagtacgtattaggatgtatcatatccaaccaaaatctatattttaagacagagagagtagattgtaactcatatataacttttatatgattttaaaccattatatttacttcaagattcacgcaagtggagaagaaatcatagcacgtgcacctgtgaggggatttgttcctgcaaaccccgctttgcgaaaatagcgtgttatcacgggatttttaaaagttatatgcaagttacattgtaatttcatacaaattacattataattatactatgcttgtattatatttatatttgacaaatttgtggtagaaaatttgtcagtccctttctgattacccaacgaaaaatatgaacagtggacgcgagtagggaaatcccaccgtacagcccaacagacaattcaataggcccagatagataaaggccgtggttactagtggagagcctgtatgggccttcacggcctctttaaagaaaatatattccggcaggccggatagagatttttttattaaaaatatatttcaatgaatttgggccagatgatatttttccctgtgtgcaactactcaagttgggccaaaaccttgtctggtgtaaatttggtccacgcatagtagaaagaaaaattttactgtttggagtaatatcttcgaagggaaaattcttgcggcccaatattgtctacctggtattctcaactaattgtcaagttagacatacctagtgattagtgcagtacatcgatcattgcatcactaattcactagtggtcggccaacttggaacatggaaatctcacctaaaacttaaacagctgaactaggagcatgcagcatccatcaacactcaacttacgatcgaaaccataatccatggacgacaaatcctagctactttcagtttcagtagagagtcacaagacagagatgacaaacaatcatcttggtccgatacgtatacgacttacatgtagggaagacagtctcgtacctgcttttgagttagggcctgtctggcgacatgtgcattatgcgcaagtgcatgtatagccaaacatcatatcctgcaggaaaaggcagaagtgataagagaaattaattaacaagaagctacatatacatagattacacagcgttgaagaacgaagtgttaacccagtcgatcgatcccctgcaaggctgctgcagacatgcagctagcagaaggaactgaaggggtcgatgaaattgaaggtaaactaagttctctaagctagcttgctggtaatggattatatggatgcatgaacagtgtgtttcgagactatacttacttacccctgcaaatggaaaaatgctgaatgctgctcttcagttttctgaatggccatggctcttcttccagctctctccagatctgcaatgcaagtcgtctatatgccatcttcccaagtcaaggtcaactggtgagagtcttgttaatttataaataaaaaatttaaaaacagcactaagatgaagtctccactacattaagcttgcgtacccttttcgtctctaggtttggcactgacaatgggcccataagtgggaccaaaccgcacgcgaccccatctgtcagttactggttttctacctctttgcaagtcttcgctgcgcgacctagtcaactaataatacaagcacgtttagttagatatggaccacacgctgtcggaattattcatgggcccacagaccgaataattgtttgtcgttatccacgctgtcaacattacaattttgtccacgaaacaagcagataaaaattcgtactccagttgagaagagatttcttagttctcaaaaaaaagaagagatgaagaaaataaaagcaaaagtcgggaattggccgaggagactgggagataatctaggctaaaa

SEQ ID NO: 4980 - DNA, 2000 bp, Oryza sativa
catatcagccttgtaagaaaaagcgagatgatgtttcccatgtctgaaaaacacatttatgtgtcgaatctatacatctactattaaagatataggatgtttatgtacttttgtccatctcccgctcccatcgcgcctctacgtaggacacaacatcgaatcgaggtgatcctgcatggccatatcatgaccgctggtaagccaaatcactcccaatgcatcgctcccgctcaattgcataacgagccactagaaaataaaaacattgcatatcgatattacatcggataaagtctctcacacccctcatgtgccaccatggccaacagtattgtcactcgtcgacacatctcgcacatcgcaactaccaaaactagaatccccacatctagaaacatgatgctctcttgttctcgtccatttccacatcgggatcatcgattcctcccatgcctaacatcattgaggtctcatatctggaattggcattccgaccaacgtagacatcctctttggataccacaacaccatcaagtttgcgactctcatgaatcaagtttgcgactctcaacgtgttttgcttaaaatattttcatggatctctcaccgcagcctagcatccatccttccatatcctcctattctctccatatatttgtgctccacgagaggaataatagtagtaccacatggcaatgtgcaacatggttgagtcaaaccaactcaaccaagtatcatattggttttactcaaccatgttttaggtatttattttatctttcactccctccatacgtaacatgagtacccgtatatatatatttcttgtagccttatttactgttatgactattgttgctgtgtgtacgctaggtcatatgacaaaggctttgccaaacgtgcggccctgccaaacatgcaagagctaacgtgaagcctaaatcataaaaattgaaccttggttacctaatttatgtctttttccattataatgtacgacacacaaaacgttttgcttgtataaagcatgccatagcgcctagaaattgtttccccggatttctcatgctaacgtctaacctcatcgttatcgtcgtgtcacgatgacgggtaaagaacaactcaaagtgagccgatgagtgtgacacaatccactaaaaatgatttgcttgccaggctatgtcttcgtataagtttttctaaaatcaaataatatcatatttaagtttacaatgattaataatacttaattaattaccacgttatgttttacgggcggctaaaaatctcagataaccaaacggtttcgaacgaagcccgattgtagatgacgtatcgacgcccgagccgttacggccgcaggccacgcagtacatgcgtacgtccgacacttgtaggtttaggtgacaggaggcccttgggcacgcgcgtcgccttcctctgtacgtagcctacgccaaccacggtccgagtaaaaccacgacacggcgccacaccgtcgcacgcagccattaccggctagcggccacgtggcgcgagcgatgagaaacatctcgtcctcccggctggcctcctctccctccctccacgttctcgtcaaagcagcttttctgttccaatgaaccgatgaactatctggtcgcttcgacgtttggctttcagttcaggcacaaaagtttctttcccgggtggggtccacaagtcggacacgttgaggcctccacgtgggccatgtttgacgggggagtccctccctcaaagccactgacatcgaggccccacgtgtcagtgacccagttctttcgaggcgtcacgcaaccgtcactgccccatgacagactgaaatgtggggcccacgggtcagtggaaccgcctcctccccaacgcgtccacgggacggtacaccgcggctcggtgtataaagtcgggaaccgcatctactcgctcgcagtctcgcccaccgccaccgccactgcactccggtcgccggagcagccgcc

SEQ ID NO: 4981 - DNA, 2000 bp, Oryza sativa
ttgaccgtacgtcttataaaaaaactttcatgaaatatgtaaaattatatgtataccatataagtatatttaacaaatgaatcaaatgataggaaaagaattaataattacttaaatattttgaataagacgaacggtcaaacatatttaaaaaaatcaaacggcgtcaaaatatttagaaacggagggagtataaattagttaatatagatcataaattgataattaatggtataaaatgtagttgtgtaacctttattttaaaccgtgtgtttttaaaaataatggttctaaataaaattatgttatattgttaatataatgggtaaaataatagattccaaaaaaattttatttccaaagattatggatctaatttatttacgtatatattgtgatatatatataatctatgtttataaagttatagttctttaaaatttaatatcactaattatagttacgatctcatctatatatgcatagagaaaagaggggaggagatggaagcgaatgtaatttttaatgatatatgtaatatatatttatttgtttttaatcgtacgttgcattacagttgtatatgtattttttttggctttttgtgagcagtatgtaagtacctttctctagtcagtgcgctgagagagattaggtgtgaggttattaatagatttaatttaatgatctgagataacagatatactaatttaaataaaaatcgatgagaagttgttttacttttttcctcatattttcttgaattttttttctaatctattaaagtgcattttagaacttaaaatattaacagttaatatgtgtattaaattattaatttggttttctatctcatctaaccaagaagaagggaaaaaaggttaaaaaaaaaagagagtactatgtatgtatgtgcacgtatatggaacagtggaacattttttttacgtgcaaatctttcacaggtaaacatagttagaaaatctgaagatagatataggtgttagctaaaaaataggagtagttaccgagaaaataggagagagaggccggagggagggaggtatagcacgaacctgcacatgccgcatatatgcacgatggggatgagggctaccggatttttgtttcttaagaggtctaatgattaaaatatatgggtccaccgatttaacggaaaatcaatggctatatgtttattagattttttatgatattctatattttattagagtgccacgtggcaactcgagagtgtttatagggtgacacatggcggtttagaagcgtttgtagagagtttaatagacttttagtatataatagatagcaaataattaattaatcatacaataatagatgttttgttttgcgtgccggggagaagccatggaagctacaggttttgtaccaccacctttgccaaaagtcgtcgcgcgacggcaacgaggaccggcgcggcctttgtccgcaacgttgcattccctccaccagcgccaaaactttcctttttctaatgaggcgaagccgtgccgtgccgtgtagttcctgcccgacccagccgtccagcctgcgttcccgtcacgtggcaccagaaaacttccccctccgctccgcacgctacggactcccgacaccgacaagaaacgaaccaaccgcgtgcgacacacaccggcgcccgcacgtacgtacgtgcgcaacccggcaaccgtaggagactaggaggaccggtgcaacagaagcgcttacaaaaaacgggcaggttaggtgactcgtcccgttccggtaaattatattctgtcgaacgctacgagctgagctgttcgcgttgccagaagccccatttgtttcgcgatacgcgcgaaacaaatcggcagatacgaagggaacattccaacctcctcccacacggctccaccaagaggcgcggcccgctcgatccgctgattcaccagcgtcggtctggtcgccgagtggcaacggaggccaacccctacgcg

SEQ ID NO: 4982 - DNA, 2000 bp, Oryza sativa
acgtgacttgtccttttaaattttttatatttttttttaaataatacggacggtcaaacattagatatggaaacctaggttgttaattttttttggacggagggagtacgcggccgatcgatcgacagccgatgtaagtatacagtatagtactagtacgtactaaggtgacgtgtccaccacggggactcgacacgatcggttggcctgcgtcgcacgcgtgtcccttcccgccccatacgtgcgcgccttatccctgcttccctgacaggtgggcccgcgctgtcagtggcagccagcatgacaaccacaaccgggcaaggcacgaagccagtgtgtgtgaaagaagcttgaatagctagctggtcaggttggttaattaagagcaagggtaataatgggctataagcaagctagtataggcttatgtggaagaaagagataaataaaaatggagagtgttggctctcatgtaagagctaactacacacaagtttcagaaatatgcattaaattcatcagtgagagaaagagagagtatgaagaaaatwaagataaccttataactaacctactatacatgttagctttagcattgactaatagtaaatagtgagctctactattaaacctgctctaatctgctggttaagtatttagttacagtatgttttagttttaggaggaagactacctaacgatataccgtaacaacggaatagttgacatcagcatagcaccatagctatcggaacttatacgtccggtatcagacatgatacactgcaactattactccagatttagtatataggtatcatactgatattacctattccgttaaaacggtataccgccctttatagtactgtttaactaatcatcaagttgttgctgaaacaattaggtctaatgtgcgtgtggctactaatattagttatagtactattagtggtagctttcatggaaattttgtgggggcaatacggtggcgttaggtagggtggagcgtcttctcgatcgatccgtcgatgccttaatttgctcggtatcaccagaaggcgtagcagctgccacatctcctttttttttctttctttttctttttcttgctttatttgcttcgttgacttgaccctgctttctgaacaagaagcagatcagttttaattaatactaattctatcggttttgaaactaatcatgtaagtacttttttaagataatggatagtcttatgttatatactatactatgatataattgattatatatataatgcattcctagagaaaagaacaaccaggataaatatttattttacacagaatggaagaattgttcttgatgcatatatggcctgttgagattaattaagaaaaggtggagatattttcttaggggaggaaaagaatatcataaggataatggatgacctcatatcaccatcacatctcctggtctcgttctcccaaggccccagcattggctctgagattaatggagaattaaaatgctaagagcaggtaaaatagcaggctataagccagctgcaaacatattttaagcagataaatgagaagagagaagggcagcgggctatagatttgtagtcagctgtagcacggactccaagacacagtgtgtatgacaggtgggaccagatattaatagtgtagtatataactattgtatgaatgagctattagattagctatagatgaattggagctagtagttggctatactattaaacttgctctaaaagaaaaggtattactcccatacagcaacctcatgcatgtggtcccctctaccttttccaaacttttgcaggaaagtccacccccaaaaaagtacattgatgtgtttatagttctattaaaaaaaacatgtttctttactggaggagtagttcttttcgtttttggagtagaattcatgctgcctttttcactggggagatagaaatagccatgccagtgtaaaatgttggagaa

SEQ ID NO: 4983 - DNA, 317 bp, Oryza sativa
ggccatatgcatctctcctccctcttctcttggtacttacttgtgcttgctctcttccattcttttcttccctaattgatctcctagagagttgagagttgagagagtagttaaggggcaagctaattaagctagtgagagctagtggaggtacatggctatatatatggttgtatgagttgcaccctccaaggggatcatacatcgacctcatcatccaatccaccaactgaccaacaacatttatactactagtagtagaagaagaagctctagatagctatatatcccagctgctgcaaaggtagtagacagca

SEQ ID NO: 4984 - DNA, 2000 bp, Oryza sativa
cactgatggcgctacacgtggtgtggctgcgttgcccgtggagtgtggacgcgcacgttgtcgtcgttgttggtggtggtggtggtctcggtctcgggggtgcgcagcgcagcgcgatcgattattgccacgctggagtgcaccacccggggagttggctgccacccttgtttatttataaatttattatgtgcctgtgttggggttgcatctggtggaggagggggcggcgtggtgcgcggtcgagtttcgtgcagtggcgacaactttgctcttattataatactaagggtaggtttagttgcacgctaaaattgaaagttcaaagaaaaaaagttaaaagttcatgtgtgtaggaaaattttgatgtgatggaaaaaattagaagtttaaagaaaaagttagaaactaaacaagacctaactctcccgtgctgtgagccaacctagtgctcgcggttttcatgagggtgccgtgattctatccggtacgattatattacattacacacttgtgcttgttaaagattttctcactacgtacatgtacacatgtacaaatgaatctaacatggttttttataaaattgttttgtaactttgtaaacaaatgatggcatcggccacttgcgacttttgtaataaaagttgtgtgtatgtgttatgtgtgattaactggggttgttcgattatggcagttgcatttacatactatttgagtccctctcctacgaaaatggaaccttgacatcatcagtgggttaaaaaaaagtatataaagtgcctttcaacatgaatatatttaatagtcttgctatggatgaatgcacagattcaactttgttgttggtcgttgaatggtttaataacttagaagtattaacaaatactatgcttgtatgtgtagttttaggtatttagtgtattataaatttatagaaagtatagataaaagggcaaaatagtggtatatagtgtccacctctcaggtttataaaaatgcttagtcattgaacgccactactaagcgattttatcaataaccgtgagtgccattcatttattgatgaaaatgagtgaaacttagacaaattttcttaaaatttgaggtttagtttgactttctttttgaacttgtgcgaattgtgaaatgacttatccgttctttattcatacacgcttgataagactttatatatcacttaatacctagatgagcatttttattgataaaccgtggttattattcaattacgacgaaaactagtgaaattcaaataaacttattttttaaaattcagttaccgatttgccgagagatttcatttcggtaagacgataaccacgggtaccctcataattcgtgtagattcagaaaaccgccaagcaaacaataatgcaacaccagctccaactccaaggctcctccaattatttggcaggaaaaagggaaagaggcaaaaaagggcgggagtttctggcagctacacattttctctcataattcgaaactacttcatacaatccaacttctcgtctagattacgtgaaatgagaagatttccgaaagatggctgcaaatcaattgcttctcacgatctttaacctcctccaatcagacccaaacacaccaggtgagggtgktggsccccacatggcagcgacatgagcggatcggatctgcccccacatgtccacgcaatcgtcgccattatcttattgttattccggtccactacccgccacaccaccaccagccacatttgatccccctccactccmttctctcctcctcctctcccaccataatggccaagctcccctcccgctccccactcctgctcccgyctctcctcctcckcstsctcctcagccgccgcgtcgcctcctcckccrccgccgccgccgcagcgcggtctgagtgaagtgaggttcttgggtggaagcgaaggagaagatagatagatagagagagagagagagagagagagaggattaagg

SEQ ID NO: 4985 - DNA, 2000 bp, Oryza sativa
aatatgacaattaaagttatcatttttaacaaataaatagttagaaaaggtgcaaaatttttgcatatgaccctattgcagtgagccaagcgagctcacgagcggctcgtgagccagctcgggcttggctcgtttcggaaacgagttaggaaggaggcttaggctcgactcgtttggctttcgagccgagccgagctatgcgagcccgagccaagcctgagccgagctcacgagcccaagctttttgtccacccctaccctcagcacgtaaaatgagaagttttatccctataatattctttacctatacatattactcttactaatttttttcatgattaaggatattttagttcttctacatatccactaattttattttgagatgctaggaatatattttttttctttttacgaaggaagtaatttacaagatggagattcagagcaggctgtaatgcgacgaagacttttccggggtttaacaactgtgaaccctgtcgtgccgggaggaacaaccgaataaccgatggatcaatggcgggtcaaaccacatccacctgcactgaatcactgcaccatcacttcatgtgcaacgctgttacagcaaggataataatacagccaacttattaattataaagtagtttatagctttttttttacccacacatataatagttagctatttacaattaatacaggacccacttgtctatctcacataatttttaaattttttagttcttgtgtccaaaccagctataagtttacagctcgcttctcctctcttctcttcttcacctcagcatttagccgacttacagtctactattatacttgctcttagagcaggtacaatagtaggctataagacagctataaatatattttaagaagatagaagaaggaatagaagagcaacgggctatagatctatagccaattgcagcacagacttcaagacgtaatgtgtgtatgacatgtggaaccacatattaatagtatagtaagcaattattgtatgagtttactattacattggttatagatgatttggagttagtagtcgactatgctattaaacttgctcttcctaccttgcagtaatctcagcgctgctgtcatatcagtaatactacttccacccaaccaaattactactacctccgtcccaaaataagtgcagccgtggatatccgtgcccaacgtttgaccgtccgtcttatttaaaaaatttgtgaaaaatttgaaaaatatttagtcacacataaaatactattcatattttatcatctaatagcaataaaaatactaatcataaaaaaattttaaataagacgaacggtcaaacgtcgaacgtgaatagtgcaaaactacacttattttgggacggagggagtactccacttaggctgcattcgttctagatacattgagttagaaagtacattgttttctgagcacacgcttcccaaattactaaacgatgcgttttttgcaaaatttttctataggaaagttgttttaaaaaatcatattaatccatttttgaaatttatattagtttatactcaattaatcattcgctaatggcttacctcgttttacgtatcttcccaattttatcaatctcctatccctaaaacacaccttaatagacaaccagtcagttgatcagcgcggttcatgcttgaagaaagcagcccggtggtaagcgactggagcaggtcatctgagccgtgcgatctctcgatccgttgatccgacggatccaagcttcccaacccaaagcgcatcagacggccatgtgacatgacaagagagagagagtcaaggagtcacttgcacagctcagcggaaggctgcgtagtcatctcgtttgatcgagctgagcacgagaggagaagaagcaagcacgcgacgcaaccatcgccgcgcctccgcgacccctgactgcgcgaggaggcgagctcgggccggagctgagggagctcgcc

SEQ ID NO: 4986 - DNA, 2000 bp, Oryza sativa
aaacccatcaaccaggattgatgtccgatgtggaagactaagccacaattcagtaattgcattgaaaaagctgttcaaattgtgcttcgcacacatcatgtgctcttgtgaacaaaaatgattgtgtgaattgcacatcgcttctcttctctccaagggatttcaagagaaaggacatcatttcctcacctcacaccgggaagccctgttttctttggtggtggcaagtgttcgatggagtttttgccgccttggtgagattttatccccaaaatccacttgaatacattctttatcattgagacattctatttttttgtttggtcttgcagacagaggtggtgtaaaataacatggcatgatcttcttactctatgacatgcttggttaggacttttgtattctctatggcctagaactactcgagcgagaccattttgcatcgtattgtgtcccaactagagagagaagtccttcaacaggcaggttagagtcgtgcaatagacacatggaatggtgccattgctatttcttggctaccatggccaccaccgccatggccaaccatgttcttcccctccacaagcaactagtacggaatagcagctgaggggcgatgggggttagtcattccatcatctctcaatagcaatcaagatacccgttacttctcctcgtctaggatgatgtgttttccttgtctggagcaataaggtgcgaggtatggcatcacttggttgatgcagtttgctgcaatgaactaagtgggtttatataagcgggctggtaggttagtgagctagcacaaactagtccggtaggttcctggcatgactcgtgccacttacaccccacacgtacaaagctaaattaaatccgcatattgaggggaaaatccaacgaaatacacaactgaaattgtttcttattctttcatatgcaacaaatacttttagttgtttaaagaggtatccactattagctcttctttccaataaccgaattcctccgagttgtatagggattaaatttgtccgcgtgaaaatcctataaagtttagagattccaaaggaggcctttagatgttttgagaatcaaaagggaaacttcttccttctattcacctgttccatggaattctaatccaatcacttgatcttttttgacaaactttgagttaaatagttttcatggttttgttcgcagaagatcttgggccgatgagatagcgagtctcctcggtgcctttgagccttcaaccaggcaacacaagctacagttttcacctttcagcgaaaaaagatgagatcgtatcagatcagatgctccggtttcttctagctccgttcgtctacctcaccagccgtcccttcccacccaccgctgccacgcaggggcaattccgtcaatccacccaccctgggcgcctataagaagccccctctccatttcttcaaactttagcttcagagccctccaaaaggaaaaaatattataggaawtaaaaataatttcctggttagaataaacacatttttaaaaaaaccaagaaaagattttcctcttctgttacattccttcttccttctccggccaccggagccgtagccgaattgtgcctcttctccggcgaggggagagggagagagggggtgtgagttttgctccttccggcgagtggtctcctccccgcgcggctgaggagatctctcgggacatcggggttggggcggcgtgcatgatggggttctcgctcacgccgatgaagatctccacgaggcttctgtggagcaccagcttcttccgccacaagatcgccgccaccatcgcgtcctcctcctccttcttataagatcatcttctccgccacagcaatctgtaaatatatacacatcgaacgcgacaagcgcgtttgattgattggatttttctcccctctcctcacgacaagtaattaaggcgcgcgatctcgatctctagcgttgagaacttgatccgcg

SEQ ID NO: 4987 - DNA, 183 bp, Oryza sativa
  misc_feature (1)...(183): n = A,T,C or G
ctmttntccttcctcctcctcaaatcaagaaamcgkgtcctaraaaccatngaratygcccttttccccctcggatyggggscttttgcgcggatcgatcgctggtcggkttcctgaattttttttaaattttttttctccggtgaccggagaggcggtggtgtttggatcgggaggggagag

SEQ ID NO: 4988 - DNA, 2000 bp, Oryza sativa
cccctatccgcccaactagcgcctagcgccttcttgaaccatgaatacaatagttatccataaatatatactccatccgttttaggttataagacgtttcgactttggttaaagttaaactgttttaagttgactaagtttattgataaatactccatccgttttaaaatgtttaacaccgttgactttttagcatatgtttgaccgttcgacttattcaaaaaaaaaattgtgaaatatgtaaaactatatgtatacataaaagtatatttaactatgaatcaaatgatatgaaaagaataaataattacttaattttttgaataagacgaatagtcaaacacgtactaaacagtcaacggtgtcaaacattttgaaacggagggagtataataatatttataatactaaattagtttcatcaaatcaataattaaatatattttcgtaataaatttgttactatttttttacaaacttggtcaaacttaaagcgttttgactttgaggaaagtcaaaacgtcttaaaacctgaaacatagggagtattacataattaatatctggtctcacctgtcatatacatatgtaacttggagtctgtgctgcagctggctacaaatatgtagcccattgttcttctctcttcttttttatcttctcaaaatgtgtttatagctagcttacggtcatactcttaataataagctggctggttgcacaacatacgacgtcactggtatatttgtcccgtcgttgacgttgtttttctaatgagttgctttattactatttgatcgtacgtggcgtgtcttctggagtactgtacaccagtaatccagtatgtgtgtgacacgccttgatctgacgaagacaccagtaccggagaaaacgaaaacgaacccacacggttgactccaatatccatgagggcgtccatgtccaacaattaatggacaaattgccccgtttagaaccttttgatctgtagagctatatacccgcttaaaacgttaaaactgttgcattctaaacttgcggcccagccggccgcgaggatgatcgtcaaggcaagacctgacctgagccgttgaattcttcatccgcgagaatactcgcgcagacacaaggacccacgatcgagtcgatccaacaccactccaacgatccccgagcctctctcgcgcgcgtcccgtcacgtcttttctcctcgcctatatgccgctagctaagagcaagtttaatactccctccgtctcaaaataagtgtagttttacactattcacgttcaacgtttgactgttcgtcttatttaaaatttttttatgattagtatttttattgttattagatgataaaacataaatagtactttatgtgtgactaaatatttttaattttttcacaaattttttaaataagacgaatggtcaaacgttgagtacgaatatccacggtttaacttattttggaacagaggtagtagtatagtccagtactatctccaatttatttatagtcgatctaacagctaattcgttttttacggagtactatactattaatatatgatcatacttgttttatatacattgtgtcttggagccataacacatggctacatatctgtagttcgttgctattctctcttatcttttatcttatagctggctaataatatgttattgtacatgctgtaatccctgcacacaacgccgccgccgttattatatatgaacgttcggatcgtgcgcccagcgcgaggcgcgcgcgcggccatcggcgcgacgtaatcagcgtccgcctcacgttgaggaggaggcggagccccggagtcgtctcgcggagacgtcgctctcgctcgcgcgcgcccggcgtccacgtgtatatataacccgccamacgcgcgcgccggccgggggacatcgcatcgcgtgtatacttaccaattaccgtacccgcggccggtaccgctcgtcctcggtcgcgaccgcgcgcc

SEQ ID NO: 4989 - DNA, 580 bp, Oryza sativa
tttkraarccttttttkgggktggggggggggggaatgtcaaccttatcattcatacagtcatgaagctgtgatgcaaacttataaacactatggttaattatcttgttctaaaataccagataatatcatagttttgaacttttaaggatatgctctcatctggttcaactcaaagccagacatttttttggaaccttttagtttttaacctacttaaggtgcatttacagttcagtgcatattctaacactaaaactggaataaggtattttctctgggtcaagataccactacttcttctgaagtgaacttagttctcctctgaggctcttatatccttataaatttaatagatacttgctaatagataccaatctgaacttaattattttaggacctgaaaattgtattgtgggcatatctgcttcatggagaaaatgctattttctgcaacccaactactggcacaaattttaggttacacaaattatccaaatggacatttgatccgcagcagctatgtatgtatttatctaaaactgtgcatgcctgcatgacaattcttttttagtgccaaa

SEQ ID NO: 4990 - DNA, 1714 bp, Oryza sativa
taaaatttggaataaacataataaaattaaaagtagagtttagagtccgtataaaaatacaatttacaaataactaaaattcgaaattaagaaaaatatgagcagaagagcttaaagtcaatataggaatacaatttagaagtaactgaaattcgaaattgaaaattaaagaatattaaaagataagtttagagtccacatagaaatataattagaaataataaaaattcagaaataaaaataaataatattggaagaagagcatagcgtctatatagaaatacaatttatagaaaattcggaattaaaaaaagaaatattaaaagacgagtctagagtctatacaggaatatatataatttaaataaggaatattagacggaattcaaaaagaaatattaaaagacgagtctagagtctatacaggaatatatataatttaaataaggaatattagaagtagagtatagagtccatatagaaatacaattaggaagtaatagaaagttggaattaaaaataaggaatattagaagtagagtatagagtccatatagaaatacaattaagaaaaaaatagaaattatgaattaaaaaataaggaatattagaagtagagtatagagttcatatatgaatttaaaactaactaaaatttggaataaacataataaaattaaaagtagagtttagagtccgtataaaaatacaatttacaaataactaaaattcgaatttaagaaaaacataggaagaagagtttaaagtcaatataggaatacaatttagaagtaactaaaattcgaaattaaaaattaaataatattgaaagataagtttaaagtccacatagaaatacaattataaataataataattaaaaaataaaaattcagaaataaaaataaataatattgaaagaagagcactgaaaattcagaattaaaaaaagaaatattaaaagacgagtgtagagtccatataggaatatatataatttacaaataactaaaatttgatattaaaaataattaataactaacacgtatataaaatacaatatgaatattacacattagtggttttataaagttattgcaaaatttaaaattatgttgtcattttaatatatttaaataatataatgagaaaacatatatgctattatatgaaagaaaatataatgatgctagccgcacaatctgcatggggcaaccatgctagttttttaagtaacatacagataacgagagatcgaccatccctagagtgatcaaaattcactcccaacagtctgaaactccaaaagaaataggtcattttctatctagtacaagaggaattgaaaggacgtattagatgggaggctgctacagggatggacgtcacgtcgccggtattaatctggaaaatgaagaaaaaaaatccggccgaatccccctagaaatcccatcgcgcgcctgcgcgtgtggtgacgccagctcgtggcctgcttgggtccgtgcatgcatcagagcagaggcaactactacgacctcgcgttcctcgtccctatataaaccccagaccaccacctccactgcttccaagaacagatgccatcctgagcttctagctcgcgagtgatctcttcttctagctcagtaaccacagctacaacctacagcttacagtgtccgcaaaattgtaacattgtgtccttccatcggcaaca

SEQ ID NO: 4991 - DNA, 2000 bp, Oryza sativa
ggagggcgtgcaccatctaccgggctatcggatccacaaaaaatatttttgcctttttatttaaagggctcatagaaaagaaaaattgctgtggctttacactttcgtggcttggctttggatatacaggagagtgggcccggctgcatgacaaggtggaaaaaaagagtcaaaggcttccaaaagatggaaagcaatatttaactgatccaattctgtttttgcgggttaacgggtttggtgagtttgtaggagtgtagtgagagaatgtctgccccctttatcttttagggaaaaaaagaactttacatgtaaaaaaaatatgagtagaacagagtgtttagctcacatagattatgtgtaaaattatgtttttattatgtggcactctaaattcgttagttagtgtaaccaagtaactagttttttcgtaagtagtctttcttgtgtgcacgttggtatcctatggcgcgtcccttttgttttatctttttaaaaacaatataaacacgtatgcacgtgcgagcagttacccttaaaacgtgcacgcacgccctatcctatatcttgaagaaaatatattgagattgataaagtaaatataaagtcatacatgtctcaccatcgtaggcacatcatatagcatcgaaagaataaataaccgtaaatacgagtagtaaccatatgttttcagcctaatataatgttgaaacaataacaagtgaagaaaaaaatacattcatttaagaagaagattacacagatacaaagaataatttcatgaatgaagaaactacaaaacaaatctaaaggaaaaaaaaacaaaatcaaactcacattccaattttcataccaacaccatcttagtttggtgagtcaggcgatctactcccgtaggccttattcgattaattccgagtaggaaaaaaaatagagatgttttttaaaaaataattactccctccgttttaggttatagtcaaactgtttcaagtttaactaaatttacagtaatatttattatactaaattagtttcatcaaatcmataattgaacatattttcataataaatttgtcttggttaaaaatgctactattttttcctacaaacttggtcaaacttaaagtcaaaacggcttataacctgaaagggagggagtacatactacaatagacatgaaatacattcctttcaaatcctcttacagcccgtttggttggagggagtttttagaagggattgggagtttagagggatgatgctattaagtgttttgtttggttagaagatatgagaattttagtgggatgggatgaggaattaaggaaggaactccctctttttcaatacctgggtaggggcaggtaattgggagggaattcctcctttactttgtctaatcaaatctcaaccatccgtttttattaatgatctaatctctaactaaactccctatcaatttccatcccctctaccaaacaagatattgagattaaaaatcaaattatcagtccattaccagagggattaactgaacaggcgaacaatgccttatcgggctaccgggtcagtacccgtagctttctcttctcccccattccctccttcctcccccgtgggtgcgtgacgtggggatgagattgcgttgttgctgcgcccgacaaggcaacccctcccccgacgcctagagagagaaaactaacctcacctcacctcacctcacctagagagagaaacacagaagccaaagcaaaccgaagcccagtttctctctcctcctcctcttcctcctcgcatcagtccgcataaagtctcctccccttccccctcctcctcctcctctccaatcttggcagcagcagcagcaaaggggcggtgggttctttgtctctctctctcgggcggatttcggtttcttcgtgtgtttgttggttgcgttggcgtttggagcggcggcggtggcggtgagtgtgagtggtgaggaggaggaggccgcc

SEQ ID NO: 4992 - DNA, 2000 bp, Oryza sativa
gcatacgcacacaaacagcgaatacatgtcttaacatacgctaaaaagataatactaaagacatccttaacgtcattaaaatcctatgaagacgccctgacatacgtgtaatatactgtattagtaggcaccattaaattaatactagtgggtgaagttgtatacccatgactactctatcaccacaccgctcgtgcatcctcatgttgcattagacttgttaaaaaaacattcataatagtaagaaataatcagacgattataagtagcaacactctcattataattttaatataaagttatatataattgataagtaattttttaatgaaatcaagataattacattagggtcatacaaccatcttcaaatcattttcggcctctatataaataaggtcctcatcggttgtatatggcttgattatataagctgtaatggtttattagtgataaaaaataattatggataaaacttttcatatgtgtctttagtgacttaaaagccaatactgaaaaacaaactacattaaaaaaaacatcaaagtcgactccaaataaagtttcaaaatttaaactttggcagcggcttataagccatagaacaaacgatgaggccctcagatccatagggctcagaaaacaagcatctatacttctttaaatgttctcggtggtggtgtcgatccattctgccttcccaacgccaccaccatctgacatgtgggaccaaggtccaagccaccaactccaaggaggtctacacgagggcaatccatccaaacgtaccaggaacaattggattttgttgggatccaatccacgccaccgagtccttcgttgtccggagaagacgggagaggcaactgccacggtcaccgactcatcgtcccatgccatgttgaatccaatggcagccgtgtcatcgtcgtcctcctccgtcttcaagcagtggatcgagagctgtcgtcgctcgatatagggccagcgccacctgatcgagggctagtgtcgccgggaggtacatgctagctgaatctggcggcggggtgcccgtcaacctcaatccctcgcccttcttctccctccaaggtgccctctccccttcctcatcagcgtcctctgctcttcatgagaggggaatgcccattgtggagaggctcggcatcctcggcgccgcctgagggaaccgctgtccactactgttgtcgccaaaacaccaccgagcaacgggggtcgccttggcttcttccttgccattccctaggttcttcgctgccgcgtcgatcggtttcttcctcacctcgacccgagctcgctgcgtgccggctagggaaggaggagaggaggggcagcacggtggcagctggtagaggggctggcctgccgaagaaaccgaggggaagggaaagtggagaggagggtctttttttttccttttctactatttttttatcagctgtcctccgcattcctttccttccttaaattcccatgtgcaggagtactacgcaataaggaaagacaacatacaattcacctaattcttcacttagactaaatatgtacttaattaacttaataagctagaaatacaatttattttccgttgcaacgcacaaactcttggctagtatccaaaaattatatagaaacaaagtgtaaaggaccatcaatccaaagacactcaataatcgtctcccatacatttggtcctggataaaacactccctgaccacgtgctccagtggctgacacagcaccacaaccaaatctcatcaacctggcttctaaagatatatgctatataaaatatattctagtaaaaaacaatttatatagtatgacgttatatatgcacatatctgtgcatcagaattggttagtccattttgtcagctagtgatcgatcgagctatatatgcatatattactacggatcctatgctagcgaagatcgagctcactacacagagagagtagctagttagccgccggcg

SEQ ID NO: 4993 - DNA, 2000 bp, Oryza sativa
attgcgatgtgttttctacataaaaattggatgaccacatcagtgggctaagggggatggatgtaacaatggataggaaaattgccttattgaatcaaaggaaaggaagtcttcgaagctatcgaatctcgggaaattggtcgtccatattaaatttatgacattcgtatttctacatagtttatagatctagttgataaacatagagtgttcattgggcttttctatccgacttgtcaaactttttttttccagatagaaattacttttcaaactttattccacttagggtgaatataaatatatgctgattaaatcattcaaaatgtgctgacatttgatgatcatcaccactataaccccccacaaaaaaaaactagaaatgagtttatatttgcaacaatcagggcagtcgaattaatttcgtgtatctaatagtctccacaaattaaaggactaaaattcttgaagaaaaaaatatgtatgaagctcaacaatgaattttgtagtgcaaattaagcaggtcaattaggtggtactgtgatggttcacatgggcaggttgatactaactcccatcgccctaataatctttctgttgtacatattattgttacgaatttcgttccataatggttggaaaaatgacacatgcttccatggccacgctactaatccttctgcaattaaaccagcagggtacacatggtgtgataatctcaattaaagctagtggttcgtacagaacatgcttgcatgttgctgcagtagctagctagtgagaagaaacgtgtgcttataaggaacctgattgatatttgattatttactgttgattgagatttatttatccatgtgaaataataaaggcatgcaggttcattagtccgatgtatacaactgtgatgttttgattagtggaggaactactgtagctagctagctatgaaaggattgatcgacaaaacagagagttgtagtgacaaaggatttaatcagaatcatatgtacactacgagatgttaatacggagaagactgtaaaattatccattcatccattttcgccactgcctgtcaatctacagcttaagtttgcacaattatccccatttaaaaaatgtttatttcatatgtcaatattaattccagcacctgaaaattgtgactgaacccaggaataagatgttttgttctcttccgttaaacagtttcattgaatattctttatatttkgtttatcatcgaccaatcgttgccgatcgacttcagttaaatagttctctcaaatcattaaatggcaatattccctatattttcttcgttattatcgactaatatgtttgaatagctctattgaaatggttaaatcctcatattctctatcatttcctttatcatcaatcaattggtgccgatcgacttcagttaaatagtcctctcaaaacattaaattgcaatactctctatattgtgttcgttattatagatcaatcagtgccgatttttatgacatcatcaatcagtgctaactcattatgacatcatcaccattaattgatcggcagagctcgatccttacctttgtccttagaaagaaaagtatggcgccgcccgtggcgacacaaagttgagttggactacatcatgctacattaacacgtgccacagaagatcctgatgatgccctctttgagcaagagagacccctctctgcatctatctatctatctcacatactcacacactgatcacaaagcaaagcaaaagcctagtcgtctcatactcttcttgttcagttcttctcctcccaaatctttctgctataaaaggcattcgggtctctctctccgaatcccagctgcacccttgcatcttctctctctctctcttcttcttcttcttcttctccatatctcctactcctcgtgaagatcgatcgaccatcggcaatttcattcggtaatagttaagctaagatcaaatcaagattggcgaaacg

SEQ ID NO: 4994 - DNA, 1366 bp, Oryza sativa
cakgctgttctagatttcrgaatttaaaccaaatctcagtatttgatcactatccctctttagcacaagttgacacaaccacacagcaatgatgatggattatggaatattcagattgtagagttagtactccaaatgagtactaacatgcttcactagatcatgttattgcttaaaacatgctttatttttaatggtcatttgtgattcaacggttcaggcatatcataccaccggtagtagttgcatgtagatggagcagacttttgtgaggctgtcagttactccatctttgtctgttgacaagaccatcagttagtttagttaaatcggtagcagatccagaatatgccataatgaaccttaattgaaaacacttgttaatttaccaggaaatgggtcctgcttcaggagcagcattttttgtcaactgctctagccgaaattccacctccaaattcaaaagttttcttgcttggacaccttcttgacaatttaccagttttggtgtttgtgtgcttggactcatgtttgttattgtccattttaaatgtcgactacatcagcccctgtaatcgccaaattttcaactctgtttagagagacagacagtttgcttctctgtatcacagaaataaggttcatgtatatgcagatgtacaaatgtaggagtacaatgcaagtagcgaacagtttacacaaagagaaacatttgtttaccaatcattacgatggtttcttatcatattcaacacccaaatcccatcgttcttgtattctccactagtcttgggtcatccattcttcagacagttttgtcagaaaagcaacaaagctaagaacaaatactaatgcaatccagagacaaatttaattttcctagaatcatcaataaaagtacattaggaatcctgttctttctgtactgtctacatgacggcggacggccgcctgtcacataatctttcggcgccggagaggagcgagacgacgacgcgacgacgggagagcgacgttgacctctgcgagcccatgacatggcaccattacatcactctctctctctcgctcgctcgctactccagactgaagcaacctccttcgtctcgccttcccggaatcttcctcccaacttccatcctctcactgttcgaaccgccattgcggctgcagtataaatcgagccgtccgcacactgcaactcctcctacgcaaaccaccccaacctgcacaacctctcctcaccgaaccaaaatctcacagcttcgcttctctctcgcctcccgaagaaaatagctagagaaaaaattcgcggatcaagaaggaaaaagaaaaggaacacttgagcttgtttggactgacaaca

SEQ ID NO: 4995 - DNA, 823 bp, Oryza sativa
  misc_feature (1)...(823): n = A,T,C or G
maaamamttacnayacaatgtratacstctatctatncacatatwgngngttrcatstantagtakacataccantntatanrttctatacgtktgcacacatatactwtntrmtagnyaakgcwtataakagtatgcacrttmagncacattnacrcrtatrcacaaaagtgctattgtatanawtaggcaaawatagngncgtarctctatkcnatcttntrtactawtatrgcknmattattgtcyncatacwctattgtgctaagcntncwrtagcgwatctacgtrcactatgcwgaaaaagtatmnktaactagtwctasamttatscttntwacanyanwctcccnnaaaaaaammwattacatgckgcgtanaacwrtaaaatnttngccccaacccagngtaacaatatttttgtwgatacaanamcattgtggaatttataattyaktttgtyatyaatttatatttaatacttgtgtgcgtgtgtattcgatgtgacacgccaaaactttacatccatggatataaacactccctcaccctctatcgggtgcaatacgcggaacaccaaggacctgggtgcaaaaacacccatcaccctcccccgacgaagcaagagaagcttccactagaaaatggcccaatcccgtcgcccccttcccctcctccgctcctcccaaacccaaatccgccaaatttgactcgcgcgaggggcccgattcgtggggcgcgcttccccctgctgctgctgctgctgctgctgggattcggacgagctggtcgcgttcgcgttcgtgtgatctaggggggggat

SEQ ID NO: 4996 - DNA, 2000 bp, Oryza sativa
gtcttaaaaatactttcataaaagtatacctatatcatttttcaataaatatttttatagaaacaagaagtcaaagttatgttttattttggagaccgtgtcgctgttcaaaacgacttcctttgcgagtacggagaaagcacattgttttaggaaaaaaaacttttttttggtataatgaaaacagaatatattattggtcttactcatttgttgattagtctctagctaccaccttgaaagtgtatttcactgaaatacttgaaacctgtaattttttttatgcgtgtgcattatatttggcattgcatcatgataatatgtagacgaaagatgacgagattagccttccggttacaaaaagggaaaaagacgagagacgagatgagcctaggacggagaatcttttagtaccaacatggcatcgagggccacgtgcacggggcgcgttgccgcgttcaacccatcgcgatgcccaaatcgcaacttcgcatcgcgaattcatcataaggaaaagaaaaaaaaagggcaatcgcgtagtagtagcataggagagcatatacaacagcaactataaaccatctataaacatattttaaaaagataaaagaggagagagaagaacaacagactatagatttatagccagatgcacagactctaaaacaatatatgtatgacaggtgggaccagatattaatagtgtaatatgtaactattgtataaattgccagctgtagcacagactccaagacacmatatatgtatgacatgtgggaccagatattaatagtgcaatatgcaactattgtataaattagctattaaattgactataaaagatttggagttaggacttggctatactacttcatccgtcccataatatagtaatgtaagatatgatgggacgttttataatacaacaaatctggtcagacctcctgtttagattcattgagctataaaatgtcttatatagttcttatatagttcttgttatattatgggacagatagtgtattaaacttgcttggagtaaaagcggaattcccacggaaaaaaaacgagcgacccaaccctggtgcctggcagtactccagtggtacggtgggcccacctgctagtggcagagctgtaccaccacgcacacggcggcggcgagctcaatgtcacgtgggcccagcgggatcgtgggacccacatggtagtggaggaggaggtggtggtgggcgcggccggtttacgaggaggacgacgaggtgggccccacccgccaacttgcctcccccgcgcgcagcgcgcgccgcagcctctcgcccgacggcgagagtaggcggaagcggtgggccccaccggccggtgacgtccaccccctgtgggtcccggacgtcagtgaaagagcagatggttttctagatttccaccgtgaacgcaatgcggggcccgagtataccccgccgcgttcgctatccggggcgcccttttcttgcatgtcccccgcgacaagtttcccaagcagcagtgcgccatccctctgccatgtgggtccatgccttatctggtcccacatgtcagtactagcaggtccatctcccgcaccaacgggacctttctttctttattaaatttagaagaagtgttcgctaatcacacccaagcgccattttaattgaaatttaagcgaacttaatttgattttttaatcggatttacgagcgggaggagagaattcgggcgactagagtatagcgcagccgcaagcaaacagccagccagccagttgcagcgaagcaataataataaaaaccggattaaattaaattaatgcggcttggaactgctcgtaggcaggtcaatactgcgactccttctcctttctctcgctgtgctcttctcttctcttccattcgcctccgcatccgaagccatgttggatccaccgccccaccaccaccagcatcggtagcggcggcggcggagacggtggcgggagcggg

SEQ ID NO: 4997 - DNA, 2000 bp, Oryza sativa
gatccgtggcactagtccatctagaaagtcttacccccttggaggtcccgggccccatgtatttattcaaatggatttttaatagttgcctaaataggaatgcccaaataggattgacctgtattaaccctggtcttctggatttgatgcccatctcacacttgggctgatatcttgagactaagatatatgtatctagatatgaaccaaacataaaaaagaaatttctcatatgataatctatttctatgcttgatattaggcatgttcaaagtacaaactcaacccaatacaggctgatttggttgtccactgggctaggcttgcacccacattttgcagcttggaagcttgaaatttttttaaaaagcctagggtttgggccaaaattgggcttgctttttagggcggcatcatgcttaggcctgaatttttggcttgcatttttttaggccaggcccgaggtttgaacacacttattagagacatatcccctatttattacaccaacaaatagatatggagaaattaatgcatagatcatcaagatatggatgtatgttgaaaattcataaatgaagttatgtgagatgtggtgcattaaatccatcatatcttcttggaacattaatgttttatataaaacatttagatgtgttacacttgaaagatataaatgttttatatcttggccatctcatttaattcatatggtataatctcataaaagaccttggattggtatatatttatttttcaagacccttgtttggaggtagcactaaaagcctttctcaggacacagaagcaatatttctttttttttaagttaaagtgtggaaataatattgaaactccaggacagttgttcatggttcaatcaggaaaagtcatcactaatttttgtttggagcaataatttgagcattgtggtaagtcgcaacttggtggcttatatggagtaaagagatagcgttacagaatttcatttcaaatttggagtaataattagagcattgtggtaaatcataacttgatggcttacatggtgtaagctaagaattagagatagcgttacaaactttcatttcaaatttaacattttcaaaacagcacaaaatgcctttgggtaacataagatgaaaaaaaaatgtgcttacattacatatatagcgtgagaggatcactattttagaaatatgccttccaaccatcatggttcacttgaacaacactcaaagtaaaaatatactttagatttcttactgtgtaaatttacaacaaagattgtaatagtctcaatggcaacattgccaactcatttgtttccattaggaacatgtcatagattggaagtttacccattaggaactatactctggtttgaatacattttaatgtcacattttttgcctgtgataatgaaatagtactcctacaatagtaaggatgtcgtactcctacaaccaaagcatgtataatgctttattttccttaataaatcactgatttcattttaggtttctctttacatacgacactccatatacactgtagtgaccatataagttaaagaataactatattggaatcatattaacaaacaatatttttatatatggaaaatatcgtgtggtactttcccaattgttctgctatccctgttttatggcattttttttaaacacaaaacatgcatcacacagaatattaacatttatatatttagttccgtaagttcttttgaaattatacatataattgctagcaggggtggttgtataaatatttatatgttatggcgtttatgaatataaacggtgtgaagtttgctctgcttttattgaatgcaatataataatgatatcacgacaaaaacttatagcggaaaccgtgtgcaggaaccccattttgtgctataaatagactccaccgcttccaagggctttacacccaaaaattggaccatagcaagtagaatccatagctttgagaaactc

SEQ ID NO: 4998 - DNA, 2000 bp, Oryza sativa
acgcggcgggaagggaggataggaggctgcggcgagggcgcggatgaggaggtggtggtggggagaggaggtgccgcagctcccaccatcttgctgcctcgagcctcgccgccctgttgccctactgctgagctctggcgcagatgaggcagcgatggcgaggtcagaggaggcgtcggcgaggagaggagacgccacggcgagattcctgtcaccccacccctcttgccgtcctgctactccctgcgtggatgatgggtgccaaagtaggagccggcctgtgagctccacccctcacgcagccgaccagtgagatcctccccatgcacagccattggccgacgaggtcttcccacgcacgcggctttcccggccgatgaggtcctccccaatgtgtggcgcggccggccggcaaggtcctcccctgcgggtggcgcggccttccggctaggtcctccctacacgtggcatggccggcggcatcgtctgtgctaatggaagaggagagaagaggactagatgaaagagagagaggcggggagatgaggtggaggcctactggcaagtgggtcccacctgtgactcagcgagccgactgccacgtcagacaaaaccacctacgaaactgctcagggagtatatttgcaacggttttggaaattaggggcgggttatacccagttttgcggttgagggatgtgattcagccaggggcatgagttgagggaggctgaacagacttattccgagacgaagttgataggcgacgaagcccacagcccacctattggtgagatggtgcgagccgtaactctggcgcgctcgcgccggtccatgtcacgtcaagcaaatcaggattaccggttctattcataagcacgctgcttgctattatttagctgaattttaattaatattgtatcatgtttttatcatattcatattcatttaagtttgagattcgtattagaatcaaattcctagttatatttttaattttgaattttaattaattggagtttacacggactcttcttttattactactactatgttattatattttattccgaattctagcgatttatgtatttgagtttagagttcttgtcggaatcgaaattcttctaaaaaaacctaataaaaacatctgccgaacctaacatagtatgcggatcattgtggataaaaaacggtggcgagagagagagcccgtccctaattaaccgccgttcctctcgcgcctcaccaccgaatcacccttttgccttcgcaattctgggcctgcaaccacatcgcttcgccgccgtatcccttctcttcttcctcttctccgagcgctcgcatcgcaccgcaattcaatgcccgcgcttcggtgtgagatcgacctagccggcctccctgacgacgattgaagatcgaacctaccgtgtaagctcgttgattctgttgacgccttgtttttcttttttttttagggttgttgacgccttgttgattgattcatggtaaatgttgctgttagtttgattggtgtactcccttgcagcattgccttgatcgatgagttttaactgcattattaatagttaattcttttcctaatttgttctcggagatgaattgacaaattcaatcacaagctaatgcgggttgttcccatgcaagttcaacataacatatcctgaatatatttttgttgaaaaaatatcatacggagtattccgaatcatatacatgtacttgtatgtttttttccgtataacacattatccaaacaattttactacagaatatttttcttaatatatctctcgttaactaactcttgtcttaatcttacatatacagtgcaagatcttgtatagtttgcaaaatccagctgtctaacgaagaacatgtaaaagatcttgtatctgcatggatttcgatgcgactacctaaagtgccaggtaaataactgaaataagctatccataagcggggaatccagtacgacg

SEQ ID NO: 4999 - DNA, 2000 bp, Oryza sativa
aaagaacaattctacctcccacgacacctttagtttacagtgtgtttgagtatgcaacttgcattagacaactagtagctgtttaaaacttttatatggtacccatttggaacaatccagcataagtagataggcacatgtgaaatagcgttgccttgccttttggactttgtgctatcatcgtgttgaaattaactcaaccagattaggaccaatttcttccggactcgagagagaaattgcaacctctctttcaagcatgtgtcttatataattcctccactctccaacaaaaacaattaatttctaaaaagtagagaaacttttgtgggctacttaccctacaaactcaaagttcacacatgccaatattgtccaagcatatgctgatatgccatgcatacaccgactttatcccaattatcaaaaaggcaggagccaacttttagctagattcgtgtattaacaaaacaccagcgatcgcatcttggaccgttcccacaacataatatttctccagttctcccactgtatatatatccccctgcttatttgcagttcgacatgcaagtatgcaactagtgacagtcttatccgaaaacgacgcgaagaagaaagaaaaaagaaaaaagaaaaaaagaggctgcgtgtcacgtacttgcatctcggggtgtgggcccgggggggttttgggcggtgggggccgcgggagtcaagggcgttgacgttttctccacgtggatcggcccggcggcccaatcgggagcggaggtttcgtggaacggtggaagaactggtccctgcacccattgacccaaaccctaaccctcctcgaactcagagcaaaatacacaaagaaacaaatttatttatacgttaaactggtgggcccagcctggccatagaagatctcagaaagtttttagtagcggcaataaagaaagggtaagatccgagtccgctgtgtggactcgcgaccctgtagctgtagccgatcaatcacaggcacgatcctcccgaactcgtctctgaccaatccagacctgcgtttctttctcttttctcggttggggggcaagtaatctacggaaggaaccttctgaccgtggaaaaaaaaaacgcccctcgtgcagtacatgctgacctcaatatttcttccctattgcacacctgcatcggcgctcgtaccgccggagatcgaatccgagataaccgtagtagtggcgatcgatcgacacgtcgagcggcggagtggacgtgtacggtgcaccgtccatctgcccgtgcaaatgtacacaaaacctctttcatcaagctacgtggtgtgggcgagtgacagcgcaacggtggatggatggatgatggatgttgaaaaccggtagaccggcgcggggtgggagtcgccgttgcggggggcctcgctttggttaatttggcgttgcgacgacgggagccgtcggtcgctttccgctccacggaaaaaaaaaatctcacgctttcttaacgagttgggattctgatccggaagagaaaaggcggaaagctaaagtggagacacgcacgtaaacgagccgtctccgcgcctcgccggaaaggacgatccggtcgcctcggcaccaggctcgagtcgtcgtcgactcccgggtcggccaatggggactcgccacgtgtgcgcctcgccactgacgcagctcctgatgtcagagtcgagggtgcttcccttttttatacgagcctcctcccaccggtgagagacttcagactctcccactctcttctcccccctaattatctctctctccctaccacgtcgtcttctcttctctatcttctccgcctccgggaagaaggacaagaggagtaggagctccagttgcatggacaagggccacctcggtggtggcggaggaggaggaggtgggctgctcgctctggacgcgtcgccgcgcccgctcggcttcttgaacctgctctccccgccgccgttccacaggtcgacc

SEQ ID NO: 5000 - DNA, 2000 bp, Oryza sativa
gaaaatacgaatcactcagctgctaattcggaaccaaattagaagattcaacaagtaaattctaagcgatttggttttttttagcatgaaaaattgaagaagggggagatttgggagaaaaatccaattactgtattgattggcggcggcgaacggaggtcaatcttaccacgtggtggcggtggacgtcgagggcggcgagggaggcggcgaggcggaggcagcggtctcgcgtctcccgccaggtgcgcgtgagtccggaggaggaggcgacgatggcggggtggtcggggtagacgagggcggcgcggtcgaggaaggtgatgggggtgagcgacgcgtggttggcggcgcagagcacggcgccctcaatcgccgccgtggtggacktgggcgtgtccggtgaactcgggacgacgagatcaaagtcagagagacgagctgaggtgaggtgaacaagggcaggcgaggccacgcaaaaggtgagggaagagaagcttgttttatgacgacaaggcagcagcacaccacgacgacgctcctcagccgcctcaacctgcacggcaacctacgcgggcgagctctgcctcccgctgctggccgcttgctccgcctccgtctcagccgcccggcgccctccaccgccggcagcgccgcctactcccgccctcgcgcggccgccgccatgctggtgagaagagagagagagagggagagattgggatagactagagagagatagagaggggtggagaactgacaagtggggcccactgatttttttaaaaaaaatacttattggactgccacgtggacccaaaaccaccccggattgagtagggggttatttgtccggtttcaatagttgatggtgtagaatgactagtttttaagttcaggggtgtaatttggtcgacctcgatagttcaggggtgggggtaattcgtactttttccttaactttaattgttattttacctccacattttcaagtaaaacttgtattttgcctctgttctgttaacaagacttaatcatgcttttaagtttaagaattcctgtaattgggttgacgaagccctaattttcttgctgaacgttctagtgaacgatgtaattatgtttgtagattaataaagcgcgccaaatggcttccttaaaaaaataagacttaatagtatttaagtttatgtcaaccttgtgctcgatccttttcttttttacattaaacatgtgaatgtcaaaacagatgtcaaattcatgtgaaaaatataaaatatttggtgtcaaaatcatcaattatttccaaagacgaataaacttaaaaaccaactcaaatatggatgacataccaaaatactggcaaaaacatcttcaatttttataatagtagagataggggttaggagtaaaataaaaaatctcagatttatactcctaaaactattagaaattttatctttttttgttacggctaaaatattttaaaattaaggtcaagattttatacataaatgtaatactattgaaagtttatatacatttttttctagagttttagatgatatttgttagtaggtgtacacgatgttacacataaagttttggtggttatgattggttaagacgattggttaagacgagggataagtgggagattatgaaccaaaaccctaaacattataaataattatatgttaggatggagggttatatattttaaatattattaagtcttattaataatagagtaggggcagaataaacttggtttacaaaaaatattgaaaaaatgatgaagttggggtatcattttttgtttgaaaggttcctggtgggccaagggggagcgatcggatcaggggaccacctagagaataaggggcttcgtctccccasgcttcccattttctttcatttgggttggagaagttgggggttggggggttgggcgaggaggaggaagaggagtacaagaaagaaagaaagattagtagtag

SEQ ID NO: 5001 - DNA, 2000 bp, Oryza sativa
gttgccttgttcagagataaaatttgtatcttttgtggttgagcgttgatttaccgaggggactgagttgtataacttttccatcctttttctgccctcgttatgttttgatcagattgattatgtaacggtggtctattgccctatcaacaatctcatttaaacgagcaaataaaagttcaatcaattatggcaatcagttacatatctgctgctgggagaagtaagggttgtaaccctttgtgggaaatggctgactattcataactattatgattatcaaattgttcattcgtctttctgttctccctgcctcactcactggtggcctggtggagtgaatgagtgagggtttactgccaatggtacatttcctttttccatgtaataatcccacattatcacccatttgaacagaaaaatacatataggaactctgctccagctagtcctccgcagaggataagtaaagggagaatttctcataacatatagctgatgcaaggattttgttcaaagtcaccttgtcaaaccatttttcacaatctagagaatatattgtttggttatttaaacatggctttcttgataaatatttgatgaaatgtcgcattgaattttgatccgtctaggcaaatgagtattcaagattgatctctctttaaaggctagcttatatatacatatatattctgcctgatgatcttttatttattttccctgatgactgattgatgtcggattatatctacagaagcagcgattgcataaaatgtgcatgcagctgcttccatgtgaaattctaagagaaatatgatcaccctctgcaataatcttactgcaacctatcttctgctgatgagtttgaagatgctttgccgtagttgttcgccagttgcaatatttgaataataataacagcaagaaataaccatcttattatcagttcttttcttccatttacatacttctattgtgattgacagatgcaggaagaattcgattggccaaccttagtgttatcaacatcaccagaaacagaaaatgttacctccagctctgtgagaagcacaaccaagaatgacgtggttattcagcaaggttccatctcttcatactggccatgtatgcatccggcagtttccaaataaatatattctagttgaggctgttttttgtacaccttgttttattctgtgaaaatctctgtctcattctgcaggggatgtcatgaaacttgaaaacgacacccattttctgtctcattcttcaggagatgggatgaaatgcacaaaggctgaccattttctatctcatgcaaacaggggttcattgaacttggtatggtacaaaactatctgttctactatcgttgatgggaacatttgaagggacatattgctgaaacataaatactgggatgggaatgggtcacagggtaaatatatggatacctatttgatccacactagttcaactaaatacacaacataaactagraaaaaaaaagcaattttagttgatcagcttgcttgaattagagtggctcaatgggcacccatatattgacccactcccatccctaataaagaagttttgtaggtaaagaaataacaccctaatatactgtactaatcactcaatcagttcagcaattgatatagaatttcaagttgtttgcattatttcaaaattttagttcagttgaagttaacaataaaagcaaggaccaaactgtagccaagttggttggttggtcatgcaggtgtgcataccacccacctaggttaaatcttactccctctgtttttttatagatgatgccgttgacttttgacatgatgtttgaccgtttgtcctattcaaaaattttatataaatgtcagttattttgttgtgacatgttttctcattaaaaaactttaagaatgacttgtactttagcatatttacactatttttttggaataagacgagtcaatggcgtcatctattaaaaa

SEQ ID NO: 5002 - DNA, 2000 bp, Oryza sativa
gaaactataaactctattccattatctcatttccaatgccaaaatatgcagtgaactaaatgctttagctgcagagcctccagtgaaccaaacaaaatatatacattgtgttccctctaaggaaggtaacgtttccaatatataagatcaggaagcttgacatgtatcgctgggttgcaaaacaatcaaataaaagagatgatttaaggattaaaggatagtaagtacttggaaccaaattctttagttcatctcctggcccaattgagcttactcccatgtaggatacagatgcactggtcagatcattgaggtttttcagcttttcctcaactttgttcttgccaaccaattccactgacacgcgcttctgacttgatgagaagacatacatttcatctggacacaacaaaatgtttatatcgggtatcattataaatgtaaaaaggtgtatgcatattgcttttacaagcaacggaaaatcttctgcccttgaaacagggaaaagaaaacagagtagctggaaaatcttacgccaacccaccaatagcacatgattttgaaattttaacacgaggtgtcccatacatgctctcaagcaatgagcaactgtcaaattcaagaactagtacatatacacatgccaacatggatgcttgagcctaagttgtataatgcaacaaaaaaaatgtgtagccgatttctcgaatgctatttacaacgcatagaaggtagaaagtatgtactaggatgaattttagcaaaaaattaataagtggaatgggaaaaaaaaaagaaaaagaagctagctggtggaatgaagagcagcaagatttggatttggaagccgaggaatcgagggatgcggaccttgttcctccttggtgaattcctcgacacggtagcggttgcgtatggcgtcggggagcgtgatcccggcgctgagcgcggtggggcgcgcgaaggaggcggagcgttccccggcggcaacgaagtagcggcggccggcgagcgacccgtcatggcggccgccggcgccggcgtcccagtcgacgcccagccagtctccggggtggccgtcgacagggccgaggtaacgcacggtgccgacgcgggcggggtcgccggcggcgtgcacgcgctgtcccaagcggaaggcgacggcggccatggatgtcgtctcctactactactactacgaagtgaagtgaattgggagttgccgttcatttctttggcccatttagccccatcgcttcactattttgggctktgggctggccttatccggccaaatttggaagttgcaactgggagagatgatttttttatcaccatcaatcaaaaaagaaaaaaaaatactctactactgtactagatgaaaacaaaacctttatatgtcaagctttcaccagctttacaatctttaactaataataatacaccattggtagcaataagtaaaaaagatctaccacaaccaaaccactttacattatcatacaaaatttcacaatatactgtatcatgcaagtttgtactagtattttctccgtcctaaaataaatatacatgaatatggacataaaaaaaagataaatatagtaattttgagtcacaaatcaagacagcctaactttaatttggactctgaagggaagaaattgactgtgcttagtcacctgtcaatgaaaagctcccagtcctttttgactcttaaaaattcctttttagccggcaaaccgaacccactttgttgtgagttgggagttcctgacttgggtttatggcctgataaaacggatgcgaccgcaccaagaaaagaagcaacctttttgttcgctttgcttccttggttagtttccaaggttgccttcttcttgtgatcctccttccacctgtctcttcctccccttcgctaaaaaacctcgcctttttagaattctagttagtttttcgtcctccaaatccgtcgagacccaacaacccaagaggacgcc

SEQ ID NO: 5003 - DNA, 318 bp, Oryza sativa
grgaaaatkgsaaacgscgccggcggcttaaggggcggccttttaaaggcttaaggcgccgccgccgcggagcgcgcgarccccgccgcggggscgcggtgacgctcccgcggcgccgaagcgtccgatccgcggtgatctcgtcgtcggcgtccgcggcggcggtggcggcgtcggagccggcggcggggagggtacgctggcgcggggacggacggggcgctgtggccgaagccggcggtgctggtggcggagaagctgagcgaggccgggctggcggtgctgcgcgggttcgcggacgtggagtgcgcgtacggg

SEQ ID NO: 5004 - DNA, 1167 bp, Oryza sativa
  misc_feature (1)...(1167): n = A,T,C or G
ctgygtygcgtgrngaaaaaaaataactsttttcttycaaaarrggkgtgtmncwagtrggatacatctgtgtgkctrracacaanagggggsssssssssncccctttarraggggggggggggggaraaamaccccyccccyccamaaaaaaaaggkggknrkmtmycccaacaacamaaattttttttttattwtwtktgtkggncacmmcwcacaaaaaaaamaaaatttkkgarmarwwamasakcaaatgtggkwwawwatgggggaaaaaatwtctwggrggrganaawakkkkaaawtyysgkkkytwtwwwtttwaaamcccytttkgrrwwwwaaagscccrawwacmccmaggstaaaaaaaagggcngggnaaaaaaggrgagaaaaaawwwaggggggaaaaaraagggggtataatgggggaaaccccgaaaaattytaaaancccaaaaaagggkttttttttaaaaaaaatcccccctttttaaasccccccyttttttccaaaacccytttgggttttttgggtttttgggccccatttttttycccccccmaaaattkgsgaaaaaagggktaaaaarggggssgkgkttttcccttttccccccaaaamccccgraaaaaraaaggssssccccyttttkkgkgggrggtttttggggawtttttwattkttttttwargggggattttggggggttttycccccccccccccccccgatttgcctcgccatgggggctgcggagatcttcgggccgattcggtcgatgctggcgtggtgagatggtttgccgcatcgcgagctgctgctgctgctgcgaggttattaaggtcagtttggggctttcccttttctgctccctccgatctagcgggtggtgtttttttggctttgcgtttcttggctcggtggaggtctcatgatctaaggggaagatttggggttttggggaggagatttttggtggggttttggggggatttgtttgcgtgtttacgcttccatttttgtagcgtcggttctggttatgtgcatccgattcggttggtttctagtccatttcttgtgctgtttttggactcccttgactggtttcttgactgatgtttttgctgatggcttcagttcttccgatccgacaagccccg

SEQ ID NO: 5005 - DNA, 4 bp, Oryza sativa
ggca

SEQ ID NO: 5006 - DNA, 2000 bp, Oryza sativa
cgatggcttgaccttgccgctgccgagatctcacacctagagcttactcacccacgtgactcagcgtcgctggagcaacaagccaagaagcggcggtgcacagggagattagcgctggctgcagtcctcgccctcgacacaggctctaacattgtggtcgcctgtagctcatggacactgcaaccgccactctcttctagctcccccggtgacggtggcttgttgcaacccttccactatgtgagctcatcggctagaagagaggagagagggggaaggaagaaggggatggatggagaatggataatttggtcctaaaaatatgaaaaatgcagtgaataggtaagtagtggtatatctgaagtatatgtgaaattttaatggcatggttccaatttcgcaaatagtaatgatatattttaaaacgggtaaatttataataggatgatccaattaaccatattttataacaggtgacggtgggctgaatcgtgtacctttttctgggctaaaagagccagatgttcttgtacgaattttgaattgctccacctttgcaatctaggtctattattcaaccaaacgctttttgtacaaactataaagaacgcaacactcatgatggacatggcaaagctaagcatcgggcaaagctaagtgagtacaatactcctccatctatttttggtagtcatattttaaatctgaaaaaaatatttttgataggcatattttaatccaacaacctatcctcttaatgattttctcggatttaattcgtgactctcaattctttcacacaagattggctacataggcatcgagaaatataaatattaataaattacttgtttacgaggaataactagtagcatgtttaaataaatgataagtagagttacttatccttggtctgtgtgccaagatgaaatatgactatatgtagatgtaggatagatgtagggagtaatattttgccaaagtaccgaactgaaaaaaaaaagcccttctcttttcttttttaaatttgaactgaaaaagtaggtacttctactacctctgcaatcggattacattggaccacgggacgtgtcagatcttttgatcgctcggagattgctcgaaaacgcccaaagtatacgattccagtccaccgtggcggtggcgcgtcagctttccagcccagccaagcccagtggcacgcaccatccacccgcaagagtgcagagccgttgggaaaactaacgggcggcgcaagagaaactgatcagtgcacgtctgacgtctcgtttattgaacagctgaataataatacgtttagtataaaaacaatcattttagaaccacttccgtcccataataattatattataaaattttaatttattataaaatatttgcttaattatctcattaatcatttctcattcaaatttcctcatattctactctcaaccaatctttcattcttacctatatatatttacacaattctaatctttcttctcaaatcttaatatcttaatatatgctctacaatttagaattataattattttggaacggagatagcagttaatttgaaaaaaaacaaatatattttaaacctcttaataattaataattatatgttaattacatttcagttttacatgtggctaatcatccaaagctatagtactcccgagaaagcaaagcaccgcacctccaacggccgaaactcggagtgagaaagagaaagagaaagakatagrgasmgagagaggcggcgagctcgattccttgcttcctcctcgccggggggctcgaccgactctcgagtaggggaaaggaataccgcccgcctccgcaagcgctcctcccttccccttcccttcccgccgcgcgccgccgctctctctctctctctctctctctctctctctctctcccakggcgtataaagcggcgccgascgagcccttgctgctcacaccaccacgattcggggggagacggcg

SEQ ID NO: 5007 - DNA, 154 bp, Oryza sativa
tcgccgcgaataaacaattcaaatggtggccgccaccgcatccaccaccaccgcgaggacgacgaggagcatcaccacgcgtactctgcctcctaccacctagctaggagctaactaggtcgtcggtgctcgagatcgggggaaggaagcccca

SEQ ID NO: 5008 - DNA, 2000 bp, Oryza sativa
gatggtcacatgtacaggttataatatggagcaatccatgtcgagtcatcggtattctatatgccaattggtaaattaagtagtacggagtagtagttagtcagtcactcagtcttattgcttagttgcttaagacattttgtgtggagttagctgattaattaaatatctcttgccaagggaacagcgaattgatcatcgaccaaatacttggttatttgctagctactcaaatacactcaatacttgatcacaacgtacgtctacacttgtactcttcgtctacgctcgtctcccgagtttatagtgcagacaactaagttttaaaaaaaaaaaaaaaccaagttcgtctagaattggcctttcgatgtgtaaaataaatatgcgcatgacctatatacttcaacctgaacgtgtcagaaagaacatagattgaacacgcaagctagtgggtgttaatggcgtgcatatttcatcaaattcagtgaggctatccattttacatttccccgctaaaaaagataagggtatgaatagagttacaaagtctagcattttagcgacccacttactctctcctagaataattagatattttattactaaaaccaaggagaaataaaacttcgaccgtaagctactkggttgcatacatgtacgtgggttgctctcgctattattaactgacaacgcgaaatgtaaatgctgcattgcatgtcctccattcaattaaacaccgcatgtatattttcccaattcgtaagattgctcttttttttctccttatacactcatcatccttgtatagacttaaaaaggttaacaattcttaccctaccaatcatctgttagactatttggctctgtaggttgggatcttctactcactcgtttttcacagacacatttctcgaacggttaaatgatatgtgttttgcaaatattttctataggaaagttgttctaaaaattatattagtccattttcaaggttttttttcttcaaatacttgattaattatgggctaccttatttttcgtgcagaagaaataggttgaacacactttcgaacacaaccttaattttgaatagtacctgctacctatatgaattgaaaccaattcttgccaattcgatagagttgaaacaatacaacactaccaaaattttgatagtaccaaaacttatttaaaatttagtgcggcaagtttttgatacaacttcaaaccaaaaacaaccctttctatcaaactgatgccaaatttgatatgtttgcagctgcacgctgctatcacacccatctggctagagtcaccaagctgctcaatcagtcaaaccgtcaaagtatcgaccaccacaacaaacgtccccggtgatgatgtggatcaccacaacaacaaaatacttctggcccaagtcggccagtaatcaacaatccggtctacggacacggtccaccccccgcacccagctctcggcccaggaggccgctcgcgctcgttccacgaaccttccccacggcgcaaccccttctccgtgaacccgcccgcatcccaccttccgcggccgtggaccaggcgcagggaaggtgtcgacactttcggctgcgcgagcgcatagcctcggttttaatagtcggcgaacggctcgggccaggccaacctgcgcctctcgaaaacactggtccgcctccgttcccctctcctctcggctctcttatctcacccttcgtttcgctcgtctccctcccgccgcagcaggtacgcgacgcgagctctcgtcggctgcgatgttgtgcgtgctgtttacgggtgacgggtcggactagccggcgcgtgggctcgacgaggcgctgctccttcgtcgccgcgggtttctgatttttgttttaattttcgtggtgttttttttggcgcatttgctaggtggggggattcgagtgttgggaggtttgcatgctctgtggtggcggtagagttggtggtggtggtggatacag

SEQ ID NO: 5009 - DNA, 2000 bp, Oryza sativa
tggtcttattggagattttagctggccgaccaaactatgatgatgcgcttgaagaagacaagatttatattttcgaatgggtaagctcagtggctcatgatgaactcctaacccatggaccatggaaaaacaatataatatgggtcttcgtgtttattttcgacaattgatctttgttattagtagaatatactccaacatttttctaaatattgataatatgaaacacacgtgccatgccatcatatgaatttttttttgttcaaaacaaataatttaaacctgcctctgattttgagcgtctcaatactttcaggcctgggatctgtacgagaacaacaaccctctgggcctcgtagacccaaagctcgaggagttcaaccgggaggaggtgctccgtgccatccgcgtcgccctcctctgcacccagggctcgcctcaccagcggccgccaatgtcgagggtcgtgacgatgctcgccggcgacgtcgaggcgccggaggtggtgacgaagccgagctacatcacggagtggcagctcaagggcggcgacaccagctacttggacagcgaagtcagctggcagtcgagctcggcgccgggaggaccggcctcgccgcggacctcgtcgccgttcttgagctccgtcgactaggatggcgtgtgattttcgttggatcaactgccccttaaactgaaagtggcagacaacttgttattctttcccttctgcgaggagcagataatttttttgtgtgtcgaaactgtcagtccgtgaggctgacagcctgtgaaagttgctttccaagtacaggccgtgcactgtgctactgtctatagaattttttttggataatgatagactattttatttgttcacttatacacaagaggaattattctgcttaattaccactccaaaactccatgaatgcatgcccctttctaaccaaattggccatcgccatcgccatcatcaccaaactatgatctttccagctctacagcttgtccaccacaagctacaagaccaatttgccattttcagctagtggattttaaagtcttcctctcggtattttcatgtcaatcaaataaaccaaaaatttaaaaaagaattacatatatattaatatatgatatatcacttcataaaacttttataggtgtaaaaaatccctaaaaattgtaaaatatatactattaacatatatttatagtcaattttatttaaactataagtagttaacatatatttataatcaattttatttttttcgttgcaatatattgaagtcaaatttgatgttacatatttgtgaagtgatatattacgtattaatctatttgataaaacttttttttaaaaaactttcataacctaacatatgcaatatgcatacagtaaggaaacgtcttcgatggccgagaataatttcgctttgcagcgatcaaagcgtcaaaagctacacatgcacgagccacaccttttgccacacacaaaagactcccttccttttcaacggccgcatgcggacaataatccccccctcgcgccgcggcggctacgggagcagggcgacccccctctccccccgctccgcaacaaccgcgcgcacatgttgctgagctgatcgagaccaaccccgcgcctcgttggccgtgcgttgcattgcattgcatctgggacaagttgcttcttcttgtattcactgtagctgacagcaacgtctgcgtcggctgcgtgtgatgagctcagcgatacggtcaatcaaaatggtcgccactgcgctcgcatgcagattgcagaagaattgccgtgcttgtatatactagtactactgtatgtctctccaggaatcgctgcggcgcgcgtcactttcttccaggcactgaggatttcatctatctatctatctccacagctccactgccgtcaccgtctcgcggctcaccgcttctcttctcccggaaggggaggagaggtctcgaggaggaag

SEQ ID NO: 5010 - DNA, 2000 bp, Oryza sativa
tacctgggtggttgatgatctcgaaaggcggcgctggcgggtggtaaccgaatttcttgcaactttccgcgagtgtaacagctggcatcagcctcgccctagcggttgctcgaaactcggcatacaagcgtgcctccatttcgggggtaactgcgatttcctcctcctcctcctcctcctccactacctcctcctcctccgacgacgacgagtcctcctccgagtcctccgagtccacccaaatcctccgcgggtgtgtattgcatctgcatcacttgggtcggtkggtgactccagggtagggcagggttgggaaggtggctccccgctagtccattggtgagacgattcaatcccccttcttcttctcgatgcggcggcgcgccggagagggcaagggcttcttcgactcgaggaattttgagagggagagggggatcggagcagcttccttttcgaggcctatatatttagagcagcccgtgggccgtggcccatacaaaatcgcaccagtgcggcccaagaacggtgacgtcatcctgctgggcgacgctggactgggtcgtcttcttcttcttcttcttcttttttttgaccgactggcttgggtcttcttcgagttcctctccacatgctccgtggccacgttggagatactaacagttttttttttaatcattactctcggaatcgatcctgtaacaagtgcatctttctttatttgtgccaaaagtaaatgggcatcattgaatatattacatgtaactaactaagattaatttctattggtccacctatatacagtatgtaaaacttgatgtaatccatggaacatgaagcgacttagcaccttaaccaatgagaattaattactgagtgatgaatgctttattgttcttgatctctgcactcttggttaagaattaattactgagtgatgaatgctttattgttcttgatctctgcactctttgcttagagcaggtacaatagtaggctataagttagctataaacacatttcgagaaaataaaataagagagagaataaaatcgtcatacaaatttatagccagctgcaacacaggcttcaaaatgtatgtatgtatgtatgacatgtgggactagatattaattttgtagtatattttatagataactattatatgaattggctattaaattggttatagatgatttggagccaatagttggctatactattaaacttgctcttaggtgatgatcaaaatgggatggaggaagtattatttaagagatggagtactaacagttgtttcaacatcttgtacattgcacaaattgactattggtttgtaggagtactatgtaccactcctttgtactctaatataagggatattcactatttttttaatgtttaatcactcgtcttatttaaaaaattttgtgcaaatataaaaaacgaaaagttgtgcttaaagcactttggataataaagtaagtcacaaataaaataaataataattttatttttttaataagatgagtgatcaaacagtctaagtaaaatatcaaaatcccttatattaggggacggagggagtacttgtatgctgttgtctgaggctatgtttatttcacaccaaaatcgaaagtttggttaaaattggaacgatgtgacggaaaagttggaagtttgtgtgtatagaaaagttttgatgtgatgaaaaagttgaaagtttgaagaaaaactttggaactaaacacggcgtgaatggtgatatgaagagatgaacaagttggtccttgcgcatgcatatgttccccttctgctatctcaaccgtgtctgtcttatcataatcacgtctcaactttctgtctatcacaatcagtgttctcagaagacttcaggagtcaatggagggtggtagtctgagagctaaagattaggtagaggatcagaggcagagaggaagagtgaggttgatcgatgagagcacagtgattcggctccc

SEQ ID NO: 5011 - DNA, 2000 bp, Oryza sativa
cggccgaaccgccaccgcgtgacgcctccagaagaaaaagttgttcacattggagagagagagagaggagcaacgctaatctgacgacggcgtcttcacagaaggaataaaatcggaaggaaaaagaaaagaagggggatggaggacacgttgtcgcctgggctaagcttccgggtgtccacgtaggcccgctgcatcctcgtggattagttggatgccgcgcctcgaaggttcttgctcgcgaagaaaatcaatttgactcagactactctctccaattaatcatttccttatttcactttctgtgctactagtttaaagtttgccaatttagggcctttttagttccaaacaaaacttttcacgctaccacatacataaaatatttaatgtaaaaaaaatcaattacatagttcatcaggaaattactagacgaatatttactaatgtggtgatacagtaaatatttactattaatggattaattatgcttaataaatttgtcttgcagttttctggcggaatctataattwattttcattattaaactatatttaatactttaaatatgtatccgtatatccaatgtaatttgggataaaattttactaaacgggcccttcgttcgggccttcgtgtttaatacagtagtctccggtttcatactaatgttttagataataattacttggcctccaaaatttatagtcccaacataagtacacactgggagtctctgactatgttttttcaattataatatagaataaataaatagttttttattattgcacgttacgaacatgtctaataaatattattctaggatcattaaactaaatacttttaaagttattatagttgaaattgtaaaattttaattttaaatttattaaaatggtaaaagaattaagtaattaccagattaaacttgatagccgcagcaattggctccgtcccctatagccaaatactgttaatatgtcatgaaaacaatattttattgataaaagtttgatatatgttttcttagcgatttacacatctttataaaaaataaattttgataaaaaatactttaaaatcagttgtacaactaaatttcaaaatttaaatttagacaacggattctgtacagaggtaaacaggaggcctctccacaaataagccaatcatccggaaaagtgatttcatccctcgattatatgtcctctcgttttgtatatgttaatagttatagataaaatattaaaaagccacaagataaattaatataaaatatatcattacacaaatatgctaacacaaattcaacttttacaagttgtaaaaaaaatataactacaaatatccgataattatttccaattttatttttttcaacttgtagaaattaattttgactatacgtttatgtagtgacatattttatattaatctatctttattaaaaattaatttttttataaatatttagataaaaatgcaagcaataaggaacatactgaaaatccacatcccaatcatccaaaccgacagcacggcccacgctataaaaacccatcacaccgctcatccaattcatctctgctctttccaatttccaaacaattccagcatcatccatctctctctcggtcccttcttcctcatcgatctctcgtagctacagctactcacccagccatggacggcwaggastccaccaccamccccgsccctgccccggctccggctccggctccggcgccggcggcagagcctcagacgacggggaacgcgccgccgccgccgccgcagcagcagcagcagcagccggaggcgcsaartkggggacgaggcagatggscccgcggcggcgcccggggcgcacccggagaaccagcaggcggcgcggtggacggcggcgaggggcgaccaggagctcccgccctacgtcatcatgggcsaagccgcggcggmgccgccgcgggggcggccggagagaggggacagcccg

SEQ ID NO: 5012 - DNA, 2000 bp, Oryza sativa
gttctgtagatattaatttattgaagctacttgtggaatgtagctttgcttccaatgcgtctacttaatctggtatatctgattaacttcttttttgttgttaacacgtgcagtaccctccaaaccaaaagtactatttgcattgcttgaaactgaaacaagcaattccttgcgtccatctagctggatgggaacactccttacatttcccggtgaaccaattttgcctgcatccgcaactaatcttaaacccggtcaatgaaaatttaaaactgtatcatcttcaacctgaacaaagttgcgcaacagcaaggctttaaaagcctagaaagtcaatcaatcataaacaaatcccatggcaccgcccatctctcctgaattcgctgcgcatggcgagcacgacgaccggtggtagacaccggagatctctggggcaaagaactgcaggtaagcaggttgagcttcttctgagctggcgtttgtttcacggtgcagcagacggtagaagaggtgatatcagcaaagcaccgtgatttgatcatccgataccataattattgttttcgtatttactatatatctatcgatcaaatataaatatagtatgattacattgtaataacttcaataatataatgtgtgtgtaactttcacacgccgggtccatgtcgatattctgaaaatcaccaactagctcactcgaaaacatgtggtgctctgttctaaaccggccaagccgttgttgctgacgacgtgaaggcagcatgggagcacgacgccggatcgatcaacggagcggaccgcggcgcaaacgtggttgatcagcctgcagtccgaattgtattcgcattaaatctagagaactaaaactaagtaatctctacccagctaaataaatcattgctcaaccgattactaacagcagcataataattaaactaaccgatctttagctccatgaagctaaactatgtacacacatgggcttagcacacgatgattggttcgttgtagtccmcgacatgcgtggtatgtacatacacgtacgagcttgacaccaaccgcatctgctctagtaccatgtatgctatttggttgtaccaggagcagaccaacagtataagaaccggtgtcagatgataccgacgacttgtagtaaaatatataacaaaactatttatccatatattataacatcatgatttaaatataattagtatactatgacaatgataaataagttatggcatcaacgaatcgattttctggatccgccactctcgtgcgtatttgggctaaaaaaaggggggcaaaatataagggaccacctatacatttatcgacaatttgacagatataattatagtacaatcgtagtataattcttatatgtaattacactgtaacttgcacgtaactacagtgtaacttgtatataagtttcatgtaattttaaacctttagatctattacaagatttgttttggtgaggaagaaaaataaaatcacagcacacatatatgtgtaaggatttgttcccacaacttctgttttaccgaaataacatattacgtagagatttttgaaagtgacatacaagttacactatagttacagtgtaattacatgcaagttacagtgtaattatactatgattgtactgtaattacatctgtcaaatttttgagagaaaatttatcgataaatatatagcaaaatcgaaatataatggtgcatcaaaaattctatgcgagggtcgcacgtcgcgagaccggccttgtcgttgtcttcccgcgtgcgtgcatttcgcgcgagtttgtcgcggcaaactcggcgcgtcgcgatgtatatatgctatagtagtagtatcgttgaaccagctagctccgaatccttcaacgtgcgagaggagcggctaattaagctaagttattagctgaattaatcgttcttgcacagctagctagctaagctgtctgtctagctatctgcgtcgcacg

SEQ ID NO: 5013 - DNA, 2000 bp, Oryza sativa
gcgaaaaaagttaacagcgtcatctattattaaaaacaaatgtagtatacttttcaaaaagtaaatataactattcgaactctacgagaaaaaaaatagcaatcagagtcaaattaagaaagaatgacatgtgcatttccttttttactgtccacgtgcccaacttgcttgctttgactccgtagcaaatactgtaggaactgtgaattcaccgtactgccttgcagtacctcaagttggactggcaatatataagcatggctgcttgatattgacaaaccgggcagaagacttccttgaaattcacacgagcaaacagcaagatccgatcgtgcgcgattcgtgcaagttcttccttacggctgcaaagaatatactacagatttcatagtcagcaatgacctccatgatcatccatccaccatccttttcgtgacgaattaactatgctcatgctcccttgtttttacctactgttgcggctgcccgtcctaattaatcaaccactttccccattgtcaatgagccgactgattaatttacttttccccatctgtttgatgggcaacgatttgctagtgtgattaagcgagagtagtgcacacgccataggtgcaaaagtcgtagaggtatatgcgttgacgaagctatgggttgctgtcaatcgatctgtcaatctgtcatcactcttctcctgcaactctctgaactccaattgctcgagaaacatcaggcccacgacacacaggttgttcgctgatgtgtagctttcagagcgattaggcttttggcccggtctagattctagaatagctagcacaggttatctactctcaactcgtacgtgatctatcattaactctctgattaccagtactagcgcactaaagcatatactgccctttgcagtttcttctcagccgttctgctcttgacagttacgaaagaactgtccttgcaagagtctgatcggcacgagcaaagaatcgtcgcaagaaggcgcccaagatttgagttggcagtaaggatttttctgaatctttgtggcttagttaaagccacgttcttaatttctccttttgcttttggtcacagactcamtgccacagtccaaaattcttttcttgcaagctgctaatgagttgcctcaatagccattttttttctccattttcttgcacactgaactagtgaacttttttccctgtccctgtgctttctaatcccagtagatctgcagaagattgaaccataagtatatgttgttagtttcaatacccgaatgtcttgacaatcgtagtagacggtttaatggtctagagcaaggagtttcagaggaatggaaatgcgaatggaggaaggagcaggaggatgaagagggattggtttggttaggttaggttaccagctcaagatgtcttaatctttttttaatctttttcttctgttggatacttggatgattgggcctgggaaagtaagcctactaaaatgtggttcttggatggaatcgcttggcccaagaagagttagcccaacggcacagacgggtcggagactcggagagagcggcgtgggtctcgccgccgaagcggagcacgcggatggcggcggcggcggcggcggcgtagttacagggcatggcggtattccggaggaggttggttgtgattccgcggtgctgcagactccttgctgaccagacaaaggtggtgtaaaggcgtcgacttcaatcgtaatcttctccttatttagaatattcttgaccatagtccagtctggatctcactactccctcgtgagtatctaggaaaagctcaatctttttcttgtttgttaccatgggtttcttggaatatttagatgcttcgtagaaaaaaatgcgtcattttgcttcttctgtattgcctgcggatgtggattttgttctacatatgcatataatggggaaaatatcatctttttgctgatttccgacggattatgatttcaggagcata

SEQ ID NO: 5014 - DNA, 2000 bp, Oryza sativa
aaggccaaataaccatgtatcaatgacaacgatgttggtatctcatcatttttcgacgtcctaaatatttatcatcgaaaacaagtttacaatattatacccttcaataaaaacatatttattttcgatattattctcttcaataatttttttgacgtttatagatttggtaaagcataaaaaaattccaatatcaattttatatcaaaataagcttaagatctaataaattttatgatgattataggttttttaagacaaatatatgctgaacaattcttttggtttcaaactaagcatttcaaaaattattgatagttagaaaattaaaagtttaactaaatcttaacctaagcatcaagagggccctcaatccaagcgaatagttcgttcagattcgtagtattaggttgcattcgttcatgtaggttggaaactcattccctccgggcgaaaaatggagcggtccattaacgcgtgattaattaagtattagctaatttttttaaaaaaatggatcaatatgattttttaagcaactttaatatagaaactttttacaaaaaatacaatgtttagcagtttgaaaagcgtgcgcgtagaaaacgaagaagaggggttgggaaccctgggcaaagaacatagccttagtatgtgtcatatccatccaaagttatttatatttgggttgtttgtttgtgctagctgtggcagcacagccgtagcagctgctgcagccacaattaatttttcgattgctactattgttgctccagatgcctgcagctggaaagtagcacaaacgatcaaccccattgtgggatggaggaactaaaacttaatttttatcttgttcataatacttccgtgtataactattctcctcctccttcatcctctatctatctatctatctatgttcatttcctcatttaactagctgagactgtttggatggaggttaactttatcactatcggttagtcacaattgtgataaactttgtcttgaaaatwagagtatatataatgtgtgagctaacatactaataaagtgtgacttaactccaagtgtaacacacaatcaaacactgtataagaaattacgctacacctaagatttgacatggtaaaattcgactatcaaccaaacagcctgccgttcttctcgagctccatgccaactaacctagctctatgacgacctggtcattgattcatatcaccgtcctttaacccatttctgaaggatgtaaatatgtgatgtcgacgaggataaatagaatgaaccggcaaacaaaagtatgttgatatgcaatagaataggagttctaacagggcaagcaaaagagttcgtatctcgggcgttgctagtgaggtttgagccagacatatatgctaccctctttgtcacgcgtacatatgaggtgcacttggcttggaccgaatgccatgagctagctgttccgctgtcgtgtgaccaatgttaattaagtgtgtaaggcggaagaaacatgattgttgcccttcttgtaaaatgagaatttctattagcacgacccatgactattattagtgtttttacagtgctccaatcctcttgcccctcgaggtactaggagttgttaatgttagttgttcattgactaagactatatttggcaatagtatgcataactctacaaatagcaagccaattataagtaggaagggtatcctgtgcacacgggagtacagctgcactcgtgtacacgtgcgtccggatccgttcgatcgacatcctacggccaagtctcctagcgtggcaattttacgaatacacgcccgcctcctccacttctgttttgcagaacagcccatctggtaccgcctcttcagctgatctcgttaatcacggcgctgatatgctacgcctcttcagctcctcttgtggttccatgcgcggcgcgccgccggcaaaatatttcatcgaggcgaaggggatcgttgttttgctctcag

SEQ ID NO: 5015 - DNA, 607 bp, Oryza sativa
ccgaaccygtataaaccycttttgtctcatcgtcttggaggggcctaacaccctcaagatcacaaagttccgctcaccaagccctcaaatctcacccgctgcccctgaccgaactcacaaatgggggctcacggtttcttggtggaggagttcactctccgataatattctatgctaaattcattttttatggaatgggccggagataggaatcactaatcactagagctgtgctagcattattgggtgcattggcattttacctgaggtggtgggaatctgggtggtcgaatccaaagcggacacatcgcgcttcgtcctctcctcaccggttttggtgggggtggccgctctcgcgccgcccatgcgtccgcgcctcccgcgcacacgaacctcgtgtgcccgcggtgacgccacgtggccgcgcgccagccagccatctcactccacactccagtccaactccggctccggcgcctcccgcgtttactgctacaactagagcactgcactgcaagggaagattattgcgcggcaaattcatcctcctcctccgcctcggggtcttcgccgaagaagctaagcttcttccttcttcttcttgccc

SEQ ID NO: 5016 - DNA, 2000 bp, Oryza sativa
attaataattatatacttttataataaagtatcttgtgtcaaaaatattactgttttttataaattttgtcaaacttaaagtattttgattttaaccaaagtcaaaacatcttataacctgaaacggagggagtataaaatattaaatacatttaatttaatacaataattatcgtatgagccatcctaatcatacattttttgtttggttcgatgtgcaccctaatcataaatggagctgcaggtggtgccaaaagagggactgccaaatggtttactccttccgttcaaaaaaagacaaaccctgatttccgtgtccaacgtttgaccgtccgtcttatttgaaaaaattatgaaaaaaattaaaagataagtcacgcataaagtattaatcatgttttatcatctaacaaccaatgaaaatactaattataaaaaaattccgtataagacggacatttaatcgttggcacaaaaacctatggtttgtcttttttttttggaaggagggagtagaacacgagggagggtgccgtcatgcaatgcgtggaagcctaccggaagtacgactagtgtggttcagtcatgttctgactcccgacggtttatcgagtactagtacagaaggaagcaaaccaagcgagttgatgaaaactcaaaacagaggacgcaaaccacagaatgtttccgtcgctgtctttgctggctgctgccacggcttccattcctcccgtcccttcctcccactgacacgcgggccccamgtcccccamcccacgacgtctcactgacatcctgtgccccaaccccaccagcgcctcggcgcgtccgcctycgsccgccgccgccgcgggggccatcctccgtggaccgcgcccacggcgtgtcccctgcgtgcgtggcgcacccgcacgttttgtcacattccgcggcggcggcgtgcgtgcgggcgcagtggaccgagcccacgggctcgccaccgacgacctttctcgcccccgcccgcgcgccgaccttccgtacggcgtagcggagatacaaccgaggctttcggcgccgaatctcccgtccaccacctgcccccgtcccgatcccccgccgtccatccacctcaccgacggccggatgcgcccccgcgtggcgagatcgcggtcgcgggggcaaaaacccaaccccccaacccaacccaccgcgacgcgagcggtcggtcaccaccgtcgcgcacctgtttgaatcccactcgtgggccccacccgcgcgcagtaaattccctcccccaaaccccccgagagcaaaaaaatcccccgaccgcctgagcctccgcgcccactgacaggtgggtcccacgtaatgccccgggccctcgtgtcagcgacagcggagggaggcgggtcggtttgcggtgggggatgcgagggacgtggcgcccgaggaattagaccatttaactcgtcgccaccaccaccagtaaactgcgagtcctcctcctcttctcgtcgccgtgctactctcgctttctctctctctctctctcacttgttccccaaggcgagaagcagccgccgccggcgagcgtcgcgggggaggggagggaagggagggaggagcggtggatccgggcttgattggattgggtcggattcgattttggatcaaccccggagggcgggaggtaaaaacgctactactcatttattgctttcctttcctttctccggtcgatccggccgaaatcggcgattgctcgccgcggaatcccgattgggtgtggggggatgggctgatctccttccgagaaccgggagctcggatgcgtcgagttggttttgtgctccttttgctttccctttttctggattcgggtttccatattggaaggtttcttgatctcgatttcgtggcgagagctggttgctgaatcttatatagctttccttcttcttcttctagcggttgctacagatgcgttgagctttggttaatctatccggcgagagata

SEQ ID NO: 5017 - DNA, 2000 bp, Oryza sativa
ttaaggatgaatatcttgtcggtggctcagtgcatcattctatagaagtaaaatgggtatactctttttctggagaaactgtaggatggtgatcttgcaatatgcaatcagccttttcactgtcagtctgtcaaacccaagcggaacaaaattaaacatcatgggaagctgcagacatcaccactagttggcgaacggtatcggctcagtatgtgcacaaagccaccactaactggtgtatgccttgccttggattttgttgggaaggtaattgtggatttatattttatattcaagtcttctgcttaaattagttattaccttatcgttgtgtcacagtaaatcatgctaagtttaccctcttttgggtggttgttgcagattgattgggtttagttatctgttgctccagaccagacgatacagagcaagcaattaaaaagaagtacaaaaagctgcagattggtacagaaaaacccatttgtacatcatttttttgtctgttctttaattcttatgaagcagtggaaaaaaaaatctctttgggtgataccatatgtcacagttttaacatattgagcaagttttatattccaatgaaaaacatrgcaagaggacagatatgtttgtggtatgcggcagtgctacctatccttgaaattttccattggacagccatttgttggagctctgcatgtcagtggctgctgagttcgagccgtcaattgaaacaagtcggcaacctcttcgtgatggagcatcgtagattggtttgcaaggtgacatgaattttttgaactcaattgaggtcaggtttgctttgggttgaagaattggggtgatttgggtagatcaggagatgtttggttgattggattggttctgggacgtatagtttgctaacataggtgggtctggaaacagtctagttttttaggcattagcaggtctagtccaaatatgaagttattgtgacattctaccaattcttttccctacctttgaaggacatcttgagtgggataactttaatttacagaacatggtaaatttaggttcaagatggatttacaaaagtattttctgtgacccagggagtcttcatacgactgcttcgagtggcaagaaacttgagagcagaacaagatcaaatccatgcattggcatgtactccatttgtaggaatgcttttttttttgccgattcatactttggaagcccattcgaggaacaggtgtgatatcacctttgaggatgcaggtgtgatgatacaagctgaaaaccactactgacgagcggccgaagatttacatggagaacgtagctcaaggcagcaaaactgaaggaacctttgatagcgacaagaggagaataatgagcggagagagtccaatttcatgtgtaattctttcgacatgaattttgcaaaaggagtccaatttggctttgatttgggagaaacgaattcgtacattcggaactacgcgaacatgcatgtcagatgaaggcggggccgtcctttctgttaacagacagtaaatttcaagatgtcaaatatacgagtttcaacacaatcctacagagtttctgctacaggaaagtgattttcaccgttgtacagagtttctgctacggcattggtatattctatccttttttaaaaaaaattaattaaaaattgatactagcaacctactccagtcctgatccgagtttgtgtctaatccagtagtattgttatattttggatcgaaaaagagtagattttctgaatatagcttattttcagctggtatcttatccatacagaccaccaaattatcaaaatcttcggaatctgaaaaaaccccaacccaaacaaagcatctcgtgtccctatctttcgggtcatttgaaactggagcgaataacctctcgactccaatttccacacaacccaccaaaaagtctccgccacttcaccccgatcgccgccgccgccgccgccgctcgattccccg

SEQ ID NO: 5018 - DNA, 2000 bp, Oryza sativa
cctttcatttaatcctaacccttcattcatttcccaatcccaatcccacctctcatttcccattatccaaacacacccttagggctgatttgtttgaagccaaaagttgccataccaaaatattagcattttaaacagtaattttggcaatgtttagtttgctaccaatacttgtcaataccacataaatgttgctaaaatattggcattggcaaaaacttacccatgatttggcattgccaatagtttagcatggttgcaaaccaaacaagcccttgcttccttcactccataccccagtactcctataaccaaaaatcagatttcttttttttaaaaaaaattaaccatcatatatctcttgatcttttgtttgtttgatggacaatattattatatctatgcaaaattgagtctgtatgcatgcatatagacaattttccttatttcctcctccgattttgtaattcttggtgttttggataatagcacgttttgaaaatatatctttacttttttattataatataataaaaaaatatatctttcacttttattatagtactagaaaaatgctcgtgcgtggcaatgggtgaaagttattttaatcttattattattgtgcggcttagctaaggtgaaattcactgcgggaatttgcttggattttttatataaaatcatgagctgcaattaggagtccggtccagggtttatattaccagttaaccactaaatttcgagccccatcggtatcacgattttcgataaacttcgactgaattttgaccaaatttactttttaaccttcgaaattccaatcgaaatttaattccgagccttgtcaaaatatcaaaatttcgcggaattcgaccggttttcatcggaatcgtgaaccctggtccggttgtctcaggttagcatgcgagtttttctaaagagatttcttatgcggctccttctgtatttttaaaagcgaacaaacttgaaaatcgactcaaacacggatttgtatttctagaagcgaataaacttaaaaaccaactcaaaacacagatgatgtaccaaagtaacgacaaaaacatcttcaatttttataatagtagagattttgtagacaaatctatatatgttgttttagtgcctttaaactaaatagttttgaagttattgatagttaaagttataaacgttattaatatcttttttgagtcattgatatatgaaacccaatttattgaaagacaacttgtcacaactatcattataaccaaacagcctcaaacttgcctttttttttaacgtggcaacatgtgacaaagtatggtcgacaatcgaacatccctttattcccttcgtccaaaaatttagtagcctgggatgagataaaggctctatttggggagcttaacattctgagaatttgctagttggtagctagcttatgagaatctatatgggtcctagttcattttttttttgagattttccagttttgaggttctagttcattttttagattctacaattacatattaggtgacaaccaaaactgtttagaagagttggagatttaaaaaaagctgcagcagctaaaaactcccttaaatagatcctaaatacgactactgatataggagcattaactatcaatagactacggtggcggataagccgccaaagcagcagggccgaaggtgggggcagtctggtaaattcgcggtggagcaccacagtaccacacacactagagtaaaatccagatccagttggcacgcgcttcgaaacgaaaaaccaatctaatccatcagtgctttaccatctccgagatatttattgcttcatctctcgctggtttgtctcgcactctcgctctccgtacggtacaaacaaaccagaaaccaccacaactgaacaagaagagagtattttctcctctgttccttctcttttgcccttctggttgggaaacaagtaacgacgccggcggcggagagacg

SEQ ID NO: 5019 - DNA, 1835 bp, Oryza sativa
ttctaatcgagaaaaccatgtggaacatatattaagatcatgtggagaagaaaaaagaaagagagaacaataaaggattctattatctagtcatatactcatatatgaagaaattaagatttttaatattattataacattattccaaaaaaaatattcttatatcagtgtccatacgatggtaaatatagatattatatggcacctaaaaacaatagatgcactacatatatataatttgttgtttttgtgtatttagaccgggaatacgtttactgaaagagagagatacatgaaaacatatgcacattgtattgttgtctgaaaaaattgtcactgctacactatccgttataagacaattagaaatattttactcttttttaatatatttgctccagctatatacattatattttcttgattatatctcctattccatgatttttaaaacatacgtcttctatgatgatatgattaatttgtatgggattcatagtgaatattcatgtggaaagaatcattcctgatcgggcctaactgtggtggaaatgattatacgactttcatgatgtgcgctagccatcatgagcacgcccatgttctattttcattgagctactattcattttccattcagtgtacatgtgcatagaaatgtcgttaaatttcagacaatttcctccaaaaaccatgtagaaactcatcaatcatgatttgttttcttaaaagaaaaactcagcgttgctgaaaacggtttaacttaggagtgttatacttatacctataaaaacacaaagaataatacatacctgaaaaaaatgaaacattacttgggcagcgttcgtttggaggacattgagggagaaagcatctcattttccacacgcacgtttcccaaactactaaacggtgtgtgttttttgtaaaaaatttctatagaaaagttgctttaaaaaatcatattaatctatttttaaaatttaaaataattaatactcaattaatcatgagctaatggctcacctcgttttgcgtatcttctcaatctactcaatccacttcttctcaaacacacccttgagcaagttttgtgggagagtttgatatgcttttttaaaaaaaagaaagatcagagactgataatcgatcccacagtccactgacgcgtggcccccaccccgaaagcgccggcccacagctcagccccgggcccagcacggcgcgcctcgtcgaactccccaccgtgctctgctgccgccctgggactcctctcacctactactacctgacctatatgtacccaccccactcacagttggccccactcaacctgtccccaccacgtcagtgactcactacccgtcgcgcgaggcccaggtggtctcgcctcccgaaccacgtacgcacacatccaaaaaaaggcaaaagaaaaaaataaataaaaaacgaagagaaaaaaacacatctcccaccgcaccgcgacgcagccgcagccgcctgcttctcttctctcctctcctctcacgcacacagcacagcacactcatctcctcttcctcccgatcgctaccacctcctctccagctcacacccaccccccacgcaaatctagaaccttctggatccgccgcttcctcgatccgatcgcctcccccgccgcccgcccgatcggatccccaaggtgagctccctccctcctccccattgcttccagatcgctccatgtttggctccgatttgaacccatgcgcgtgctcgattgaatctgagctctgcgcctgatgctgtttagggtttccggtttgccgcccccgcgatttagatggtttacg

SEQ ID NO: 5020 - DNA, 2000 bp, Oryza sativa
aggcctggatgatgaagccgcgcgcaacgtgtacccgtacgcacgcgccatgcgggagcgggacgacgactcgatcgaatgacggacgttatgcttattccggtgaaagaaatgcgtgtcacacgcattccggtgacttgattttaagcaagcaatcaagctagctagcgccaccccgcggagtcaaccgtacgtggatccatgcatccatcgattcatgcttaattatatatatgctcctgcgtgcgagggccttaaagcgcatcaaatcaaatgactagctaatgcggtaatgccttcaacttcaaatggagtacctgcctatttacgtacgttgcacaatcaagcaaccacatccactttaattttctctatctctcttgagcctctgtttccttcctttacttgctgtcaaaaaagtggcatcacccccacctcacaatgcaagcaatgctgctgtaacatgatcaacgacagcatatatattgcgctacttgctgttaacgttaatgattcgactctacatagtaacgatggaagtacaggcggggaaacgaattagacacagttttcgtgttccttccccccggcggggtgggtgtcccttaattaaataacacgatgcaagtactacaagcgtaacacaacacacttgagcctaacgaatcaatttaattatctccatgtgtttacaaaaagagccacacagttcgctcttaatttactcccttttgttgaaggggaagttaatttacttggtgagatttgagcaaatccacaaacttgaaggtggttggcagccgaataatatgcgtttagttgttataggggctgtttagattgatgctattttcagccatacaaagttgacaaaaatttgttaccaaatttggtaaatatataaaaaatgctgtcaaaattttggcaatattgccaacttgatagggtttattttggctgcaatctgaacaggcctatggaaggaaggtaaaaagaaagagggaccgacgatatatagatttcttaatagaagtggtgagtaggagtaataaacaatggagtgataatctctatctctatctctactattataaaaattgaaatgtttatgcggtccatcatccgtgtttgaggttcgtcatccgtatttgaagtcggttttctttggttttaatctatatctcttctctactattacaaaaactgaagatgtttttgcgggtattttgatacatcatccgtgtttgagtcgggtttttaaattcatttgcttttggaaatacaaaaggaatcatataaaaatctctttaaacaaacttgtatgctaacttgagatgaatgtcgaactcctaattgcagctcatgtttttctagaaaaaaaatccaagcgaattcccacggtggattaacagttataagattaaaatagcattcatccgttgcaacgcacggacattttcgttcacttttggtaatatagaagaaatcatataagaaatctatttaaaaaactcgcatgctagtcgtgggaagaaaactcgtgaaggaaggagaagattttgcaaagagataagaattgggcgtacacgtgggcggggcagatcgatcttagatacatacagattgaaaaagaaaaaaaagaaaagaagaaggagaggttgagggagggaaggaagctaggaaaaagggaaatactcctaaggaacgcggcggccgtttcccgaaccgtcgcgggcgttccctagttggactgggcggttccatcccagacgcaacgcgcagcggtcgtaggagtaggtgtttttttttggttttgcagttgccttctctcgaggcccggggggctcggctatatatcctcctcctccccctcagttccgcacaaacacaaattaacctcctcctcttcttcttcttccgctctctagctttgctttgcttgcttcatcaaaccccacacacgcacacaacaacaacaagagtaatcaaagtagaagaag

SEQ ID NO: 5021 - DNA, 2000 bp, Oryza sativa
atgttagttgatagtgatggaggtagattcactgtcaccaccaccactagcttttaaagtagtatagatactacctatatttttttaataaattattcgattgacttttttttgtcacatatttgatcattcgtcttattttaaaaatttacgtaattataatttattttgttgtgagttgttttatcactcaaattactttagggttaattggatccataccactacaaatgtggtaaatcagaaaaatgccaccactattcgcgttatcggctgggtgccactgaaaatttttaaaattgaaaccatgccactcctgtcacttttccgtcctcctctctcacgtcgccatcctcctctcttacgtctgcgtggggagaaggcgacgcggcgccggcgagcggtgaggatgaggcagctccagctcgcggcaagaggacgagaagacagggagaaggcaagcggcgagaggacgaggccgccgtcggcgaggacgctcgcggggaggttgcggaggggcgccgccgccggcgaggacggtcgcagaggcgggcgtggacacaaccgccaacggagaagaaggtcccsaaarcggccgtggccgcggccgccgccggttaggacgcttgcggggaggtcccggaggttgccgaggattgtcgcragcgcggctktggccgccgccactgaggacgctcgtggggaggtctcgaaggttgcggaggggcgcgagcacagccgctgccgaggacggtggcagagacgggtgcggccatagccgccgtcggcaaggatggtcgcgagcacggccgtggccgctgccggcgaggacgctcgtggggaggtcgcggaggggcgcagccgctgccgaggactatcagggacgcaggcgtggccaccgtcggcgaggactgtcgcggagaggcgcggggggcktgggtgagcttgtcctctcgctgctcctgccctcctccgctgtcgtgctgccatcctttagctgcccatccaccgtcgagacgaggacgacgagaaaatgaagacaaagacagcggaaaatgtgacggagaggacggaaattgtcaacatttgatgtcgcgattccggtatttgcataatatggggatcgttggtactaggatatatgcgagactgaggtaaaagagacggagacgaggattttttatacaggttcgggcccctgaattgtcaggtaataaccctacatcctgttggccgtagccggtcgtttctcttattcatcataatcacaccagtacaatatttggggtagcctatctaactgttgtcgacatggcgktctgaaggtctgactcgtagtcgacaacagggtagtcttcctcctcgaatccgcattcggcgagataagagasagcgctatgtctctmytgamkgtagccatasymsatagktacmktakgrrtmctaggggamtagcyatgmmwayctmwgaagwmrmtwtsyggcykawtgyctwggcgtatgwtggcwwstakgtyrawcctcaagygtcwksrtcwrtkgttsyratgatcmtgctacwmctmmkakrgggcattkttcattkatacatsaacttkgtatcamawatmmwagtatgwwcagkkataacccctccatcgatcaagacgccagtttggcatcgcggcccgcgaaaatccttcggtttcgcgaatgccatggcgcgagtgggtgcccgagggaccacggcgtgacagtgtgacagatcgatcgatatatacaatagtgattggtttttatgaccggcgataggatacgactatgacgctggcttgacctgttcttccggactccgtttcgttcccacaaatcatgtcatcaaaataattactccgatcgctaacacacagtctgaatggaattaaatctctgttcgctttcgtacctgcatttcactttctttctactgctagaatgtttgtggtctgccttgtccgtccttcatttcggagactggaacg

SEQ ID NO: 5022 - DNA, 2000 bp, Oryza sativa
atggagacgagtacaaaactgctgcagctcttgcgaaaccttcgaaagattctagcttagagtctgcaccagttacaaggtactcgtgcccatatgttggctgcaagcggaacaaagagcacaagaagttccagcctctcaagacaatcctgtgtgtgaagaaccactacaagagaagccactgtgacaagagctacacctgcagccgttgcaacaccaagaagttctcagttatcgcggacttgaagactcatgaaaagcactgtggccgcgacaagtggctatgctcgtgtggaactaccttctcaagaaaagacaagttatttgggcatgttgctcttttccaagggcacacgcctgcactccctatggatgatatcaaagtaacaggagcatcagagcaacctcaaggcagcgaggcgatgaacaccatggtggggagcgctgggtataacttccccggtagctcatcggacgacatcccaaatcttgacatgaagatggctgatgatccacgctatttctcgccattgagctttgatccttgcttcggtgggcttgatgacttcactcgacctggatttgacatctctgagaatcccttctccttcttgccctcaggatcatgcagcttcgggcagcagaacggagacagctgatcgaggccaacgttaacgatgacggcaatggccttgcctacctttgtgtaccttgtctagccctattcttcctctgttgaaggagccattttaggtcattccttcttcctgaagtgtactttattttatgatcatcagtaatgatcaagtactttttatctttccttatagattgagatagcccaatcttggtatatatatgcaagaagcgtttctaattatctgaattggtgccattgttgtagtgcctacaccttgtcataacatgacatcaacatgtacatgacaataaaattctctttctgatgagcccgctccagtaaaacccaagcgatgctctcatgcaggatgatcaaaacgattatctgtatcgtgagaattgaactgattttcgtgaaatctacatatagctagacgagttacaatagagtttgagagtgatagtttaagctgattcacagcttgcttgtacacatgaatttggatttcatccttattagggcctatttggagcattggcagggctccagcttaatctctcctaaatctagaccggagtctaaccaaacggtttaacttcttttttttaaaaaaaaagagtttagtgggctagaaatctctaaaaaaaataaactagagtcctagagttagattgagaagttataaccatgtcaaacatgctcttagaatagcgtgcatttgattcgaatacatcaaactcccaataaaggacttgttcggttatggccggattcaatccaggccggaaatggcaaatatagtaagaaatttatgataaatacaatgagagatcatgatttattctaagccgggaaccaatttactcatgatagggacaacaaaatatccggattaattccacacctcttaactagtggattgattcccggtctcttattatccatatcataagtaaattagttctcggtccagaataaattccagtgtcttattgtatctatatataactttcatactgtacttgtcattctcggcctggattaaatccgggataaccgaacaggccgaaatctggtggaaactcgtaagatcaggaggaggaatagaagaaacgaaaaggcaatgaaatcatgaggaaaaacccatcagaacaggaggaggaagagaaggaaacggaaaaaaaagccaacgaaatcgaggtccaattcccattccgaccaaccgaccccacccacctaccgcagccgcaggtggatgcacaagtccaccacccctgctcgattcgaaccaatacaacaacacaaactacctaccgctgcgacacacgcagccgagctaagcgctaccaccctcccatcc

SEQ ID NO: 5023 - DNA, 2000 bp, Oryza sativa
  misc_feature (1)...(2000): n = A,T,C or G
cggtggcggctgcggctcccttctccccttctcgcctccctcctgccccagatccagcgggcgatggcggtgtcgatggcgtcggcgggtgagtccgtcggcggtggcggcggctccctcctcccctctcgcctccctcccgccctagatccggcagcgatggatccggcggtagtggcggcgtcagcggcggcgcgccaccccccacagcggcgtcggcggcaccctcccccaccaccggcggcggatctagcgggaggagaggtgccccgcgagcggcggcgatggcgccccttctcccgcgagcagcggcggcggcggagtcctctcccaccaccgacgacggcggcggccctctcccctaccaccggagagcgccctccgcngccaccgccggcggatctaacgggagggaccggcgktggcggcgctttcccctccaccggatctagcaggagggaagccgccggcggcmagccgtctctgcgacggcaatggcgacggcggtggtgacccccttgatctaattttgggttttggtttggatatatatgtgtacatgcatcatgatttgtgtgattgaactccgattgtgatkgtaatttttttccggggtttgattggattcggattgggattttggggaaggggggcgacgaagcgggacgaaaaaccagtgtgacgaccggaaaaattcgaatatttatattagttatagattaaacatagactaataataaaataaattacagtatttagcctgtaaactgcaagacaaatttattaagcctaattaatccgtcattagcaaatgtttactgtagcaccacattgtcagattatggagcaattaggcttaaaagattcgtctcgcaattttatacgcaatctgtgtaattagtttttttcgtttatatttaatactccgtgcatgtgtttaaatatttgatgtgacatggcgaaaaattttgctagaggatctaaactttttcgtttatatttaatactccgtgtatgtgttcaaacatttgattgctaaggtgatttttgaaactcatacagattaagacgaagcttaagtgtttatacaaaacgagattgtattaacgtataattaattgagtttaattaagtattacaaatttaaaaaatatatttatctgatattttagaataactttcatataaaattttttttacacaaaacataccgtttagtagtttgaaaagcatgtcatgaatatccaaattttcatccaaccattccaaagcttacttcaaaatatggatcttttgaccacgccattccatccaacgtggcaatataacatcgacacgtcaccacaacgggcgtgatagttttatcttatcacgttagtcagggtgacgaggccaaataacattgtcacatccgttaggccggcgtgaccaaataacgatggaacattaggcagaccggcatgacagtatgcgtagctaaaagattcaaatttttaaaataagttttttcaattgtttttttaattaaaaataaaaaggttcaagacataacaaaaaaatccacgctcaggcctcacgcagtaatgccgtggtacgtgcactgacttggcattctagagcacagcgtggcatgcgctatccccgttcaaataccccaatgggtaaatccggtccgtccacgtgtaaaccggctcgggtcgggctcgccaaaccatcgacagaagcgaagccgggtcaaccccaccactcgcccagttgtccgcgmacccctctgacgtggtcactgacaggtgggcccgagagcggtggggtccacatgtcagtcaccacgttcctccgccttcgccgtcagctttccccttcccgaagcttcgccaatctcccctcctctctctctctctctctcctccccgcggtcgccgacgacctcgccaccgaccccgccgccggacgcgaggaagagacggggggagccccggaggcaggagcggcgggagggg

SEQ ID NO: 5024 - DNA, 2000 bp, Oryza sativa
caccttttcgttgttccgtttcaccggtttttatttctgaagtcacgtaccgtaatcgttactgcattacatatgacagccactaattgaggcaagcaggacataacgattctaaaagcttctaatcctaactgcctgtagaccccaaagctaagttaatggaaactggaaaggatcctttagtaacacttgtgatgcaagttttcggcgttagttagcatgcagcttctgaacctataataacaatgtcagtgggggttattctctctgcacaactagaccttttttctgcaatcagttatattcctcaactggtaattaattcggacagttgctgtagttactcttcaagtacatgctccagtgaattgaccttgatttcgcaaagtacaaaactgtgagctactccatgttacagacatgtggttggaggcgatactgtttggttctgcattggatcgcgagagagaacacagatgtggttcatctgtgattcctcctacagcacgtttctcactcacaagatgttggtctgtatgagaggatctcaatctagggctctgtactatactaaagctgattctgctgtgctgtcatttagcccttttcttttttctgcccaacatgctttcttttctctgatctagccaatgggcagcacaagattgcatcttgaagctagcagtgggacagtactacactagtgtgctacagtagaaactgggatggagaaaagatggcagaagtgaaagaaaggcgagttctttctagtgaagcagatagtataatcttgttttgtccctggaagaaagaatcttacatttcagtcagagaaaggcaacgaatgatttagcatagcacgcacgaacagcatagtggggataataggaaaaacgaacttggaataacttgatggagaggatgattgtattgggtggtctaagattttgccccgccctatacgtgcagttataccattccattacgaattctgatgatggtatctttactttgctcttgggtctttgtcaatggcagtaaagccagttagccaaggtaaggatcaggattaggattgctgaattgatgcagatatatccctctctcctcccactaccagctgtctttcattaaaaggaaatcaattaagataatgaaattattgacaacaatgaatttagtggtgccatgcatggaacctaaaaaaggcgctagaatcttatgttgtgctttgggtggataatacaaaaattaacagcatgatccaggggaatacaatttcaggaattcattttccacatcaagtgcaattcgcacatacatattcccatacatgacccaaaaaaaaaacatatcctgaaacccaacatgtcaacttctaaagtgacatgaaacagagctggaattcagtgttctccatcagtagcagtatcagacaacacttcttccactcactcaataataagcagcagcaacactactctaatcaatactcaattctacacttgtactactacatcagcagcagtggactagctggaggaagaatccattgttcataagcatggggctcatcaggcggctgatcccatccggattccctgcaattctcagaaggtttggccgttttttactgccaatcagtgagtgaaatcacgcgcataataaaccagtcagtgagcgaaatcagcagtcatcaatggatgaaatccctaccatttactctgcttcttccagtgattcctccctttggaccctagcaaatccatgcacatgtggtggtcacccttgtgcagccatggatggaaaaccctcctaccataaagaaagcgtatcaagccaccctacatatattgtcacattccgcctcccacctcgtcacacttcccgcgactccgcgctcacaagaaccggccatttcttggcagcttcttcttcttcttcctcctcgcgctcgctcacctctccattgttgtcgattgtgttgtactggtaggagg

SEQ ID NO: 5025 - DNA, 1143 bp, Oryza sativa
caaaggctggaaaataaatttcgatgraaaaaaatcttaaaatcagctacaaatttaatgttaaaaattcaaattttggctgataagcataaacggaaatatgtgtacgtcacgatgtaaaggtatcatctttattctgaatgatgatgattcatgatgtaaaggtatcatctttattctgaataaaaaatgatgaatagatttgacaccgattcaggtaggccaagaggtatccccggattggattgtgatcaaatgcagtagctactaggactgcacggtaactactgcacacaatctgagccctctatatcaaaatctaacggacaaaacggatttggcacagtaaaatcagaacagtacctttccacattaaatcactacagtgttttgctacagtgctcggatatatctgggacgtccattttagatcatgcgatgctagtttgactgcttattttgcagtcccactggctactgcacctgaatcggatccccccggattgggatcctctgactttactcagagagctatagtaccgtgactttgggagtatttctagccgtccgatccacagcgaacggacaagatcgatcgctagttcgctacagcgaatcggtgaatagtaattctgaacagtattttgcactgtttgctacagtaaaactacaaatcactattccgcactgtagcgacaggctcattttactgtgcatgtctgccgttcgcttcaaaagtcagaggagccgcttcccccatttgcacactgtgaggaccatgtctgcactatacgagcaggtacaacagaacaacagactataagccaactatgagtatattttaaagaggtaaaagaagagaaagaaaagcatcaggctacagatatatctgtagctagctacagtatggactccaaaacataatgtatgtatagcagatgagactaaatattaatagtatagtaagagctagtagtgggctatactattaaacttgctctactaccatccatttataaaaaaaaatatctatatgttcagatgagcacgccattgaatttggagttggagagactgtccatgttgaatccaatcatgtcgtcggatcggagctccaagaaggtgtgtgtcgtcggcgccggg

SEQ ID NO: 5026 - DNA, 2000 bp, Oryza sativa
ccaaaacaagttcgagaatccgaaaatgcattttgagagtttcgggatctagatgacacacccacataagtttaaggaccgctcgtgcacttcactcttatataaaatcactcttggaagaattttttttaagcattgtttttttacagaagatatatgatttctcctacatcacaataagggagatggagggtaagaaaacaaaatagatgccccttaaatgagttatggttgagagtgaaagttggttggagggaaaaatagtactgctctcttttttggacaaatttgaatagtagaagtgcacttatcagggacggagggagtagttgacttcgctctctctcaatccctctaaaaaaaccacacacaagttctctctttttttaagtaaactagaaaaatgcccgtgcgttgcaacgggtgaaggctattttaatcatattattgttatatggtttaggtaaggtgaaattcactatgtcaactcgcttggatgtattattttttaaaatcatgagctgcgattaggagtctgatagtctcaaattaacatgcgtgtttttttaaagagatttcttatacgactctttctgtatttccaaaaacgaatgaacttaagaatcaactcaaatacagacatgtatttcaaaaagcgaatgaacttaaaaaccaacttatacacggatgacgtaccaaagtactagcaaaaacatatttgattttttataatagcagagagtagagatataatctagttaaggtaaaattcattgtgagaattcgcttggatatatagttttctagaaaatcatgagttgcaattaggagtccgatcatctcaagttagcatgcgagttttttttaaaaaagagatttcttatatgactccttctgtatttccaaaaaggaacgaacttaaaacctgactcaaatacagatatgtattttcaaaagcaaacgaacttaaaaactgactcatacgcagatgacgtaccaaagtactggcaaaaacatcttcaatttttataatagtaaagatttcacaaaactacatatactttgaccaaattatcacaaaactacacatttagagtgatatatcacaaaactacaaatttaacactaaatttcacatagaactacagatttaaggtagagtatcgtaaaactatagatttagcaataaaattatcacaaaactacaggttcagtgataatttaatcataaaacttacacgtgtataactcaaacataacactagtgctaaggatttaaactctaaaatatgtagttttgtgataactttgttattaaatctgtagttttgcgatactccaccttaactctatagttttgtgataaatttagtgctaaatatgtagttttgtgatacatcactataaattgtgataatttgatcaaagtatatatagttttgtgaaatttactatatttttttttcagtttctggactaactttggaaggaggctttctttgggagcaaataagtttattgatagaaataaatttaccctatacttcttacttttttccttaaatccttccatacataaagtagatttagcatctatctctttcatgcgttacacacttttcatcaaattgtggagcgaaattatctttggaagtatttgtcctatatctcttttctctccataaatcttgcaaaacggttggatttatttttatctctctcgcacacagatagacttttcaataattctagtagtctaactttggaagttaagcatctttagcagcacttaacttcattagcacacttactgtttccataaattttgggcatgtgagatcttttcaaaagtttacttttaatgaagaaactgatcacttccccacttttcctgtctttcatgtcgtcctatataaaggcacaacttaagctgtcatctatcaccaattcatagcttccaacattttcatttcattcgtaatcaggttttccacagggag

SEQ ID NO: 5027 - DNA, 2000 bp, Oryza sativa
caccggacagcacgtacacgtggcgctcccgtggctccctggcacagcgccacgtggctttgggagttgaaaagtcaaatctacggccgcgacgcgacggctccgccgcctcgctccccgaattccggggaggggaaaaaaaaccgcttccaccgggaagcaaacgagcggaccgacgcgacgcgcgcacagttcgtttcaaaaaatttggcccaccatgcatatgttgcatccgtaccatctcccatatttttttttctgagggaaatatctcccatatttggactttggagtattcgacgttgtttccttggtcctagcacaagaaacacagtttcttctctccactattctgcacgtgaaaaataagtaaaaaaataataatcatcactccaactccactaacggcctgtttggttggaaggagttggtgatgaggaataagagtttatgatatctgggagtttaagtctgtaatttggttggaagacttgggaattcgagggggtttgggatgaggaattaaaaggtcgaattcccaccaatatcttacctgggagaggcctgttaattcgtgagactgggagggaattcgacgtgaaatcaaacaagggatgaggacttaactctcatgaccaatcccaccatcaactccctccttaaaactcccattcctcttcccttctcttgccaaataggccgtaaatgctaaaaaaaaaatcccatcgtttcaaaataagttcatttatatttcatctattccagaatataacaacatagaactataaatctagatatgctccatgattaggctgtgttcttcttcatatttcccaattcacctatatcgctttccgcgcgcacgtttcctaaaatactaaacattacatattttgcaaaaaaaaaataaaatactaaacattacatattttgcaaaaaaaatataagaaggttgctttaaaaaatatattaatccatttttcaaatttattttagctaatacttaataaatcatgccctaacagccactccatttagcatgttgggagcgaggggctgtttggatgcccacctcaatttaccacagtttttgtaccaaaggtgtggcaagatgcaaattgtgtggctcaaattttgatggccacacttgtggtaaactttggctaagaaaagggtctatgactagtgggaccaaaagaatagaaagtgtggcatgccaaagttataaaaacaaaccaaacactatctacatttggtcaaactaacatacctcaagtgtggcaaaatgtggcaccaaccaaacaggccctgagtgttcacaaccctcgctcccaaactcagccttagacttatcctaaatagttacattttgggacagagatatatctgtgtccaatatttgatcgtccatcttatttaaatcttttcaataattagtatttttgttgtcattagatgataaaatatgaataatactttatacgagacttatttttaaatttttttcataatatttttaataaaacgaacagttaaaaattagataaaaaacacacaaatgaacctattttaaaacggagatgtactagcagtagaaaacaaggggctatagctggaaacacgaaccagccaggaacaaaaacgagaacgaagggcacacgcccctgggcccaccaagacagcctcaccattcccaacaagtcagcagccaccactgcagcgcagaccggtccgccccccccgcccttaccgggttccccgacccgttaacccgctaatacctccattactgcgcccaccaactcaaccccaagtaaaagccgcacactctcatcactatccctcctctcctcctatttaactccccctaccccccacctcctccacctcctctcctcaaacctccgctcctcgaaccccgcgcccccatccacacgcccccagtaaccaccaccgttttccttcctcggagtccgcggtgacaggagcccaccgtcgcc

SEQ ID NO: 5028 - DNA, 2000 bp, Oryza sativa
cgtcatccacgtctaagttggttttagctagtttttataatcyatatcyatatataccyaattaatatatacctaaagctccggtttttttggtctcggtgctttgttgtttttgttgcagatttcccaatcaggcttcgtccggtttttctcatcgccgttttttcattggttttttttataccatattttttctgtccctccatttttttggtccgtgtgttttttttcatcacagttttttttacgaacctagcactatcgtcaatttgtctcaccaaacgttctctttcaattaattgcaaaaatcgattccatacttctcttattattttccttgcgattttcctttcaattgaactttaatttgccagattaaatctcagtcatcgatgatggccaaccggtgaccttccctgatcgtttttattccgagttttatggatttattccaatttcgagaaaaaaatagcaaaaggggatcgagcagataaaaagcctcaaccaattttagaatatcgagaaggatttggctggatttaatagggtggatcggtctttcgtaggttgaagacgacgtgtgtgtgagctgagcctgtggctccacttatgggccaggccaaagagagacatgcaatttattgctcagctcttaatagttattgtatcacagaaaaaacatttttacccattgcaatgcacagcaattctatacccatcctcccactgcccccatcctgattgccatccacccaggctgtctcgctcggctcctataaaccagcgaaaaaaaagatcgacaaaaaaaaaagaaaattgaggcgcctaagtagatcgaacatgtttcactaaaaagatcgaaaatgttttagtcttttaaaaagctgaaacacaacaaaatcagctcatgaaacattttggtacaacatatgaaacaacggtttctaaaaaatcgagcgttgtttcagtctatataaaaacaatgtttcaacaaatagcgaaagaatgtttcagttcactgcaacatttgatctacataagaaaacattatgagtacactagataaaacattttgtgtggaacaaaaaatgaaacagattcccttaatagagggtttccataatatgtgggtgatttgttgcaaatgaatatttcaattcactgcaacatttcgtccatacatagtaaaatatcatgagggtactagctgaaacattattggtggaaaaaaaataaaacggattcccttaatagggtgtttccgtaatatgtgggggatttgttgcaacggggcgtgagtggtggggacacgtgggaggcgaggcggaggcgcgcgtggaggaggagggtggcctgattttttttccaccgcatcgggcacccgatccccagcattttcagaaattatgcaaggacttaaaccatctttggtggggacccaggaaaataagtcattttagacattggcattgtctacatgcatggtactccctctagttccatattaattgacgttttagacaaggttgaggtcaaacttttattagtttgaccatcaataactttaaaaatatttagtttaaaggaactggaacaagatatatagatttgtctttgaaagtactataataaaagtaaacatgcatttatttattatatatattattatagaaaaataagatcaaattaagatgtaccttgtaaaccgtgtcattgttcaaaacgtcaattaaaatggaatcgaagggagtacagttttagccactaatttatatgtacaatatatatactgacctgatagaattacagtatttcataagatattttcaacacaaatatacaaatcaataccattcacgattcgattctttttttactatcgaaagtttgactaatgcgtgtccaaatgctactagacgagacagattataaacggatagatatcccttcgcttcttgtgtatcagtctcacataactgaaaacaaacctaacctccgac

SEQ ID NO: 5029 - DNA, 2000 bp, Oryza sativa
aattatggtttggttggttagcactggaatctttacgtgtgacatgtgtaaaagttttttctagcaattttttttcatgcaacaaatcttaaggtgatcccaataatcacaaatttgaaagtttttggactaaaaaaacttacataagttttcatagcaaattccgtaaaagtttcccccgttttatagagggcataaacccgtcggccccattatatgtgccatttgtacgtttccwattttctcagtaatcagaccattaagccgagaccgaccgccagaacatccctagtttccgcgccaaacttgtggaatttctgtgagaaatttgcgcatggaagcaccggaattccacgttatccagactataaatatctgcatcgatcgatcagtcaccacaaccacgcactccactacaggctaacacaatggcagctcccgccatcctccgcctcctccctcttctcctcctcgccgccgccgcgaacgccgccacgttcaccatcaccaacaagtgccagatcaccgtgtgggcggcagccgtgccgtccggcggcgggcagcagctggacccggggcagcagtgggtgatcgacgtgccggccggcacgacgggcgggcgcgtktgggcgcgcacgggctgcagcttcgacggcagcggcaacgggcggtkccagacgggcgactgcggcggcgtgctgcggtgcscggcgtacgggcagccgcccaaacacgctggcggagttcgcgctgaaccagttcagcaacctcgacttcttcgacatctccctcatcgacggattcaacgtgcccatggacttcctccccgccggcgacggcgccgggtgcgccaagggcgggccgcggtgcgaggcggacgtggcggggcagtgcccgagcgagctgagggcgcccggcgggtgcaacaacgcgtgcacggtgttcaagcaggaccagtactgctgcaccggctcggcggcgaacaactgcggcccgaccaactactcgcagttcttcaaggggctctgcccggacgcctacagctaccccaaggacgaccagacgagcaccttcacttgcccggccggcaccaactaccaggtcgtcttctgcccatgagggacgatgacttgttagctggcatctgatcgatgtgatcttggttagatgtatacacaataaacaagcatgcatactttttatgcgagtttgtatcagaatcatgaagagaaaagttactctgtaataaagtaaaccattcaaaactgaagtggtttttcacttgtagtttggttaattacacaggcatgaacgaatccgttcaaattctattattttttccaggggggtttgacgggtagtttagcactttagcatcactacgatgtacaagtgagaactgaacaacgttttttgtatgcgtggatgacacgttctctattcgttccaaaccttatgaaccgtgcttgtgaactgtgatcgaggatttttgaacccagaatgtgatcgacgattcatcgacctagctcctttcttatcctgggttgaacggtctttgttcttggcagagctctgtattttatatcttcaggataatagcgatggataatatatagagtaaaatttgtccctaccatatttttggattttgtatcatccaagtcaagatcaattgacaattcagatataaattaagatagtacaactttatattatcacgcaaaatcttggcacgatatttgaccaaatcattcacatccatttctagacgattctgccaaattaatacaaccagctggactcctatcaaaccatcagctggtttccccaccaaactctcttgggatttcgtaacgaaattcgcacacgcaaagctgcaaaagttgaattccattattccacattatccattagccggaccgctataaaaatccacacccctagcttgcattcttgctcagctcaatttgagcaacagaaacactaacacgtcaccaata

SEQ ID NO: 5030 - DNA, 2000 bp, Oryza sativa
gttttcttgtcaaaatttttaggattttctctgatttaagataacaacgtaatatctcaagagtgtattttcttcgatttaagagaacgatataatatctttggagtatttataagatgtgtaatggacttttaataccgtatgccgcaaagaaggagggagagaaagaggtttggggtgttctttaaaaaagttatagatctaatgacctaaaataatatgttaatcgattgaaaattatgtgtccatcgatttatgtcaaattcgatggttggatttttttcccccgaaatttctaagatttttctctaatttaagattttcatatagcagcttagaagcgtttataagatatttaatggattttaacgttgcacgggtgtggggagggacatagagaagtttgggtttttcttattacaaaaacctgacaaatcgatagctagatgctttgtttctttttaaagattttctcgtattttctctaatttaatagcacctcgtagcattttagaagcgatcataggatctttagtgtgacagagcgagagcggttagacctagcagaggaagatctattttgtggtatttttaatgtaaaaataattttgattttaatttctcatgaagatagcttgttcatacgtacgtgatggggaagttctggatgtgtgcgtgtttttttataaaaagctaaccttctaaaataaaataaaagatacaccgatttaaatgaaaatcgatgatcggattagagtatgacttggcgacatagaagcatttgtaaggtgtcacttagcgacttaggatcggagtatctgtacgatgtttaatggacttttaatatataatagttatttttctaaattttttaagattttctttaatttaagactgtcatagaggcgtttaaaaaatatttaatggactttaacaccacacgggggtagggagggagggagagagatttgggatttttttattaaaaattaaccacctaaatgtaatcatcaatttaagtagaaatcgatggttggttgttatgtatttttaagaatttttagtactttctctaatttatttgcaccacgtagcgacttaggatagttcgtaggatgtttaaatctgtgacggagggagagctgctagacatagcaattgatctatttgtgatttttttgcatgtaaaaataattttaattttaatttctcatgaaatagaaagtaacataggaaggaaaagaagggaagtacgtacagtacctacgttcatatagtacgtacttttattcgttagtatatatgacgcctctattgattttatttttttggtttgtacgtcgttggtttcggatgtgattttggcttttaccgaatagatctaaccatccaaaacaataggtccaccaatttaaataaaaataaatggttaaatttctcttatttattagggtgccacttgacggtttgagagcgtttatagaaagtttaatggacttttagtatataatagatgcttctaattgtaactatactgtacctatgatataacttatataaaacttatattcaaattatggtttggttggttagcactggaatctttacgtgtgacatgtgtaaaagttttttctagcaattttttttcatgcaacaaatcttaaggtgatcccaataatcacaaatttgaaagtttttggactaaaaaaacttacataagttttcatagcaaattccgtaaaagtttcccccgttttatagagggcataaacccgtcggccccattatatgtgccatttgtacgtttccwattttctcagtaatcagaccattaagccgagaccgaccgccagaacatccctagtttccgcgccaaacttgtggaatttctgtgagaaatttgcgcatggaagcaccggaattccacgttatccagactataaatatctgcatcgatcgatcagtcaccacaaccacgcactccactacaggctaacaca

SEQ ID NO: 5031 - DNA, 2000 bp, Oryza sativa
atgagtggaaatggtaagatttgtgtacgcacagttgcacgcgtacctgctcacttgtgtgtactttagtgtttgttaggggttgaactgataagagtaagttttctctgcaggagctatgacttttgatttagaatatgcccgttggttggaggaacaaaacaagcagataaatgagctgaggactgcagtaaatgctcatgcaagtgacagcgacctccgtctcattgtagatgggataatggcgcattacgatgagatattcaggctgaagggtgttgccgcaaaggctgatgtgtttcatatactttcaggcatgtggaaaacacctgctgaaaggtgcttcttgtggcttgggggttttcgttcctctgagcttctaaaggtgcataagccgtgtgctgcatataagaaaattataaaagcacacctcagggatactttagtcctaaagaaaaaagtcatctaatatcttgttttaatgggtattgcatcgtaacactaatttcaatctcctgtaaaatttcagcttcttgtgaatcagctcgagccattaactgagcagcagttgttgggactatcgaacctccaacagtcctctcagcaggctgaagatgctctatcacagggaatggaagcgttgcaacaatccttggcagatacgttggccgggtcccttggtccatcaggatcttcagggaacgtggcaaactacatgggtcaaatggctatggccatgggcaaacttgggacccttgagaatttcctccgtcaggtaagcgtctttcaaaatcatgtggcatatttcaaactgtttcgaaattttctgttatctctgattctggcaagcatgcactcttgttattgctgtaacaggcaaaatatttttttgaaacctgatactagtttgctgatgacttgacgagttactgaaattttttgtgttccctttcttatttgtgcttttgatcccgagcaagttctgcaagttttagatgaccctttttttttctgaagagttctaatcttctttctgccaggctgacaatttgcggcagcagactttacatcaaatgcagcgaattctgacaatccgacaagctgcccgtgctctacttgcaatacatgattacttctcacgtttgcgtgccctgagttctctctggcttgctaggccacgggagtaacaacacatagggtgcatcaccgttaatgcttcatgaactgatctgggaggaacggcggagcgggactgattgcggatgcatttgcagaagattggtggctcagttccctcggcacaagttgtattgacaccttttggtttcatgttgtacctgatgttgtacaagtagggtaaagcttgtaacttgtaagttatggtgaatttatgattggcagattgtacaattgtattagcaataaaataaaaggtagataaaggctggaagaatacccagcgatcttacagtggtcggaaacgaaaagcaaaggggacatctcgcacgggatggtcgattgttctaactgaatagataagcacttaagcagggcctttcttttatgacaaccgaaatataggtgaaatggaaactatgggtagaacatgttctgctgattgtttggtcatcctatactcattatcttggtgtctatattatgtacatgcacacaagtgggcgctagtaccactgttttgagctttgtagatttatacctgtcctaatcagagtatactgtatttataaaacaactgccttttttttttccataaaagttcagtaaaatgcgttctctttataacgactgcgtcgaaacagcgcagtaagcagttcagtaccaacggcagcgaaagcatccacagcgtcgctatccatttcctcgtgacggccagagcgattgacacggctgctaccagtctgactctctcgagcccgacacgatctttgcaccgggtgactcgggaaagggggaggcgagcggcagcagcacaggcagga

SEQ ID NO: 5032 - DNA, 2000 bp, Oryza sativa
gctgccgggctaggtccccggcgaggcaagggtgacctccagggagaggcgacaggtcagacgagagcgaggagagagattgrgcgttgaggcgactcaggcgagaaaatcgaaactaccgctttgatatcacgtgaggcttcgatgggaagcgacgccgcatcagccacgcctgtgcgctaggcgttttagtgtctcccactgcgtaatttttggttttggggcttttttccggttgggtctttcaaatttgggccggacgagaggagaggggttccctgtgttgggctagggtggtgcctccatgatgtagatatgagggtaacaaggtattttaaatattgggccgggttcctgggcaccccctggttcattgggctctgcccctgagcgaactggtcgcgcgcccacgctcccgcgcgaccagtcgctcattaggagcgccctgcacccatcagcccttcgctcggttttaccgagaaccgagccgaagtggtttggcttgttttggtcggtttgtttgttaggtaggtacaataacacactataagccagctataaacacatatcgagtagatgaaataaaacagataagcagcgggatacaaatttgtagccagctgcagcacgggctataagacataatgtgtgaatgataggtgggaccggatattaatagtgtagtacatatttataggtaactattgtatgaattagctactaaattggctataaacgatttggaactagtaattgactatactactaaacttgctcttatatttgaaaatttcggttcgcaactaccaaaaaggagaccatgactacgaggagagtgcgcgctcgattgtcataacaagtgacctcactctccaaagtctagattgactcatgtttttacccytagaacggatttacttctaatatcgtgacaacttaattccatttgtgctaaattacttttatgacttatgtaaattacttttatgttttattgaattttctttcataaatgtctaaaaagtaattttaaaatgcatacatattttttattagaatataatcatttgagatcttgttataaagattttgttgcaatgaatacaacagtccaaccagataggaaatcggataagtattttaacagaaaattctataagaagtaaaaaagacatgtatgacctgatagcaaattatagatgtatagtactagttctctcacatatgatcggtgttactcgataggaaaaaaaaacgagagcgctatcgatttagattttacgtatcgaaaaccgacctttttcaaacaaaaaacaccgaactaagaaaactataaaaaccgaacgcccactggtactacttkgccatagattctttttattcctaattggacatatgactatttttgttcaaactatatttctctcatgctgcataagaacattggtgaacatacactccttttctcctttttctttttattttcttctcataatgtttgagaatattttatatttctttttttatatcacagccatctcttttactaaatattaggagagacattttgactgacgtgaatggtgtatttagttgtggatataatgtagagacaaaacattaaccgtaagtacgaacacacgtaccaacatcaaacttttatttgaacaataaaacacaaactttcttcctaagatgacgaaacattcaatggtgtgtggacggctgcacgcagcacgcggatgatacagaccatgcagagaatgatcctaccaagaaaaatgagagacgagaaaaacgtcgcggaaaaagattaaaaaaaaagagaagaatactttaatattattcgtggctctcctcggcattgcgagcgcccatggattggacacgcgtctctctcgcctccttcccaatcccaccaccaccamtgcctcttcctcttctccgggagtcccaaactgcagcagcgcgcggcacaggagagcgaggaggaggaggag

SEQ ID NO: 5033 - DNA, 2000 bp, Oryza sativa
agttggattgactggaggaaacgacaacgcttcgtcgttctgaggacgcgcatgctggatctggggcgccgggccgcaattgatkaccgttaaaaccgaagccaaggccgtttttggttggcgagtttatcggagacgacgacgatgaggcctcaccattccggccgatgagcgtgttgggacggccccgctgcggaggaggtgaggggatcggaggctctgagaggcgagtttaccggagataacgacgaggccgtcccattccggcggatgcgcctgccggagcgacgccgcggcggctgggacggagagatcgccgggggaagaagaagaagagagaggaggagtggcattaactgacaccgttggatcaaaacctcatggctgcgatcgcgtaagcacagggtgacttttgcaaaagagccctcagtttgttgttagtattttctttagagtccttgctcgacatggatcgctgcgacgctgcgcatcgttagcgaccgtacgggcctgtacggaaaccgtcggatccgaatcaagcggtcaggaactcaggatcaccgcggccgagtggaaactgtccgtagatcgctatcctgatggctcgtagtcgtacatacaccgttggattcgaatctcgcggccagggtggtgcggctctacgtcagccgcgccgtctccttcgccggaaatccagagccgcgtagctccgacaccattgccacttcgctcgagagctgaaagctggcacatctagtcgtcggctgatcactcctggtggcaacaaccaaaagaagtgatcgataattttattcttggctgctgatgaattcagtaaatcggcctggccggcatggtagatcgatgccgtgccatggcggagtcgatgtgcagttacactgaataaaaccagtgtgcagttgtgcatttggtctgcttagagcaggtgcaatagcaggctataagccagctataaacacatttcgaaaaaataaaaaaagagagagaatgacagcggggctacagatttataaccagttgcagcacagacttcaaggtgtatgtgtgtatgatagatgagaccaaatattaattatgtagtatatatttataggtaactattgtatgagttggctattaagttgattatagatgatttcaagccaacagttggctataggacacaacatttttctttttcttttttgaaaatgacacattttcctaagaacatgcacggagttctgcctgtctcaggagataaaggaaaccgaaactcatacagcaggattcacaggagagcaaggaaggtacttcggttctgatgcactggagatcgagtgcagatggtgctgtgaaagctcttgaacagcaggaaggtacagagatgtttggctcagctcaccttgaatatatatgcataatatctgggttgaccttccacaaatatccagatcaatggcacaaacgtgataaaattgattggaaaatcatttgcaacacaagatcacgcagtgtaactggagtggacttcatgtcgatccaagccgacacaattggtagttgacacaatgatcatcaaattctcaaaaaaaaaaaaggccaatgatcatcagcacaccaggcccccagcctttcattttttttctaatcttcccttaaaactacaagcatccaatcttcaactccattaccttaaaaaaaaaactaatcttmaacttttattatattaccaattaaactattacacgcttgagttgcaaccatttctgcagtttcggctccacgacgtgcatggctcaaaccccgccaaaagctcacctcgtcgtcgtcgtcgtcgtatctctcctcctcgctacgtgcgaggcacatcgcgtgcgcccacgatgccacggccgcgcgccaccgtcctccacgtcgtcgatcatggcgaccttataaaactcctccgccgtgcgggcctctccctcaatccagtattccactaccgaggtcgagca

SEQ ID NO: 5034 - DNA, 2000 bp, Oryza sativa
atgccttatttcctgtttaccgttgctttatatgaaagtgtgagattagtcattatgctgggaactagtctaacacgagtatgaattttgagcaatagagatgttgtagagtattagcaatttgagttaagtctcctgggatgtgtaacacatttggttgtcgcattcgggtggtttgatgggcacatctcaggctgaagttgactagcacgctgagtatgaacaatatctctgcttattattcggcattgcagattttatattgaatagtgtcaattcgtaccatagacacattgagatataagtggctatttatgtgtgtatggattccactaatccaaaattatgtggtgcacaaatgacactggacggtataattttcgagtgctatataaacatcatgtgcgcaacgaatggaatacattatagctttatgaatttggacagcggtctgtccagattcgtattagtagaatatgtctaatccgatcataggttacgatagtttatatctttttctttgaaattcctatagaacagataattctatagaaaatttcaatcaaagttagtaagagcactaacttcttgaaacttttctttcaatatatctcttatccgattcgtatggttttttttttctatggtctaatttctatatttttttcctgtatgttatagtcttgtgttttactcagggagcgatacatccgatgcaagacaaaaaaaaatcagatgctcttcacgatggggtgcatgttgcyctgattgtactttgacacttcttttttaccatgtgcatccaccgttgactaaagtagtactatatattttctctctcatgcatgtatataacaaccttcttgtaaaactttaaaccattttttctcctaatttatttatccaatctacgattcaattataccattatattcgttgtaattaaatctctataataggatctcacatgactatattttgataaagagtaattacatttctaattaaaacattttttttatcatgcatgaaacattaagttggaacaagtgaaccattacaaaatacttgctaaaacattgtagaacactgtacaacaactacaaatcaattagtgagatatcagaaaatatttattaaaacaccatgtataactaaaaaaatccaaaatcttaaaaatgtacaatatagttagtagaattccaactgaaacattcgcttcttccatgtgaaacattttatttattattatacatgaaacatcagtcattaactaccgaaacatgaaaagagaaagattgaaaatgtacaacatagtagaattccaattgaaacattcgcttcttgcatgtgaaacattttatttgttatacatgaaacatcaagtcattaactacttaaacataaaaagaaaaaagaaaaaaaaagaaaagactgtgtgcaatatttgaaaatgaacttctaaaacatcagataaacttattgaaacatctaaactacacaaccgcgacattagaacggatccattgaaaaaaacttagtatgtgcaatatagtcgaatattagttgaaacatttgcttctcactcgtgaaacatggaatcttatgtttcagtcattaaaacatagccacataagatctcgttgtaaagatttaatcataacgaatataaagatataactagatcttaaattggatagatagttttgaaggaaaaatattttaaagatcatatccagttttgtatatccttgcatataagtgcatgcatatatgtattgagctgaaactaattatgaagtaaattggcgtccgatatttcggctgtgctcggatggtcgatacccagcatttccggttttactcttatatgtctatcgaaatatttcatattgtctgttttttaaatcccaacatgctaatcgttcaattaaaataatcgattataccctaattttggctattaacaggagctagcgagagagacgggggcggattcc

SEQ ID NO: 5035 - DNA, 2000 bp, Oryza sativa
atggccatctcggatatgcttcaattcgatgttaattacacaagcaaatctagattagccaacaaagtgtggcttaattaacttgcctgtacacaccctgctcagtttttgtaatgtgaaccaggaccccatcagtgaggaatattattccttcaattatccctatactacagtctacagckataataactagctatcactattacccgactttgttgtacttacgtgttcgcattcagacgcattttttttcttttaatcagccagcataataatatatcaattttattaattagagccgaaaaacgttttaaaaaagacacaaatattagggaatgacctaatatcaaataattagaaggggtgagacttcgattccaagccgtctagcccactaccttgtggagctagccggaaaactcctgggcatttctcgcccaaaaacgtttataaccccaatggtgaaaaaggagctatatattccattcagacgctactgaaaatgaagtgtgcagttgtgatggacaagattatttttgcaaacgacagcatgtttcgacacatctgaggcgttcaatttcttgtctggtgccggtcagcagttgcaggttaggttgagattttcaggaagcagacaaggcgctggcccacgttgtgttcatctatgagctcacaagttagccgccatttggaacgagggtgcatgcattttttttaattttatttttgttagttttgaaagaacaggtgcacgaataatataattcattggccgatcctaatcatgtgacaacttggggaaaaacaaataattgcactcaattgaaacttggtgtgtaagactttctagtactagttcatttttttcctttgaggttaagcattatatcccattcatatctttcttatttttttctgcaagctgctctatgatcgatcatatggactgggtacatgtttgcatctagcccaactgggttggagttatatactaccttcatatcaaaatatagcaatttttagttatgaagtgtccagattcatagctaaaaattgctatattttgggatggaggtagtactttgcattttcgtccatcgattttagagtacacatacatacgcatttagtacgtgtatgcgttttaggatgagccgatgaggcctttgcatagtagatctctgtcaattttcaaacattgtgttgatttgtaaatgatgaatcgtgttctcgtagttggaagtatttagcatgtttggttacattagttctgttgattttatgaattatggatgaatatacatgttaatttttcatgacaatgctttaaaactccttttcaactccacaatatttaattcattttcccaactcacctccctcgttttccgcgcgcacacttttcaaactactaaacggtgcgttttttgcaaaaatattctatgtaaaagttgctttaaaaaatcatattaatccatttttcaaatttattttagctaatacttgattaattatgagataaacgctgctttgttttgcgtgggagtgtcctcactcccgaacacaccctaaaccaggcctaggttggatttcaacggggaaaagggcgagcaaaaacagatggtgatcgaggctactactcaaactattccacgacgcgcattgcacggacgtactcttcccagcaaagacttggtgatggtgatcgatgccgccattcctctgccgtacttcgatcgcttgcttaacgcgaattaagctaccaataatcgaagcttccacccaacctttttttttccaacgacgaccttgatcttggaacttttggctgatgaccagtccgtcaaacatcccggccagcttaattagctgccgatgttgacgggcaccgtggcgagagagacttaagcagcaacggccattgtttgtacgcgcttgcgttcgatcggcagtgcaagagccaccaagatcgatagctccatcgccggcgagcgacggag

SEQ ID NO: 5036 - DNA, 2000 bp, Oryza sativa
acttgtaaaaggctaaaggtcactagatgaataatcttgttaattctaagtgctgatgtatgagaaggttgctattcagacatatatctattcaacaaaaagatagaacgagacataatgattgcaaataaagatatgaaaatcaagcaatgataagggttagaattctttcagtgcatgatgttggcaacatctgggaattatttggaatccaaacttggaatactttcagatgattagtatcgcaagatctcgttttggcaggaaaggctttttggaaatcatcttcattgctttatggcatatttgtaagcaatgaaataggaaaatattttagaatgttactccggagggggacgaaagaaccgagggaatttggggagatgaaaggtccgaggctgctggaaggttggggaatttttcggcaaacggacttgaaatagatcccaaaacccatttaaataggcgtactacctggcggttcgtattccaaggaaggagagacattgccgccgaaaaaccctaaggcccgttaagggtggttgttcagacttcaattcaaattcatatttgagccgttggacttcccttagcgttgtcaatagcttctcgtcttcttggctccgcaccaagaacaatcaagtaagaatgacaagccgctagcgagagaagtcgtggatgacaacatgaattcatttgagttgaagtcgggggctattgtcaggggttacggataaaggcataccttctatcctacaatttatggaatatatcgataagggtataccttcatgtacacgaatcgttctcgtgaatattgtttggaatccatcgcaaattatagaaaatatctctacgagtcaagtgatttccaaagtcctactcggaagggatggagtttctgttataccataccagatccaatatcctcaaacctttcttggggatcaaggcgatctacggtataaaagggacccccaggaaggggtgaaaggcatccaattctatcgccaacacacccaccatagtttacgaagccggagtacgtggagccaactcaccgagagatctcatcgaatccatcgattacgatctcgtcagtaccatatatttcgactactctctttataatctattcttatcaccatcaattccatataaactggactagagctattacctgacaaggggcctgaacctgtataatctttgtcttttgtttgcttgatatcgtactacgtggaccctcattccaacgtaccctaatactctactcatccggtctacgagtatcactcatcgacaggttagaaataaatgaaattctttatttcaatgatgaatgataaagtagagagtaaatttataaatatagtactccctccatttcatattacaagtcgttttgacttttttttctaataaaatttcttttatgtttgataaagtttatagaaaaaaatatagtagcatttttaacacaaaacgaacatattatcaaaatatatttaatgctagatttaatgaatgtaatttcgtgtttaaaatgttgctagttttttctataaatttagccaaacttaacaaaatttgactagaaaaaaaatcaaagcgacttataatatgaaacagaagagtggatatcttatacatactaactacatgaatgaatgtcacgctttggtaaaattaactttacaaagctattttagtcttgttttgcatgaactagataagttcgtgcataaatagcatttcagaagttcatctacaaattacacccaactaacgcacatcatttgtataccaccaatataattttctccttttattttaggaaaattttaagctcagaatcgggagtaatagatgatcgtgaaggggatcaactattgcacattaactgccgcctctaacatttaatcccggagtaccgactgctagttactcctataattgttactacgtactctactttggtatcaatcgtatcgcttgcc

SEQ ID NO: 5037 - DNA, 2000 bp, Oryza sativa
gaaattctattccatctcctatactccctccttcccaaattgatcatcatataagtttatgtaccaagaccaagaaccatttaaatcacatcaatcaagacaccatgcacacaatctctcacaatgcatgcatcaattaaaaccctatgccaattacaccgtagcatgcacacattctcgcatattatattaattgtattccgatgaaattcgtgtccatgcagttatatgattatcaatttgagaaattttaaattctattacatgatgatcaatttgggaaggagggagtagtaaagttgctttcggaaaatgatattaatatatttttaaattttttagggtaatacttaattaatcatgtgctaataagtcaactttgttttacatgtgtggaagactggccatttctctttcctttttgggcccattgattttggtcccccatagtgcaccgtatgttcgagtactatacgaggtagtcttttatctacttaggtggatgtccacatgattcgtgtgtacacatgtactcccccaatgaattcgatcggtacctaggatctcaggaccacattccaaatcttatgatccatccaacggcccgtaggttgggtggacgtttacatggatagataaaaaccgtgtccagtactatacgacgctagctgcttctgcatgtgccacgccaccggtgcaaagtatgtgactagctacacgcacgcggcgtgtgcctttgccgcatgtagcttgatcgatccggcaatgacggtggtggcgaagtcatctctgcggcaccgtggcacgccggcaccgtgtggcacgtggcgctcgtatgcgaagcaacgtcacttaggatactagagtggtcatgataacttaggaccgaaatgacacgctttaataaatttgtagatctgaaaatgtattttcagagttcaaaaatatatattagggatgaagatggttggaaaaaccctataccattttctttttcatatttttttctcgaaaacagaatcagaacggtagatccgaaaacggtaacgatatcagtaatatcggtatatcggaaacggaacaattcagaacggaatataccgatattggttggaagtcgaaaattatatcggaattagcagagtgtggcatagcacacatttaactatgcacgaagatgactttttaactttattgttgcatcatcgctctgcacgtgacaccgttatatgatgattaatgatacgataataagtttgacgaacaatataaacaaaattcgacaatactttaacatcgataaattgaggagaccaaaattcacgaaatcaacataccacgtcatagggttaacaacattttccctggtcacttccccttttttatgggctgcaagcctattaggcttccgtcattcataggcatccgatggattgggctaactgagccaccgaggaactttcggaatttttttagaattttgacggaaattaccatacaaatacggttaccgacaaaacattcggaaaaacctccatcccatttccggaagatattaccgtttctatttccaccaccgtcgattatcgttactgactaaaacggtcggtgcaaaccggaaacagtagctggaaatctcaacaaacaaagttaaggaccgacgacacactttactggtgatagaataaacacatgcatgttggaaaatagaagtgttgaagaaaacgatactctcgtcgtgcccccgcgatgcgtgcgtggagtgaggagaagacaatgattttttttcgtttttaatactatagtagataataatgggagaaaccaagaaacgtactcgctcgctagctacgcctacgcgcgcgccgcggcktgggcgcgcgtgtgcggttgccgcgtgcgttgctcgctcgacgcatggctcgatcgcttcgtcgctcgatcgatccgtcaatggcggtggtggcggcggcggcggccacsggttccaccaccagatc

SEQ ID NO: 5038 - DNA, 2000 bp, Oryza sativa
ttcatagatagtacagcccatatgatgtggcctgcacctgtaattccatgactagacaatcctgggcaaaatcttttaaaaagggaataagtccacattgactcccttaaaagtgacccgaatctaatacatgaccctcaaccgcaaaactgaataggacgactcaccgaactattgaaaccaatgcaatttaactccctatgaagggtcgttttgaccaatatatacacacttgacacccgcccagagaccactccttcacaagaacattggattttcacaagggtgttgtaccaagatcttgggacgtcaatttatattcctatttagttgatttccatcgttgcattgccctggtataaatgatgcatattatatcctagttgattgtagtgtatcatatataaatacacaacgcacccagcataacataattattggtgattagtactccctccattccaaaatataaggcacaaccaccttagacccaaagaccaagaaataattattatcacctctttgtttgaataatcccaactaatactatacatgcacccaatagaattaagcatcttgatttaaaaattaataatctaggtgagagaatttgctattaattgtcatgcatacatgcacgctttatattatgaaacacctttaaaaagtagttgcgccctatattttgaaacggagggagtaaatgcattgtatatttataagtaataattttacatattatttattaatggcatttaacttccttaaattggccttattgttttgatgtttcctttatactattttccattgtcttcccaccttcctgtttaccaataaataattcttgtatgttgatttactaaaaaagctataggaagttgtgaattttaaattatgaatcatatatgctatatgctcaaaatgattatctaaagagaccgcacttatttactatgaatattcacatttgacaactcacatactttttaaagaaatccatccaaatgattaagtagcttaacaaaatagaggattagaaggggaacgattttcactattacgtgagaagagaacggaagaggagagaagagtttggatctgagagaattgaggaaaaatgaacctatcttgctttgcccatctgaaaattcaggacttgaggacaactacggtgggcaccagcactggtgcggcgacacgatggaggaaggcgcgagctgctggtggagttggcggtggattagagcagcagtggtggtagatgacaacgatggcattggtggcgacggcggatttgggcaagcgatagcaccggtggtggaagtggatgacgatggctgatggatttgggcgagaaatagatagcgatggtgctgatggtgaatctaaccgagcgatggagatatcgttagctggggattaattgacgtgcatgtttaggagtagtgaccttctccttttttactgccctatgtttggatgggatactaaatggtcacctttcttgagtatacaaaagttacctcttcatcttctctaaggtaacctctttacttttttagagaattcaggggccagctaatatacttgattttcttccctcgtagagcattcacgggatatagtacactgtatctccttggacacgtggcagtttttggagagggctttgcctaatttctaggacgccacgcgacccaacaggatgcaagatcttagtccctgaattaggtctttaagatttccttgttagaaaagagcctgacaatggtcaattgcaaaacaaagataacaatgcattgaccaggccaaagaccagaaatagacactgctcttctgtacgtcaaatgataaccacagaacacgatagaccacaacaacggtcaaaccatccacgcccgtacgtgcgtagccaaactgcatgcacggccattctcgagtcgaccaccctataaattgagcgtccctgcggttccactccaaccttgcgggccaag

SEQ ID NO: 5039 - DNA, 2000 bp, Oryza sativa
aagtccaattacaaccacgctgggaaaaaaaggtaccaagaacaatttattatcctatggaaaaaaaaaacctcgtgtcgatgttattaaaaacaaaaaacattatttgcctacctaatatttaattttggagagagataaggatgtggatggtataaatatctttgttttagataatggccgtgtttagttcatcgtcaaattcttttttacgtatacggactcacatttaaagtattaaacgtagactaataacaaaactaattacaaattacgcctgtaaactgcgagacgaatcttttaagcataattaatccatcattagtacatttggaatactgtagcacttatagctaatcatgacgtaattaggctaaaaagatttgtctcgtgatttacagtcagattgtgcaattagtttttctttttgtctacatttgatgctccatatatgtgtccaaacatttgacgtgacagaaaagttggaagtttaatgagaaaagttagaatctaaacacagccataaatatcttttctagttcattttttttttgtcacgatcaagctttacaactagccgtatcacagcaaaccattttccatctctttccatccactagtttcaactttcaaatactaaaaaaaacaacacaacgtgaccaatatcctgcctacgtggatcaacccaccctgaccccaatccgacccatccatcccccaatcaacggcctcgatgcacccaccgtccccacggatgaacggccgagaaccctccacgtctcacatccaaatctcactataagaccgctataaccacagaaaaaaatttgaaaatatacttttttttctttcaatttacaaaaatatacttgcacgacatatatttgcgaaaatatacctcgtccgtatattgggttagcgggagcggtacggtaggcacggtcgcgcgtagtggggatgcgggatcgagccggtcccgcacggcggttgcgcggaagcgatgcagcccgtggaacgggtatgcgggagcggcagggatgcgggagcaccttgggagcggcacggtcccgcggaacgggcgtgctggagcggctcggttccacaatttttactgtatcagtactgttttgacactatttggcactgttcaaacagcggtaccgcggatccaatgtgcggaaccggctcatgaacagtgtgaaaacagtgcgaaacagtgcagaacagtgtcaaacagtgctatatgcatgcatgtgcagcttggctgctcggtcacgcgcggccggcctgcgtgaccgcacggccggtccgcgggaccgacgcggtaccgtgcgtccgtgctgcaggaccaccggtcccgcggaatggtagtgcgggaccgcctcggtcccgcgtaaccacactgcgggataggtatatttgtgcaaattttcgtcacataggtatataaatgcaaaataataaaaaaagaagtatattttcaatttttttctataaccacgtatcgagaagaaaagagaagagagaagaaaacgggctacagatttatagctagttgcaacacggactctaagacgttatgtgtatatgagagataggaccggtattaatggtgtagtatatttttgtacttaactattgtatgaatagactattagattagctatagatgatttagagccagcagttagctatactgttaaaacttgctctgacgagaacgcccccgccacacgtgccgaatgacccgccccaacccctaccccgatccggtgggcccggtgcgaccccccctgcacccggtccacgaaacgccctcgcggacccggcgcctcgctgtgagtgggccggcccatgcaccgggtccatggaccacctacccccgcgtgggagaattcctaccgcgaccggtttatatacccgcctcgtgtacccgcttctcccccamtcaacctcttctcctccctatccattaattactcgcttcgtggtcggaatcc

SEQ ID NO: 5040 - DNA, 199 bp, Oryza sativa
  misc_feature (1)...(199): n = A,T,C or G
tnagttcccbaccccccacacgaaggcgccctaaaatatccccaaaccttccaaatctccgccccccaacttcccttccccgacgccgaaatcccccaaattccacccccgcctcctcctcctcctcgcgtcgcgagagaatccgaggcgcgcgagcgagaggaaggagagaaggtgagagcagcggcggagggaggag

SEQ ID NO: 5041 - DNA, 2000 bp, Oryza sativa
tagtgttagatttaacggctaagctttgtgtttgcatttaaccatttgtaaatgtgaaagcaatactatttttgacagaaaaatacaattttgattagtgtatctcgcacggttaacttgattaagatctaaaatactgcaacttcatttgtactaaccattagatgatttagttgctcagtgcctgtttgggacttcatgtgatataataacataatataaccagatcggcttatatattaaccttggagctcaatcactaagtcttcttctgtattatgacatggatatttggaaatgaccaagtgcaattcgatttacatgttctatttatgctatttcttggtgttgctttaaaacaaccatttaagtaatagctatgagaaataaattagtgccacttatttttcatgattttcaatatattttttgctttgttgctgtcaaatctcttagtaaacctgataaagatataaaattagaaatttgactgcagatgccatatatagtggatagctttattaccacactggtgccaagcaaaccaagtcatagtcagccaaacatctttgatatgtttttactcgagtatctgaaataaccaaacattttggagatatgttatcatcattctattgacctctttgcataccttgtttgcatggtatcaatgcaatggaatatgccttcgaggactttgctgaaagatcacctgcaagtacatcaaaaatcaagagatgattctggccgccatgtattatgaccacagtgactcgtgctcatccaatattcttcgtttctcgtatcttaatggaaaccctcacagtagcgttgccaccttatatcgaaggacaagttgtttgaagttggctaccaattggtgccctactttaccaattgtcagatggaagggttgagcgtacattaatctggagatgcttatcgagtttgttgcatgacaagtcaatatattctattgatgtggccaatatttgcacgatatgatttcttggcaagttttagtaacattttaactcattcttccagacaatagtgcaaatcgccgaactctctattttacttgttttgttgtcatggatgaaaggtttgcaagactttgttccagaggtgacgtttcctgtgagccttttacatagcattttctttttttacagaaccgtaattgacaaatttgcctaggttaccattgttcatgtacagcgattgaataggaagctcaccgttgtgttaattgaacaatccagtatctccagtttatcatgttaaatcatgtaatctctgcaattacatctatgcttagtaatacatatttcttcatacatacgctggcaatgttgaaactttataaactaacccagttagtgcaatatttgactgatggcattgaccataagctataaagtctgcccatctgtgaatgtatccacatttgcccttcatctacttcatgtttttctctggttattaaccatgttttgattacatatgaggatcaagccatcgttaactcataaataaattacaaattaatcggttagttagtacagtacttcatttgttttagattataattgtttcagattataagtcgttttgactttggtcaaagttaaactattttaagtttaactaagtttgtaaacaaacatagtactcattaaattatttatatttttataatatatttgttttgggttgaaaattttactttttttttttacaaacttgatcaaacttggatcagttttactttgatcaaagataaaacgaccaagggagcataagctagcctgataaaacacgagctggaattcaatggttgagctgcaagcccggcaccgaaatagttgagctccatttgggctcccctttttgggccgcttctgtcgtggtcgccgcgcgtctcctgcctcctcgacgtcgcccgctgcgcgcgcgctcgctccgtcgtcgccacggccgcccggaacggcggcgar

SEQ ID NO: 5042 - DNA, 1640 bp, Oryza sativa
  misc_feature (1)...(1640): n = A,T,C or G
tagccgccgctttccntgcccgttgccggtttcgcmgcmggcgggytcmagcggcggcaagttggggaaagggagggagagaaggcgcaggcggytagggtttttsgcccccgagccgcccracgcgagagcracgcgggggraggcctaaaaaaacacatgaattgaagcagcaacattkgtcaaaccctacataaatgtaaargacrggaaagwtgaagatgagctctttgatrgcatcacakggaacaaacaaggcaaaatgaaagttaattttcakgtaaaatkgagtcatrggaatgcaaccatatgaataaattttccatcatctcctatgaatcaacggttgcatctaagggtacaagtgggtcgacccgtgaacccacttatagcacaaataactgtgtaacctattataagtaggtttacggaccgactcacttatacacccttagttgcatttgaaaaactcctttaaaaaattgaatcctttgaaaatttctgtggcaatccccaactttaaggtgaccttcaatatacgagaatccaagcattttcggccaatcaaggttgtgtttagttcctgaaattggagagaagtttggggaaagttggtagtttggaaaagaagttgagagtttatgtgagtagaaaagttttgtatgtgatgtgatgtgatggaaagttgggagtttgggggaaagtttggtgtaaactaaacaggggcccaagtggttaggaggggtgtactgaactgagaactgtcccaccatcattgtcgccagaatgaaaccacactgctgtacccatactgatgctggtcaaaagaggagctcaagtgctgagctgctgaagagcatgctgcacacgcacgcacggcactggaatgttggatcatcgcccaataatcatcaaaagcgacggcatggacgggaacgattcggtatgggagccacgactgcacaaccagcacaaaaacaaaaacagaaaaagtgacccaatttcttccactaagtactcaactcttcttcaacgtgtcattgctcacgcatttctcagcacttgcacaaaccagtattaacctaagctgcccacatttgcattaaattgaatgtataaccacccccagcttcagaactgacagttcttaagggaaaaaaaaacagtttcttgtctgttcttcagtaatcatccttttgtcattcagaatttccccatttttcttgttagaaaacatgagccatcctagctatctactagaagatttgctctaacaactccagaaaaacaatgttgtgactttgttagtctcttcaagggacaagggtttatgggtgggtgaacaggtgagcagccaggttgatctccacttctttaataccctctactccttcctcccccctgaatctctctgattctttcttgctgacaaacacaatccatcaaagaaaaaacaaacatttcatcagagagagagaatctactagcctactactatacaaagttggggggaaagggagagatttttgttcatagtttgggaacaaagtttagttcttttcttgggggagtctccaggcgaatgttgcagcggccaaggtaggaatgaagaggaggatgagaggaggaggaggtgcagc

SEQ ID NO: 5043 - DNA, 1023 bp, Oryza sativa
gctttcagtcaccacccggccacccccagcgtttctgagagcaaggagtagtaagtacagctagcgtccttacttatagtctatctatyagsctcacttggtatagtgggttaacttttcactataaatatatggtccatatgtctgtctcacagattttttttgttactgtgcctaagccggctgtaaacttacagcccgcttctcttctctctcctcttttctctcatccacctcagcattcagccttcttagggcacccacaatggttatctataggctctctacaagatatccatgttagcatattttcttacttggaagagattaaatgaagggagagagcaaagctatctactaacctgtagatagtctatagagaaaaacgaggcaatggattagagagctatagatacccaagtagacatactattaaagtggtttactattaatctagtctattgctgagatgtacatgttttataggtagcaccttactttaccattgcgggtgctcttatagcccactattatacttgctccgataaagatcgtgggcgctgctcgccaaaggggaaagatacgtgatgattaacataattattagcggccatcagtagagctggcccatgctggcttgctgcactgcactgcagctgcatctgcacacacatctgcatctgcatatacacacagctccaatctctcccatgctatgcctcgttgttttttgttggttttttttttaatcctgcccttatgattcgatctcgtctgcctgctcccttttgccgggtcactcacgtgcgctcgtcaaaccgttgtctcatgggtcaaagcccgagcccccactcgtccactcccttctcctagcttaggtttgctgctgctactactactacccggcccccattaatcacacacacccacacagccaagaggtagctgagctgagctccattgataagagtataaagcttgggttggcaagtgaaagctgtggttctgtggccggtgtgatcg

SEQ ID NO: 5044 - DNA, 2000 bp, Oryza sativa
ggttccattaatagccaattgcaaggtaattatcattagtctagatgagctgcataactagcctacgaccaggcctggacatgcatgatcgatgcatggcacaacgttgcaaatatgagtagtatttggtatttcaggttataaaatatttttgattttggtcaaagtcaaactgctttaagtttaacaagtttgtagaatagtaacatttacaaccgaagacaaatttattatgaaaatatattcaattactgatttgatgaaactaatttagtattataaatattattaatttgtttataaacttagtcaaacttaaaacagtttgactttgaccaaagtcaaaatgtcttacaacttgaaacagggggatattattttcaggggtgggggtggggggaggaagaagggattgccgcatgtggggtctaacaccatgttgtccattttgttttcatgtatgtgccacttcagaccgaaaccgccatgtacttattaagagttaagatatgagagtagttcatacggtttcaaaaattcacaagtgttaaatgtctggtgttaatgtagtagttgaggagtaaatcatgcttttttaggatcacaattaactgtacatgtacaatcttccctactactgcaaatgttctatatatcctccctccgtttctaaatatttgatgctttcaaaattttaaaatatgtttgaccgttcgtcttattcaaaaaattaagtaattattaattcttctcatatcatttgatttaagtaattattaattcttctcctatcatttgatttaagtaattattaattcttctcctatcatttcattcattgttaaatatacttatatgtatacatatagttttatatatttcacaaaagtttttgaataagacgaacgatcaaacatgtgctaaaaagtaaatggtgtcaaatatttagaaacggagggagtatatatgaccgcaaaaatgtatatgtgtgtttgtattatttgtaagatttttttaaaaaaataactactgcatagagtatatgcatatacatggtgaatggttagatatgtaagtggtaagttcaataattacatcctcaaaatattttatgtttttactgtaagatttggttaaaaattatccttaaccgtcaataaattatcaaatgtctaatttaaaaataaacaagataaacttgtgttaaatttgtataatagtaatatacaaatttgttagttggaattaattataaatttttgacagaatcttgtgttagacgttaaatatttataaaccagccaaatgaggtaatagcgaataattatatctaaggcatatatgagatatttagttgagtccattacaaagaatttaaggaacatagtgagaaaaagtaaaaacggtactatatatataatattgtgttwatatttgggacggagggagcaagtagctagcctcttaaataagtatcatcctagtgggggagtaccatctatctatcgatcttcttccacacgcgcgtacgtgtgtgttggtcgtctcaaggttagttattgaaacgtatgtcctaatattactaatttgtttcatccccgttgtatatgctatatatgtttttcttatcttatgtagtatatgtaattaaaataaataggagaagaattaagctggttaattattttttctggctggtatatgcataatagtaatatatagaagagattgtgttgcagggtatatatagcaaattaataatagatagatcgatcgatcgagtggagacgatgttgccgagaagccgaacgctcccgccaaggattcatgatggcgtcgtggtggtaagcaagcacagatgttgcagtgttggtaatggagcatattgatagatgctagctgcatgcgcgcgcgcgcggggtgatcgatatatgatatgatggatgctgcaggtagaacgcgatgtgaggaggtaccagcagctgccgcagcaggtggag

SEQ ID NO: 5045 - DNA, 2000 bp, Oryza sativa
attgtacaattctactactctagcataccagcaaccttmaactctagtgaatggaagaaaaacaacaattctatcacacctgtaacattattctctagtgcaattcattctaaaagaggcacaaagtgcaattcactctacccaaawttckgtcaamccyttaatrgctcaagttaargggcwtctaacaaagggttccaaaacaagctgaatgtaaatattacagtcacaacacggcaagatcgaaatcaactactagatgaatgcacctcgaaatatcagatcaagttaactcacgtctacgcagagccaggaggcttactccaaatcgccagcagctgcggccatggccaacgcgagctcgcggtcgtcgatggtacactgtgaaggaaggggagcccatgcgcttcgcatcaatcaggagacgcattgcaactacgaaccagaaaataataattagaaaaattatgtgccgttgcgatttctattcacccccaaattctcagcggaagaagagcaccactactcgccgagggaactaaggcgaggggacgagaacgatgaaccttgaaggccggcgcttcgccgcggatgatacggcagaacacacagctcttcccttcccgtcccggcgatggaggcggcggcgcaaggggaggtcaagacccccgcgctttgctccgcgcacatgatgtcctggtcaccttcgctggaaggggcgccgaggtggagatgggagcggagcacggcgaggcgccgcgatagcgacatttgtgtgggagacaaggtggggatgaaagcgtggtctatggacagggctcgcgtgccttcacgcctcttcccctctgcatcagtcacctccacctccacctgcaatcccaccgacggttggagaggagcgccccaaagcggagacagaggggtcggccgccgcgagctcgcggtcatgggcaccgaggtcgcggtcgtcgacacacgctccgaaggacggggatcccgtgcgccaccgcctctccgcctgaaatggattgacggaggtgcgacggcggagacggccgccgcgagctcgcggtgctgggcgccgagctccgatggtggacaatcccgtgtgcctccggttctccccctctgccaactttctcgaagacctccacaaacacctagggtatgtttggctaatgggttagggagatgatttcccatccactaaaagacatctttaaattccaaccattcattcttcccacctcatttcatcttagctcttcattcattttcattttccaatcccacatctcataacccattatccaaacacgaacagacatagaacggatcgggagtagagaagacgcttttgccctttaccgattttttttaatgaaaatcaattaacattttaattttccaccttccatacctagcccacccttttgatatcttcttcctagtaacttctctctttgtgcgttagatcattattgatcaaggatcctaattaattccaagcatagaagttctcatattttggacccatgatagattgatttagaacatgcggagcttattacatacctttcataattttcactttcatattcacatgcatgaaacttaaaaaaaaactcacaaaattattagtctcatataattggatttataattaatcaccaataccaaacttaaactttcaattatttgtgacgaccaattcaatttgtttattgtggagatacccatattacactgaactgtacgttatcatagtataacaaatcctaggtagagaagacagatccatcagacgtacaccatcctctggaaatattttatagtatagtaataatcgtatctggccagccagtggccaaaataatataatcttcaccgtcatcgatccattaatctaagacctaaaggagaggtcaaatcataaatcctcggtagcaggtagcttgagttagtaggagacacgggaagctagcaagtagcaagcggag

SEQ ID NO: 5046 - DNA, 526 bp, Oryza sativa
gacatcatggtgacatttagaacataaaatagattttacaaaaagtccaatttgaatttagatggtactccattagttacaaaatagtataagaatttttcatcacatccaaccaaaatcctttatattttgggacgggtagaaggagtgtaaagcatttctggaaggagggagtataagcatttctagaaattacaactggagtataaacatttcatgaaacttcgagtactactccctctatcctataatataaaggattttgaaacgatgtgatatattataatactataatgtgttatatttatctaaaattctttatattatggaacggaggcaagagggagtaccatctaggagtacaggtcatatcgggtaaattgcatctgcaagggctggatggccggagacccgatagcccattccccatttcccttatccggaaacagcctttgctttccccctccctaaaaccccccgcagcggcgcagcgccacctctcctcctcagccgaagcgtcggggcc

SEQ ID NO: 5047 - DNA, 2000 bp, Oryza sativa
cttcgtcaggatgatgaaagatggttttgtgcctgatgaggtgacacttgcaagcgtcatgagcgcatgtgcaggccttgctgcgggtagagaaggccgccaggtccatacccgcatggtgaagtctgataggtttagggaggacatggtgttgaacaatgctctcgtggacatgtatgccaagtgtgggaggacttgggaggcgaagtgtgtatttgatcgcatggctatcaggagtgttgtctcagaaacgtcaatgataactgggtatgcaaagtctgcaaatgtgggagatgctcaggccgtgttcttgcagatggtggagaagaatgtcgttgcttggaatgtgctcattgcaacatatgcacataatagtgaggaagaagaagcgcttaggctctttgtcaggctgaaaagagagtcagtttggccaacacattacacgtatggaaatgttctgaatgcgtgtgccaatcttgctaaccttcagcttggtcagcaagctcatgtacatgtcctgaaagaaggcttccgctttgactctggaccagaatctgatgtctttgttgggaactcccttgtggacatgtacctgaagacagggtccatcagtgatggtgcgaargtgttcgagaggatggcagccagagataatgtatcatggaatgcaatgattgttggttacgcacagaatggccgtgcaaaagatgcgcttcttctttttgagagaatgctttgcagcaacgaacgcccagattctgtcaccatgattggggttttatctgcctgtggccattctggattggtcaaggagggtcggagatactttcagtccatgactgaggatcatgggataattccaacccgagatcactacacttgcatgattgatttgcttggtcgtgccggtcatctgaaagaagttgaggagctcatagagaacatgccaatggaacctgatgctgtgctctgggcttctctattaggtgcttgcaggctgcataagaacattgacatgggggaatgggcagccgggaaattatttgagcttgatcctgataactctggaccctatgttcttctctcaaatatgtacgctgagcttgggaaatgggcagatgtttttagagtgaggagatccatgaagcacagaggcgttagcaagcaacctggctgtagttggattgagataggcaggaaagtaaatgtgtttctcgcgagagataatatccatccatgcaggaatgagatacatgataccttgagaatcattcagatgcagatgagcaggatgagtatagatgctgaaattgcagatgacctgatgaacttctcctctgaagcatgtggctagagctcgaatgtagtacattttgcaatttaaaatcatggaacatgtagaattcagagaggggaaatctgcaagcagagaatatctattgtcaatgttattgggtgccacagtttgcttgggtgaaagcatgacagacatttatgatccagactatgattctaaaactgaaattcttctgacaagtattgggaacttgaaaatgggaatgccatgatggatatgagttgcttccttgaactcactatataaaggtgaaatgctacttgcagacaaagcaatatataccatgcaatctgatagccaaattctggtactgaaatttctgtacagaaagtcatctgctttcagctattgttggttatacagtaagcaatagtacatgtttgcagatgatgtttactacctgaaaaataagaaagatgatggaaaagatacttaattagtgtcttctataagcaaaggtcaggaacatggagtcaaagaaaagctagaaattagcaaagaagctcccattgacttcctcgagatctctgctagtgcatcatcactcaactcccctgatctatatggttatattagcttgagtaaagttggcctccccttcctagtggagatcctgggaaacttgttagttacagattaagca

SEQ ID NO: 5048 - DNA, 2000 bp, Oryza sativa
ggatcccgagacgcgacgaattgggtcgagattgtgcccggcgcatcggacggcgcgggaagtkggggctcctcgaggcgggcgcgcgcgtcaaacagaacaagaggcgccggcatctcgtgcccgcgtggcctcttcctccctccgcctcccgccgcaccactacttgccccccatatccatccataataaaagtacgcacctcgcgtccgcggccgcgcggctatatatcagtaccgcgcctacgcactcctctcctctctctcctgtgtgctagcggaggcggagcactacacggttaattctgcggttgctgctgctacctgcgaccttctagcaggtgcgtttcctcctcgctttgcctatatatatatccacttacatttctcggcttgatccatggattagtctgtcgatctcttccatgccatcgatctcgctggttaagattgcgctctagtgcttagcttgttgcagagccttgactttctttctctgctaagaactgaataacttgactctgagtaagagcttgcatatatagctcttagtatattcttcagattttgtcattgatgttatgcgacttgtgcatttctttgactgatatcatgtagtaatcactaaacttcatgcctgactctaggttgtgagttgtgagacagcgagagttagtcggtgtagtttcatcaggaagggccgcttagacagtgagaactgagaactgagaaatacagcagtaggaaataaatacccgttctactctggtgtcagtcctagatataatttaccactgtgtttcatgcatgatccgattcttagttttctcgacaagaggtggtaaccacatgtaaatattgttgtttagcatagctcttgtgatcaaagaggatggaaaattcctggtagggtcagtaagggaaggaatcagcattgcgttcccattgttcatatatctgacaaatgataatgatgtcttggtgtccattgctactggacaaaatagtacaggttagctgagtcagaagggttcatgcagaaagtgtagaacttattgcagataaaaccctttgcaaatcatgtacagcagtagagcttcatactgtcaccggcttactgcgcagtccccaacgtttgatcatgtggtccataaggatcaatcgttcaaactgcatcagaattcagaacctaagcatgaagaaatactacctcgatctaccactagacagccatatatgacattgacaacggcaataaggaccgttgctttagaccaaaatagaatcagcagtgcatccacttcctggatgggttaaatgctgatacgaagtatgaacagacataacctaatcttaattaactgacaggctgaaaaaggtatcgggtatattcaatgaatctggtaaaatatctggctgatttattgcgttagtatcaagtgattagtactatgagatttggtattgctactcaagattctttgtttcttttttcatgaaagaggtcttgagaaaattcgtagtgtaagcatttgttttgctgaagagaacaaccaaaaccataagcccaggcaaaagtgtgttcatttaactcagtaaactagtctttcctgatccgaagtttggagcaaactttaatttttctaatacacttttgttttaaagagagaacaaaaaagctgatatttgctaaaggaacaagtatctaattactcttttattacttggtccccatgattattcagtaactggctttcagtataatgatacaacttttggtcttttcacacttcactttccttcaatcctattcaactatcactgcactgggagctaactacacatagacatagctttcattctttttctgaagtttaaataatgtttacttttctgaaaatttcaacgtattgatatcatcatcaaatccagtatgacatgccccaaactaacgtaagattcatacttttcaggtacacagtgctaacaagtaacaacaca

SEQ ID NO: 5049 - DNA, 2000 bp, Oryza sativa
tgttcattggatgacgtatgctatcacgagtccacaaacactttttggacctagtgccgattgtatgcgtaattgcgtataaagggtgtatatgatattttcacatctaaaatcttaaatcttagggataattgcatatttgcgctcgttttgaagcttatctattaaatgaccctactttcttatagtttgcttatttggctctgcttttcaagaatgaataccctgtctgaccctatttccactacaacgttacggtttcatttttttaaaaaaaatataattattattcgtaatgaccaaactactctcaaaccctatccattccctccccctctctcgtattccggttgaggtggcggcgcacggaggggacgagccggcacggccactcatggagggaggtagcggctgcggcggagggaccggacccgcggcaacgcgtgtgcggaggaggctgcgggtgcagagaaaggagcggcgacgacggcggtggtggcctctctcccacgtgctggtgacctccggcgcggcacagggcaccattccctccctccatgggcgcgtcgtcaccgctcgtcctttgtgcgctggcctgcttcctccgcacacgtgatgccgctgcccaccctccacacatcgacgagctccttcgccacacagggcgctgcttcctcccttcccgcgccccggcctccgtcttcctctgtttgagccccgccgccgggtcggccgcgacgacgacgacgccgtggcaaagaggatgggtggttgacaaatccaaaattttgttatattttatttatatttttataaaatagagtcaaataagcaagggtagaaggggcaatttttgctccgattaaaactgttacatgctcttaatggaatagggtcagattgtatcttcaattttgagaaaaatggtcaaataagcaaagttgaaagaagatagtcaaattggtagttagtcctcaaaacatggtcaaatgcacaattgccccaaaatcttattattgtgtgtgaggcaaaggtcccgattggttggtaactaagagcatcaccaacagattatctataattttctcctaaaaatttggttttgggkttcttaaactaaaaatagaagtgaaaaaactcctccctccaacagatagcctaaattaaatccccaaaacttaaaaagtgggcccttctgttaaactactaacataaattccgtttttttcytttatgtgcagaaagatcgctatctcccacgctcgggaacggaggagagargcgggattgcgagattgggagcgacttccgcgcccgcatataaacggagcaaggaatggggagaagggaactccaaaactcgggtaggagagtaggggatctgttggagttgtttttttttttttttgactaaaatcccycaaaattagttttagaaatcatataggtagattgttggtgatgctctaagggtgggttttgatgggaggttttggatggataggacatgacgacccttttttttattgtttattacctctctcctaaaataaatttatttttcacccatctcacacataccaaaagactaaaatactcatattttttttccaatctcaatacaattatttttcactttatctacttccaatataattattctttgttttcacaaatttcaatgcaataattacttaaaaattaaatttattttaagacaaatgagatgagtwaaaaaacttaatatgaataggaggaaataatttatattccaacctttgcttcaaccatactccagttgtaccaaatttcagatctcactgtccatcgctgcccgaagacaaatcgtgtccacggcggaatcacaaagcccccgatcggacggccgataaatcgccggcgatttgatccgacggctggtaaatgctcaagcgcgactcatctccccccaaccttctcaacccacgaggtgggatctcacggcctcatcggcgggcgag

SEQ ID NO: 5050 - DNA, 2000 bp, Oryza sativa
cacacaaagtaccaattgtaatcaacatgaattttcacaaaatgaagggttcaaatgaaatcaaacaaaaaggaaaaaaatttcaacatcagagaacttgctaggactgcaacctcctcctccatggcgacctcagcgactgcggctatgggcgtctcctcccccttctcgccgacgcctgcgggcctctcctcgctggccctacggcccccgcatcgcaacttgcgacctcctcgccgcgcccggccgcgccgcccctgtggacctcctcgccacgccgctaccttggacctcctcgccgcgcgctgccgcgccgcctctatggacgcggcatagtggcgccaccgcagccgtgagaacgctgaatcggtataggtatggttagggttagaaatattgtttcatctctgtttttctttgactgtgaaaactaggtatattttgcaccaagggcaaaaatggtcattataaaaaaaataacggttgtaacggtgtggggtttacggtgatggtatttttgggaaaatgaagcttgtgcaatgatatttttgggaagttgcatttgtcgatgttatttctagaattagagtgcttgtcgatggcatttcatgaatttctcttttagaaaacgatatcatcactcaaaatccacaaaagcaactccatatcatcttttggattttaggaattaagaatatattttagttacgagaattagcttccaaaatcaagtttatttatttatttttatttttttcttttgattatagggtctagatcgaatcaaaagaaaaacagatagtgcctaattattttcatgtccacgagatgacaatagatttttaggtgttattttaccttctcagtacattttgactggtcaaaacagtcaaccattaagggcttattcggtttgtaggattttcaaaccgtaggaatagggaaaacataggaataatatggaaatacatgtgcaaacctatggattgaaaacatagaaaattttcctatggttgagttgcaaacaatccaaaggattgaaaacattgggttggagtggattatttttttcctttgttttccccctaaaagtggagggataggaatttttcctttgatgcattcctttgaaacgaataatagtatagtgctcattccgaaggattggatattcctatatttttcctgtaaaaatcctttgaaatgaataagccctaacaatgtaaccttgttttttttctgtaagaggtattcatattataacatattattataatattataagtcgtttaactattattttagtcaaattctttaggtttgatcaaatttatatatgaaaataacattatttataacaccaaattttattaaatctaacattgaatatattttgataatatgtttgttttgtattagaaatgttagtatatttttatacaaacttggtaaatttaaagatatttgactaagacttataatatgaaacgaaaagagtaatattattttgttccgtatttataataatccctaaattaataaatggatatgcagcctaataagagcaggtacaatagcaggctataaatcagctgcaaacataagggcagtaggctacagatttgtagccagctgtagcactgactccaagacgcagtgtgtgtatgataggtaggactgtggattaataatgtagtatgtatctattgtatgaatgagctattagattagttatagatgaattaaagccagtagttggctatactattaaacttgctctaataatactactatagtaataataagacacggagagaaattttcaacgaaacgcgaaaaaggcagtattttactagtatatcccggataaatttaagacagcccaaatattcctaaaacggagccgaggacgcgaggcgagagccgtatatccgcttacgtcacctcgctgcttggccttgtttcgccaagccgcccccagacccagacaagtcgcagcc

SEQ ID NO: 5051 - DNA, 2000 bp, Oryza sativa
ttttatcttttgttcctttgtccttgaacaacgctcaatggctctcgtcatcgctgcctctgttgtcacctcaatccaatggtggtgaggtgcccctgccacgccatctcctaacccgtcgctctactttgcccctaacactgacccaccgtatgttatcgaccctacggctttggcggtgccgtcgttgcctcgccacccactcatcccgctgtacatcgtcgggccatcaccttccacaatcatccctctaagccaccttccccttctctctcagccccaacctaaacccaaacctatttgccggagtttaggttgttatcagtgttgtagaaataaatgaggttattggagttgaagaaaaaacacatgaagtacgaatcgcaaatcacaatattagcaatttcgttatatttggttagttcagtcatggcctagcattggaataattttttagtctgatctgaaaacggaaatcctataggccttttctcagtccgatctgaaaacgtaaaacctataggcatctttcgaaacaagtgaaatttttgggacttctgttggaatcgaatcgattgctgtgaaaatgctgaaacaagtgaaatttgtgggacttatgtggaaattgagctctcaatttccgaaatgaactctccagtctcgacagaaggattcaagaaccaaaggctaaaagtactgaaacatcgagataaaaatggcagaatataccggagattagattaaacmaacaagtgtaggactagtataatctcaggttcgttcacaaaacaagaaaagtctttattgctcacttccaacatagctttgaactttttcacagcataaacactgaggaccagatttgacgcttttatttactgcaattgatcacaaaccgaaggctcgaatcgaagctctccaccgtgcatgtcacacccgaagtttcttactagccggtaacctggatggacttgacgtcgggcttcttgggctcctccttgggcacggtgacggtgagcacgccgttctccatggacgccttgatctgctccggcttggtgttctccggcagccggaacctgcggaggaacttgccgctgctggcttcaagcggtgccacttgtccgtcttctcctcctgctccttgctgcgctcgccgctgatctggargacgttgccgtctycamcttcaccttgacctcctccttcttcagccccggcacgtccgccttgaacacgtgcgcctccggcgtctccttccagtcgatgcgcgcgccggcgaaggccgcggtctcggaggaggtgccgcgggggaaggacgggaagatgctgccgctgcttctgctgccggagccgaaggggaagccgtcgaaggggtcccagaggtcgagggagaaggggtcgaacacgttgctgcggcggatcagcgacattgtgtattgtgtcttgctgttttttggttgtctggtttgtgttctagatggaaagagggtgatctcaattctcaagagagcttgttgatctttcgatcgatgagctgatttccttggcacctgtcgctgcgtggtggcaacaatttatatagcagttcgtgatggtccatgggttctactggaagttttgcttccggatagttctcgtttgttcgttaatttgggccgaaattggaagtggtcttctggattgttctaggcctgcttatggcctagattattctggagagtcctggacgctatgggctacagcccaccccgctaccggtggtgtaaacttctagcccaagctatctcgtactaggttctagcccatgcgggggcaaactggaagtttctagaagcttattccaagctccacgatgccctctcgctgccctctataaaaccgcgctccccttcaccggcagaaccacgaagaaaacgcaaagcaaaccaagcaaacatcagagtaagaactcagagaagtccgatcgttccacctccaaattcgcagctattccgacg

SEQ ID NO: 5052 - DNA, 2000 bp, Oryza sativa
  misc_feature (1)...(2000): n = A,T,C or G
gttttcatttccgaatttaccatttccgatttcatttccgagaaaaatatggttacggaaatgattgaggctgttttccgatcgtttccgaccgttttcatccctacacatatcaaaataggatacatttcaacagataattaattttactctctacatttacgctttaatttttttgtaagttaaagttctttaatccaagtttaaaaaaacatagtaacatttgcaatgcaagacaaattactatcataatatatttcatgctatatttaatgaaactaacttgatgttctaaatgctactacattttttataaatttgatcaaatttaaaagaagtttaccaaaatattaaaacattttataatatgaaaacggaggagaaagtacttaaatacttcctcgatattaataatagtttggactataaataatatctaaaataatattaatatttatgttaaaaatacggagaatatatagattagtcttaaactatactttaataaacttatatatttaattaatagagattaaaattgatttttaaaaccgtatcctcatcgaaaccgaccaatattattattaaccggaagctatattatgacttcactatttgtataacctactcacttcatcccataaaaaactgagctaatattagatatgatatattttaatatatattatatcgtgtcctatatttatttgtttttgttagagggagtactgcgacttcactagatggtgggacgtggctgtctcaaacgcaggtcttcctgccgacctgcgcgacggcgtgtgtattatgaaaggaaaaatgagcacgccaagcaagtgagcaaccacttttagaattctttttcttataaaaaaccactttgaagaagcatccagatgctaacctgtctacataccgcctaaataatcctttactttatccagtctgtccattcagctaccatagcttatttgaattcggcaccatactatctctacgtcttaaaataaatacatattagtggttaaaattcgtttaagttcagtttagatacttttctcgatattcgttagcatatattttaaacagttaaatgatatgctttgtgcaaaaagatttaacatagaagttgttttagaaattattttttctcaaaattttaataatttattctcaaataatcataattgtgtttcttgttttgcatgtaactaaccaataatcttcaaactttatttggaacggcccttaggctcttaggctgagaggttgttagatggtacgtaaaagagatgattattagagaataattaattgagtattgttattacaaatttaaatggtttctaacttattttattttaaagaaatggttttacatatagttgagagagctaaattgtcgagtgaaagttgacgtactcaagatcatccatatgcttgataatgaaagttgacttactcaagatcatccatatgcttgataagagagtcgtgatagtctaaaataaaataaaggtaagattacttagtctaaaacgaaaacattaactaaagggtggtctaaagtaaaacattgaaaacaaatatgatccaaactaaaatttactttactaataattaccatgataaccatcytttttatctacttattgtattatatgatgcctttccgtgttattccgcatttttaataatactctcttcgttttaaaatactttagtagaatgttttaactacagtttaaataaaattcttgtcactagaaattattatatttttggacggaggtagtaaccgtgtcatcaaccatattgcgccaaagttngagggggccgagtgcaaaaccacccgacgcgacgcgaggcttccactccgccaccgccaccgccaccgccgcgcctcccctccccgccggcgacggctgccatcccaccggccaccgggagcaggaagccaggaaccccaccgcaccagcagcttacgccgcaaccagccc

SEQ ID NO: 5053 - DNA, 2000 bp, Oryza sativa
  misc_feature (1)...(2000): n = A,T,C or G
atatgtgagattatcgatgacatgcscatacatctcagatgcaacaaatgcacatgtaatgttcctgtggtatttctgaacaccaggtagaaaacatgtatgcttggtaacaactgacactgtccaataatccttccatttccccttatacgcgtgcactctccagggacaaccatctttttccttaacacaccgaacttcatattgcgaccggttcgacttggcaacccaaaactctctatgaagtgacactgcaaaatgttttaccgcctatttcatatcttctgctctactataaatcgctccctgaataacctcattttctttgtactcccatctcacactatcctcttcagagacgatcaacccagaaaaatcctcactagcccattctgctggattaatatccgtctcatcatctgacgaatcaccttcctctacacgctcgttgtcagaatcgtccctctccatttcatccacaatggcaccgacagtctccccctcgtcggccactccacctggttgaatgcccactggagctactacgcccccgtcctctcgtgcgttgacctcctccacagaagtctcgtttacttcagcacttggtccctcgccatcatccatgttcgtctgcacacctggatcctttgggtgaacaaacggaaccaaagctagaggccacccgcgttgcaatgcattttccaaataccatctccacactcgagagttttgaactggcattagttcccaataaaaaccctcagttgcccgacttactataacattgattgttatgtcacttgtctgtggatcaactctgaagcccctcattaaccatccttttatagaaggtacactcctctcagccggtctatcaattcccctttctgatacaataaaatctgacagatctaccccagttggcccgtaacgaacgtttcctggtccatggtaaacttggaatatttgtttgttcgacatatctgtcaacgaaataactagatcatattactctttcatgcaataaacatctacaacgtaatatcttcttgtgtaagccaatgcaacggtaatgtattaattccaaactagcagatctacgtagttaccgatatctacaatacacacttctagattagtacaactaaaaccctaaaaatataatgcatttattcaaacaaatttttaaagaatacacactatttaactcaatagtcacatataggatctatgaatattacctgaaatcggtgtctgaatccggcagggcttcgccccttcttctcttctcctcccctctcttcttttttttttcactggaattgaggagagaagaatgasggctgggggmtgggcagcaggccttttataggcarcgaggcctgccgcccggccagagggcggcaaggggccgcctgcaaaatagccggccccgaatggctttttttgnattcgggccccttgmmrccgggttttcctaaaaaaaaaccctccctctgtcaccgcccgttcctcccccgtttgccacgtcagcttgtcgccctagaggtgggcsgtaggggctatttctgcaattttttggtcgatatattatttctgtaaatattaaaaaaaataatctaaaaccgaaaaaaattctcgtcaaatctatctcggcccaaaattgcgggcacctcacctaccaggacaggaccccggcccacgccacaggtggcggccgccgccgcgcgccgcagccgcctcctcggcttcccacggatcggacgggtcgcagactcgcggcgcacactggcacccgatttgttggtttcttacccctcctacaaggcggccggacgcccacagatcggatcgggtcatcaactcatcatcgccccccttcaaaaggccacccccctccccctcccttctcgcctcattccccacagccgccgcctccttcctctcctcgatctccctattcgtcgtagcctcctccctcgttcgctccgcccgcaacc

SEQ ID NO: 5054 - DNA, 2000 bp, Oryza sativa
tattatattataataattttttgctataaaaatttgcttctggttcgttgaaaaacattcaaatttcattgcgcgtctgtctgatgggatcacgggacgatgaatccacacctgacacaaactatacaagagtttaaattctcttcggttgatttttggtgtcctccaatttaaacggaaaatgaaaaaaattatttcactttagcaccgtttgtgtaaaaaaaataagccaaaaggagaagatatttgaaacaaaagtgtagttaacgttggaaggaaggaagggaacagactcaacacaaagaagatcaaaatgatttaaaacttctatacttcaggtcctaaccccaaacaaatataacactcccttcgtcataaaatatatcaagttttagccattgacacagtgaagaagaagtagggcagaaaaacatccttggaatagatgtgacataagctcgaacagtaataaggcataagcgtaataaagttaaaaaacaatagggatagtatgtgcagtttaatgatatacatcatcttttatagataataaagtgttatatgtgggataaattttacagactctaaaagttgtttaactttgaaacggatggagcacttgaactccaacattgaggatttgatgcttcccaacacataccacatggatcatgtttttggcacacatggattgcacttgaatcgctatgggcccctttgattttggggaaaaacataggaattttagaggatttcaatcctataggaaaatttcctatgaagccttttgaaacaaaggattgaatcctatccaatcctttgaaattcctatggaatggacaatcctatagagattttggaggaaatttagcaagagcttcaacctcttgctaactttcctttgagtctatctctctcatccaattcttgtgtttttcctgtggttcaatcaaacggtcattcctgtgtttttcctgcgttttgttatcctctgttttacacttacattcctatcaaaatcctacgtttttcctattcctacgttttctcaatcctgcgattcaaaggggccttataactgcatttggattcgaccttggggttcagtggatttgcagcttgagtcctttattatgttttcccaagctaacaaaactgcccagatctatgtaagcataaaaataggccggtgcttacttcctgttgtcatcatccttaaagtctatgcgtaggagttgtcaaacgaatgatgttttttttttcatgatagttttatagtgctgttattttttttcatgatattcttttttttaatattataagttgtttgatgttttccttagtcaaatatttttataataattggccaaatttatagaaaaagttagcaacattcacaatacaaacatccctattgttatttgtaaatgaaaaataatttgttaataaaacttttatatacgtgttttaaacgatctaaaacaaaaggctaaaaactaaactaagatgaaaaaacctcaaaataaactccaaatttaaagttaaaaatttaaaatttgaatgataatcataagtataagaaaaagatgaagccacaaactagtttaattaaatttaacattaaatatattttgactatttgtttgttttgtattgaaaatactaatatgattttttacaaacttgatcaaacttaaataagataagtttgactaagaaaaaaaataaaataacttataatatgaaacggaaacggaagaagcaatttttttggacaggtagggattgctttgaaaataaagaatgaacaatcaggccggaggatgataaactagccgaataattccaaatcagaaggtgctaatcgactgattgttcgttccttgtcgaaactcccaacttctcactgaaatctgaatcgtctctttcgctgcgttgcgtcatcagctctgaaactctgaaaccaaaacccacccaccctcgcggtcgccggcgctcga

SEQ ID NO: 5055 - DNA, 2000 bp, Oryza sativa
gcagaagaatgcccgcatcagtattccagaaaagaatgcccgcatccatctaccacctcgttggctgaatccattccatgtgcgcaaatcgcataccgttccgtgcagacgacggttggtcgacgtccgagtcagagactgtcgatcagcaactttataaaattctgaaaagttccagctgcatgcatataatggtccatttggggaaagtggggggcgttgctttggctttgccttgtctcggtctacgtcgccgacgtgttgagatcgacggaaccgagccccccatggttacaactgctgctgctgctacagctggtgatggattttggaccaaaggggtcaaattgttgatcgcgtagcggcggtggcaccaatcgacgtgttgctctgtggtttgtccggcgactccatggaccattttccttggtgatatcatcagtgagttgagtgggtgcttttattcgtttctgttggtgacagctactcgtattctatccttgtgtaaccgcctctctctgttctcttgtgctcttctgttgtgatggggaaattatctagtacatttaagttcatacagattcctcatgaaactattaaaaacttttgtgagctgtaaatgtattctgggcacacaagtttttcgtgcactcagctcttggggttatggccataagcagctcttgattcgttgatactccaagagggcctattgccaaggcatcgattggatcgtccagcaacgtgcacgttgcacatcacaaacaaattgattgctttcagatcgttgcgctaactgtattttactgatcatcatgcggcgcgcttgaatacaagggtcgacactgtgctgccatgatcaaaacactgtgttgtgttgttttcgggggcacaacgtgtgactgaacctgctaaagcaatcgtggtcgccacgtttaatttgcttttgcaggagagatcgaaacgtgaatgggactgcgtgttgcaatttaaagcagccataaaggaaaactcaattaattatctaaagtgtcaagacaaaataaacaacattttcccttttccctttgggtggtagcggcgccatcgacagaaagagcagaatctagcatgcacgttttttttattttccttttatttttttcctaaaaaacattttttgagcatgtgtggctggcacgttggtttctgatttcttcatcatcaagactgagtcactgacacgtgtgcacctatgcggtccacgtgtggtaatcgcttggatgatccggtacttgttttcaatcgcgtaaaatgaccattcctatttctccctaacaaatttgcagtgccatattttaaggatgaaaatattttatgattaacccttacttgcagagtgcatctttggcttgacgcagtgtgattatctaaaagagatttcgcgaagggaaaatgacaaaaaaaaagatgtttcgactttgtgaatcttaagatatgttaatacggtcttccaaagacacaggagtagagcgtgagtatgtgttcataaaagtaaatgtgcgtgcgtgattgtattgtattctattttttttaaaaaaaataaaatgatgtcagcaatggcgaagaaaacaagtagaccattttccaaaactgtaaaaaaaagagaaaaggaaaacaagtaggcttgcagatcctgcggtccagcccaagagaacgttagtgtgcgcggcctacctgcgcgtgtcggcctacttcggtctggctgagaaatagtaactgggccaacatgcgtgttgactagctcggcctggttggcgaagacgacggcccaaacgcggagagagatatcgaatattccgtggcccaccaaagccgacaacgaccgcagctcgcttgtcagacatcggggaaagcaatcaagcaagcagcggccgcatcgatcggagcggagaaattccccaactctgctcaccctcaccgttgccgacgacttcgtgcggcggcgaagaggagaggcg

SEQ ID NO: 5056 - DNA, 2000 bp, Oryza sativa
agtacttgtcatcattgtataatgcatgttgtcatttttatataatataaacttttttatatattgtttaattagcatataccaaggttaacgaattttttttcctaaacatccgattggctgaaatatatggatttttgtttattggttgaaatttttgtataaattttgatcctaaaaataattaaattctataagagagaaagtagaatcattcattgccccaacaaactaagtctaaaacaccgaacatcaagcgaaagggcctcactacgatgctctctactagcagtagaacacaatttaaaccgttgatcccatttgatcgaagggttcaaatctatttatattaccatccagttggcgatagcaaaaaaaaagggggcattatttaaaaaaaaggtgtggagggatctaattgtcatttaaacagtgactaaacttttttcctcttttttaacttttttgatgaaatataagcgataccagtgcaatgcatgatcatagataaatttagcttggaaaaaaatgataaagtaactcttaattattgtattagtaaattactattttaccctaatgatactggtagtataatactatcagtagagagatacctatctctcttgtcatatataattaatctaaatggtcatgattatatatttttaaaaaatcatcacatagaaaagcacagaattggccgacatatatagatggagtatacgggcacttaattaggtttgagtatgactagatagctgctttccacctggacagcacaggggcacgtcctgtgtcgatcgatgtctccaacagtagttaattaaggccacttgtcttgattttgttgtcagaaggtcttgtctgcattcctctctaaccaaattgagcactgcttgtgctccacgtaacctagctgaaaactatttagagccctcgcatctcttttgctgctctctagctagttaaactctgttaacacttttgtcaggtaatgggatgggagagctcttgctctctttgtcaaaacaatttttttttgagccctcgcccttgtttgttatttgcggtccgcatataaagttaagataaaatcaagtatttttaattacactatatatatctaggtgtaggaaacattaagtccctattttagagcgaaacatgagaacttgtcatgtgcacataaattttggttgtgcatactgtgcacattaactaacaaatgccaccgaaaattctagaatatttgtacacgtagtacgataatattatacgtacgtacaaatctcaccttcaaattcattatactttagctataaaaaactatcaattttaaagtataaatctatcagaatttcatcttttattccatatgtataatgaattttttgataaaactttgcatatagatataattattatactctaaaattatgtaatacttatttattagttgatgagtacgtttatgcatttgaagatatagatggatatatatagtataactgccgatagagtgcaattgaagatagattaaaactagtacgggtcaacggaatgtgacgctcatatcgatcaagacccgcacgaattgattgggaaaagaaaaaaaaataaactaaacaaagcaagagagagaatcgaatcgaggtagccttcaggcagcaaccagcaggaaaatgatacgatgaaaaccactagctctccatctcgttgccggtttcgtcactagctagctagtttaatcaatttacgtgtgaccactaatataattaactagcactcgttgcctgcatatgctgcctatataagtagcacaacacttgccctccatttgcacaaagcaaacagctaatttgtgtagcgatccagctacagacagacgacaccacaaacatagctaagtagcttaggcttaggcttagctaagtacaagtgcacttgcgcttcaaattttgccggaaaagcgaccactaattaagctactggctaga

SEQ ID NO: 5057 - DNA, 2000 bp, Oryza sativa
aaaaaaaagtcaaaccctaagtttccgtgtccaattttgactgtccgtcttatataatttttttttataattcgtatttttattattgttagatgataaaatataattaatattttatacgtgacttgtctttttaattttttttataatttttttaaataaaacagacggtcaaacgttgggcacgggaaaccagagtttgtctttttttttttggacggagggagtatgtactacctgcttctgttttgctgtaaaattatttaattttcttcgatgttgttgtcaaggtcgacggtgactgttccaattctagaaccwkgcytacgaaacaaaaatgatcgtcaaacggattgagaaattccaaactcaacagaaccttctcctcttgtaacaaaggactaaagaagtttcttctctggtaataaaagactaaagaagaagaaaagaggacaaaagaaagttccattcttgattctttcatgcgcttattttctcatcaattaagcaagccaattgtgaactgtctcgcggaagaaaccatttgttatacaaaatttacatattttttcttttttattaaagaggtttctgataagttgacttcggtgcaggatgatcaatggacgcaaccacgtctgcccatcgcgtgtacgtacactgttggtcaatcgtcacaagagaattcgaactgcagattctttctaaattttttttggcaaaacaaaacaaattaatgttttggccgtgtttagttgttttggaaaaaaaattatcatatacatacacacatttgaagtattaaacgtagactaataacaaaactaattacagaatccgtcagtaaatcgcgagacgaatttattaagtctaattaatctgttattaaaaaatgtttactgtaacatcacattatcaaatcatggcgtaattaggctcaaaagattcatctcgtaatttacatgtaaattgttttttcgtccacatttaatacttatacatgtgtgcaaatgatgtgaaggaaaaattaaaagtttaaagggaactaaacacagcaaaaataacaaaatgatggaggaatagaagcagagttgtggagatgtagagagaaaggaaaacggaagaggagaaagaccaggcagccagctagcagatggatcgctggaccgacgaatgggaaacagagggtgaggtcgcggtttttgacgcggacgtcgctggttttgccggatgctggcgccgccctgattgcccaccgccccatcgccgttcgctggtatatgccgttgtcttggaatcatctcctcgagatgtcaaactcaccccaagattagcacgcccacacactttacccaaccaactccattcagtgcgattttggccagtaattagccacactgcatattagccacgacaccacaagtttcaaattataaaccttaaagttgtgttaagttcatgttaaaattaaaaatttaattgaaattaaaatgatacgacagaaaagttaaaagtttatgtacgtaggaaagttttgatgtgataaaaaaatttagaaatttgaaaaaaaaattgagaactaaaccagtcccaaatcaaacagtcctactagttgcattttgtaacttcttccccaagaagatcagtggggatgatttccatgtggagaaatggagacagtgaggcaggcactgaatcgcctcacctcgaccctctgcccctcaactcggtggtgaccacgcgtccacatctctcatctttctttctccgctattctcctccagtcctcttctcttcttcctccctcccttcgcccactgaatcgccaaaaaaattcccctcctccactccatctctataaaaatcctcccccaaatctcgcctcgtttagccagcacaactcacacaactctctctctctctctctctctctctctctcgtcgtctgcaagcttccgcctcccggatcgcggcgaccaccggaggaggagggagcagcc

SEQ ID NO: 5058 - DNA, 2000 bp, Oryza sativa
gttcatcgagacgccattccgccacctccaccctctctctgccctcgacgcgctcccgtcaccgaggcttctctccacccacctgccgcaccagctcctccccccgcgtgtcgccgagctcggctgccgcatcgtctacctctgccgggagcccaaggacgtcgtcgtctccacatggcacttcatgaacaaggtaggcaatggcttcttcctcgacctcgacgaggccttcgagctgttcgtcgatggctgttccctctacgggccgatctgggatcactgcctacacggtgctcttcctcaagtacgacgacatgatggccgacccggccggccacgtcaagaaactcgccgagttcctccgcgtcccgttcactgacgaggaggtcggcaccggcgtcgtcgtggaggttgtgaggctgtgcagcttcgagaagctgagccgcctgccggtgaacttctccggggtggttgatcggatcggcggacgaccgatggagaactcgtcgttttttaggaaggcgaaggttggagactggaagaacaacttgactcaagagatggcgcagaagcttgatgccgttattgcggagaagctgaaaggatctggtctcaccttctgagtatggggattcgtgcttgctttttatgcatgcattgctcctgtaaaagtagaacagtaatcttcagctgtaactgagttgtgtccaattatgtacgtgcacgctcgtacaggagttggaaaccatgtactgtgtattgatttcctcgtggacacattttatcccttcctccccatttattcctttctcttttgtattcctattcctcctcgcattcttggcaacggtggcgggcactcccgcccatccacgggaaaacggcagcggcctcgtgacaatgaaggagaagaggatggaaccaacgagtttgatgagttcgccagcccgtccgcgggaatgaaaaccgcttggagaaaaatatgacctgctcggaagttctatatgcaggtgataggaatcggatggatgagattgccatgcattcttttgatcacaccatgattgatgcacaaatccatatgaacaattcaaggcagaggggaaatagggagcaaattaacatcgatcactatattcattgatggtacgttgaaacgtaccgatactttgctaacatatactccatatgttccataatataaaggattttaaagagatatgacacattgtaatagggagtagctatatttatggcgccatattttaacaaaaaaatagtcagtatgtatttacattgtaagtttataaattacatatgtaattttagtgtatttacaatgtaagtctcaaaattacatatgtaattttagtgtatttacaatataagtctcaaaattatatatgtaagtcccaaaattacataagtaaattaagaaattacatatatgtaactagtatataatcatcactcatcattatgtatgtgtggaaataatcttcttctgcctcacggaagcacagttgggaggcctcaggcctgtgctgttgtgtggcataggcatgcatgcaaaccgactgtaatcaatggaattttacggtgccataaatttagcaaatctgttgtaatattataaatctagacagtggtatcatatctcctttaaaatctcttatattttaggacaaagtgagtgctttaaaaaaacagagggagctagctaccctatataaaatattcatgcacacgatgcacgagtgcaattacttattacattcaatcgagaataaccgaaatttgtaccaccatgatatgattcttaattttatagcttcatcgatacgtgttttaggctggatatgcttgtgttgattggtaaagacacaggataatatatatatatatatatatgcttcctgcttcatgcttgtgcagttgtgttatttgttgctccaaaccactaagctcactcgtgtcagccgagcaaaacttaagcagcc

SEQ ID NO: 5059 - DNA, 2000 bp, Oryza sativa
tatttcagttgagcaacttacacatggaccctgaagcagcacccacccagtattttgcagtgaggtacacatttctgctctccaaaggtcaagcatcaccccgtactgtgaatgattgaattagcactgtgcactgcaaatgatgaaacaaagtcaaattttattcaccgaaaatgtaaacttggaatcaatgcagcaaatgccgtatcaaactgccgcccagcaaggagtctaggttcgattagatacgacaatttggatttgtaacctactcctacaacgctacacggttgaagtacttgcatcagttgctttcataagtccgtatgtatgcatgttcatccaccgttgaacaaggaaaaaaaatggggagagaaagaagaatcaccggacaactaaccaacatatacagagctcctagctctgatttagtttgtttaattattactcctatttcttaagcaaatgagataataaagtagctaacctttccactgcgatcatatcagggaggggcctttcgttttcaggtttaccgtccgacgtgacgcgctgacgtggaggttttaatactggtaagcgaccgccaccggccgtctgccgccggggaaggtagcaaccgccgccgtgcgcgtgcggctgacggcggcggtccgacccggcgtgcggatgacaaagggcaccatcggttgtcgtaataagtcaaagctaaaattttaaagtttaaatttaatttcttagttgatttgtaagattttcttttgccgagcccgcccaagctagatcggccaaatttacatgagattgagattaaggagattaaggattatgtacaaatttttaagatttttttaacatagtttcttcttcagtattatcttttcaaattgttaagttttacctataaattaacttttatttcctatacgatttattagaaaatattagcaaccaatgagactgatacatgtgatgtggatttcttccgtcggaacatttatttttcttcgtcgttgcgtcgtttttgcttccaggatttttcttcaaacccatatgttctatttagtgtgttcttcgacagtttggacgtcaccaagcaggccaaaaacaggttggaccttgtgacggaaggtagcaccactgcccgtatacggtgatggatttttgccgctcaggatatcgtcttgtttttcatattccccatctcaaaatataataattagtataggatgggacacattctgataacacgaatatatatatgttgttattttgagacggtgagaatatgctatttaaatacttataaaagaattaattgtattagattaattaaaccctacaaagcaaacaagtacttaaaaaataagaatttgaactctacctagtgcgtgtactattatgtcatatttgttactagtatttcttttagttttggtaccgctagtataggttaactttgaccttgcatattatagaatgctatattgtgcattgatttatttttttttaaaaaaaatatattcataactttttaaataataatatgaaggaaactactccatccatcccataatataagggattttgagtttttgtttgcattgtttgactactcgtcttatttaaaaaaattgtgcaaatataaaaaacgaaaagttatgcttaaaataatttggataataaagtaagtcaaaaaaataaataataattctaaatttttttgaataagacaagtggtcaaacagtgcaagaaatctcttatattatgagacgaagggagtagaagacacgagcgaaagaaaaaagaagcttcccagactactgtttatcagagcaggcgagttgccaccgctataaagagcatggaaaggtcgcgcgagccggcccccggcatgagagaaaacgcacgaccttaataatgcatgcgtaactgttctcccgtcacgacctcaagagagctcagcctaaggcgggcagcagctaagccagaggccggg

SEQ ID NO: 5060 - DNA, 2000 bp, Oryza sativa
ggtaatttactgctatattcttttgcttgcaggtgccaggtttggtcaatgttgactttgctgatgtccgatcagttatgtcggatgcagggtcatctttgatgggcattggaactgcaacaggttggatttcagaaagcattatgtgttcagcttcagcatcaaatagcataaagggggcactccacatatattcctatcgcatgggttcatttacagaattacagtgctttttacggaattcccaagcatgcgtagttagagtttatgttagctgcatttatttgatgcttctaagagatacagtataaggttatatgggatcctactaccgctgaggcgatatttacaatcatcagagtgccctcccccaacacacacacacacacacacacacacacacacacatatgatacccttgatctctgattgttttcccctgatgatccttatgccctctttgcaggtaagacacgtgccagggatgctgcgcttaatgctatacagtctcctcttcttgatattggcattgaaagagcaacaggaattgtatggaatatcactggagggaatgatctaaccttgacggaggtattgcagagtagtttgctattgcattcttctggtacaggttgcttgtttgattagatcttgatttttttaatggctaagtagtttagctgctaaccgcaggtagcagacctcattttctaagtttggtaataaataggcctttattgccttcagtttatgctgactatttagatgacataacacatcacagaattgtgatatgacttcttaaattatatatttctgctaaattccactggtattcctttgttttaggtgaatgcagcagctgaagtgatatacgatcttgttgatcctggtgcaaatctcatttttggctctgttattgatccatcgtatactggtcaagtaagcaaccatataaaaagaaataggggtagtattattttttaatcaaaagctatggtggtgattatgccatccatttttctagaggtcattgaatttaccacgctattgccaaatataagtattattatccccttatccaggtgagcataaccctgattgcaactggattcaagcgtcaggaggaggctgagagtcgacaggtacattctacattgttatgcctactttatgcccactgccattatgtattctgatgttcttcattctactctcccttgcgtcaaacatcgacgactgtcaggctggtggagataacagccggagccacagcagttggttttcttcatcatcccaggaagaaggtccaacattgcagatcccagagtttttgcagaggaaagggcgttcagggttttccagaggctgaaacttcggcttgaagaaaaaaaaaaacttagaactctcactagtttagcgcaccagctttctttctcgtgctttcctcttcttctttttttaattttgttaggagttcgatatgtttcaagtttatttttgctgctcagatttagatgataatgttatgagcagatatttgattcctgaaccgtactgtgcttcctgaatggataaactggaattcttctctctttttcacaactcacatggccgctgccgtgaagaaattagcacgtcgcaacatcatcgcacatcgtgtaatatcgtgaccagtaataatgttaatcaacaaatcaattttaattagggctttgttcgaatatgttaggcagaaaagtagaattagcaactaccacagggactaatctgcaaagctttccaccaggccaggttggctggcatgaaccaccaaaaccgggagaggaaagcgtacgaaagcaggaggaacgcaaccgaaaataggggggaagagagatttccctcgcgcgcttgtcgttcgccttcttcccctttgcggatttgaatccgctcgggggcgctattacctattggcgccgcggcggcggcggcggcgatttgagtcgggatcccgctcg

SEQ ID NO: 5061 - DNA, 2000 bp, Oryza sativa
aggagatgatggagtcacgtgccatcccatccgtttgggatgccacggccacttaggctgactcgtgcaacaagaacaccaccaataactaaataactactccatccgtttcgaaatgtttgacgccgttgactttttatcacatatttaaccattcgtcttattaaaaaaatttaaataattattagttcttttcctatcatttgattcattgttaaatatatttttatgtaggcatataattttacatatctcataaaaaaatttgaataagacgaacggttaaacatgtgctaaaaaagtcaatggtatcaaacatttcgaaacggagggagtataataagagcaagtttaatagtatagccaactattgatccaaattatctatagctaatctaatagtcaattcatacaatagttaactataaaaatatactacaccattaatactctgtcccacctctcatacacacataacatcttggagtccgtgttgcagctggctacaaatctgcagcccactttcttctctctcttctcttttcttctcgatacgtggttatagctgatttatagcttgctattgtacctgctctaactatagtattatatataccaatatcttcatcttaaaatataataactagtaaatgtttattttacgaatataatggctatatatcgcctctactctacgggcttgttcactttgttaccatttggaaccttaccaagttttggcattgccaaaatttagtaaggttgtcaaaattttgccaagatttcatatgtacttattaaaatttagcaacaaactaaatatagctaaaattttgacaactttatcaagaaaaaatggtatagttgaaaatgacatcaaaataaacaggcactactaatagagtactagaagaagtaagtgctaccgttttccttttttttcctcttcccttgtccgcgatttcttttgtctcccagtcaaccctcttcttttcataaaaaacaatttattccgattttcacattatcattaaaaaaagcaagttttaaattgggttagtggttataacctatatcttttcactcagccaaataaacttttgcatagaatatgtatgttcaatatatcatgggaagttttaattctagtattcaaacaacgaaaagaatataagtgggtaatcttttttgccgtatataaaagtttattttttaattgatttataaaatttggaaagaaaacattgaataagttagaaaaaaatctacttatttgtccactatattattattttatgaaaaatttactcgtaaatttacacagtacacgagttgtacttgaatcggagtaaagaagttgtagcattttcttggaagcatgtcgttgaagagcatgagcgctgctcaaccaaatctccattttctaaatcaaccaagccttgacctagcttgctaccaccattcgtgcacacacattctctctttctctctcagcaatggcaagggtggcaacctcaaaaccctagggcccaaaccctccagaagatctggaacatccagccagaaatccgacggcccaaatcactccggccgttgtacttaactgagccgcagcccagcttcctcctctcttcttcttcttctcgcctcttctcttctcttctcttcccccacactctctcactagcttagcttagctaaaaaaaagaagaataaataaactaaaatgggagcttgaatccctcccaaatccgcaccattacgcgcaatccgtacacctgctcgacccgcacatggacctttcttctccgattcgcccgctctgagcaaccgggatccgtttctgctgcccattttttgttctgtttttgtttttggtttcttgggggtggaaatcttggccatctttcttgcgactgtaatggcgggggttttagcttggtgagacactgtagatctcgtcgtcttttttgatttgggtttttcggatggtgacggag

SEQ ID NO: 5062 - DNA, 2000 bp, Oryza sativa
ttgctttgtttgttatgtttcgtcatcgtgtcgatcacctccaactttcacaaatttggaccaaattcgatcgatcgccacctgctttaagaagcccaacttaagatgatgttttcctctctcttgctctctctctctctctctctctcaattgtcttcagtgatcgagaatattagctataagaagttcatgtttttttaaagaacgagagcagaatgttactatgaaagtgtggtctaaataaaagtgatcgattctttgttagtataataattagcttgatgtttaaagaggatgagccgacattgtttggttgtgcctgtcggtttgagctttgagacaatgagctttcaacagctttcaacggctcgagaaaaagctgggaaattattccacgcttttttttcatatatacagactttggtaaaaatgtttcatgtttgaagtttaaacagcaaacgtgtatcatgacacaatctcgaattgtcgcgtgcaaatcaaagtcattatttcgtctcttgactgatggtaactgtgaacgaccgtagtagtagcagtagcttagtgcgcgtctaattcagggcagttcgatgtcaaaacgatttccaaatttgctgcaaatctagaccgtggaagtcaaaaacacactaggattagaagaacaatccaaagacttttgcactccgccacttgcacacactgtttttctgctcatctgtttttggttcactgttgaatccgagaaaggagtgtctgaaacgcttggcaatacttgtcaactagctaacctaactgaactatccaactcatgtaattgtagatatttgtctgatattagcaaggacctagccttgaaattaatgtcttaatcttagaatattaagcttagggctgctgctctggcatagtattcgtcaaagcttctagaactttgttttctcatgcacttcctagtactccctccgttccaaaatataagacacaaccatcattaacccaaagatcaagaaacaattattattatctcctagtttggatcaccctaataaatataatgcatgcatccaatagaattagagatcttgagggtggaggatttaaaaaagtaataatttaatggagatgatgttctaattaattgtatgcatgcatacatgccttatattatgaaacatccaaaaaaaagtagttgtgacttatattatggaacggagggagtatttcattttatcatagagagctcaacacgacttagtgtatgattaattaaataattagctaatctctcttacacacaaaacgagcggctcattagtgtatgattaattaaataattaactatttcttttaaaaaataattaatatatttttaaagcaatttttgtatatatctattttttaataaaaacatcatttagcagtttgaaaaatgtacgcgtgaaaaacgagagaggtgcgctggaaaaaggaaggaaatgaactcagccagtggttcaaatgcgtactagtcattttaaatccagccatacgaatccaaaaaatggtcaccaaaaattcgccaaacaagtccaaactcactccaaactccaaaggcgtccgttactccggtgagacgagacagcgagctcccagcctcccacccgtctgccactgacaggacgtgcccacagaccggcagtggcaattcccgtaaattacgacggagcgtggggtcaggctcgtacgcgggagtgggggatcggagaggagagaggaatatgcaaagcaaatcccccctcgagtcgtcgacgcggtaaagccactcgctttcttccccaccacgtctcctcctcttctcctcccctaaaatccccaattccgaccaaaccctagccccccccaaatcgcctcactccaccaccccacgcttccttcgccgctaagtatatccctcccggcgaccgcgaatcggatcttgagagtgagagagaggttgggggaggtggatgagagggcggag

SEQ ID NO: 5063 - DNA, 2000 bp, Oryza sativa
aatatttttaaatttgtaccattcttctattaattttcacataataatagccattttacctttcatttgaacttagacggtcctttttctaatccatctccaagcccgacgacactactactgctccacctccaaatccaatgattgctactgtttccacgctagttctctccctttttctttcttcccctcaagacatagctggggagttgctggatccaataaggaggagcccggattaacttctctgctctccaactgtcggttcctacctccctgagtccctgctagtccagcgtcaccatcctcaacggcaaccatagcaacaacgtgcatgatgaaggggaagagattatacacgttggtggctagaggatgtggttacacatgcagagacggacgggatatacaatggtggctcatggagagggagctatgatggcagtgcgaggaggagaggagcaacaactagtgggtgctggaggagttcgttgtcatcacatatccgcaaccgagtactactgacatgtgggtcattagtcatcacaaagaatgagtaatatagctggctttatatgaaaactttttgagacatagtggtttaaagtgatactggaccgatttatctctactattataaaaattgaagatatttttgccggtattttggtatgtcatccgagcatgagtcggcttttaagtttgttcatttttgaaaatacatatgcgtatttgagtcggttttgctaacttgagacgatcggactcttcattataactcttgatttttttttaaaatatatatcatccaaacgagttctcacaatagatttcaccttaactaaaacgtataacaataataaattaaaatagcctttaccggtgcaacgcacgagtagtttttctattgtatataaaaaaaagaaagatgaaatcttacaccctgtctagcacaactcttgatacaacattttgttagagctgaggtatttttctaattccacccatgtacggatttggatctaattatgttaataataattggataaattattttgttcctgttttctgaaattcaaaatttaaaattaatacgttgtatcacacaaatttaaatcagtcgtggctatgccaccttgtccaaaaatcattgcgagtcgatagcatctcccccgtccctccgcgtcaaaggaaaatctcccgtcttcgtctccgctccctgcgcccgcgccgatctccatctcgcgagcacagcagccgcgccgtcgtcctcgtgtgagcgtccgcatcctctttctcattcatctcatctcatctcgctctccagttttcgtgcgtgcgtgcgttaaccctagcttatcttctagatctggaacaagcttttctcttgatttcatagccttaaacttataatactacaagtaacagtttgtgtttctttcccccccaaaagtttggggggttcaagtcaactgaactgaaccccagtatcccaagttggatccgccccgtcactgctttgcattgtcccgcaaatgtcgctctgttgggcggatgagtcgcacgctgtcgagtgtccaccttttgatttggtgtcgttcatctattggtggtgaattcgctgcgatgttgttaaatctcttggcttttgaccaagtggatggggcggatgttgatagttagtgtttttttttacttgatttcatcttgactatctgttatccgatttggacactgaaagaaaaaaaagaagtaaaatgggtttatgtagctgtttatgaaatggacaacatatatatttttagtggatcgatttgataagggtatgatgtcatttatacccttgtagtgcatcacttttacgttttgatctagcaattacctttttttttccctgatatattggatgctttcctatagtggaggtaaaattacattttgacaaataatcctgctcaggctgattcgttgtgttcctgttgatgcagtaactgtctgaa

SEQ ID NO: 5064 - DNA, 2000 bp, Oryza sativa
cgattctactcgtccataagtatacagatgtgttatctgatatgatacacttggatattcttttttttttgtttttttggtgtgttcctgagkgttagaacagttcacytagttttttacargaaaaaawtcatggcaatggcattcctttttatctggatttcttctaattatttagtattcatgtgctagtagtagtacttagctagctgacaaacctggctttgagtaattaggaggcaggcaggccgtcctgttgctgcttaaattgctaggcaggctagctaacccaaaaatgcaggattcatgcctgttgcagctgtactatttcgatcagtttaattaagctggagtgattaacaatttcgtcagttattattgcatccaaattaacgcgacatccatggattggaaggtaaaccagtgttgttttgccaggggacatcagcaacctaccgkcccaggaattcagacttaacagttaattaattaaaccaaatttatatgcatgcatgcacgatcagacattgacctcttcctagctccatccgtgttttggatgatatgatccatccatgtttccatgcagtcttgtcagctaatcccggtccatcgatcgatctgtttcctgctccgagatcgatccttcgttgtttgcaggttttgctccttggaatctgcgtcactgctcgatcgtcagaggagagagatgcagctgatgagctactacagtaagtaggtcgtctgaattagtctgaaccattcgtgtgtttcttttcttttttttcttctctgtcagatcgatgaactggtcagcagtaagatccaatattcttgtagacgataccaatgcaaaacatagcctgcctcctcaaacagttcctggccagcagcgccgatcggcggtctgaatttatttgtcccaggagtaccttcacagctgcactttcagattttattaaattcactggtggtaatatatcccagtacatgctggaatatctgaaaaacaagtgcatatatatgctacgattcaaaggtttcacctgcatgcagtgctgtggatttaagatataaagaagtacaacatatgtacaaagtacaagaccgtcaaatctttctgatgaaattgaactgtttcatgtgaaattcctacatttcaaacaaatcaccacgattttaagccagtcgtttttcacttgttactaaactcttatgcatgcattcaaataattcaccgtggaacatgaacggttaggctcccttggattgtaaggaaaacatatgaaatttaaagcattttaattctataaaaaacatactacgraaaccttaaaacaagaaatgttgaatcctaccatttccttaaaaatttctatggaatgaacattcccacgaagattttaaagaaaagttagcaagagcttaaaccacttggaaatttttttttaagtctatctcatttgaagtatgtgttttttctctggcctagttaaacaatcattcccatataattttagtgttgtgcaacctctattttgtacatgtatttctgtttaaatcatgtgtttttttawawttgktcattttattaatcatgtgttttaaacaagccccttagcgtacaacgatgatcgatgctgctaattttatcgtcagatcaaacttaaagcaaagcaaagccaagccggcaagatcgaaaataaaccaagttccaacgcgcacacacacacaacgagccaagcccgaggcattcagcctcggctcgactcggctcaatcactcagctcagctgagatcgagccgagctggggccccaccccaccccgcgtcgcaattaataattggtcgcgactcgcgacgagatccactcgcaccagctcatcatttgctcctccactccaccactatttataaccccccttcgcctcctccacccccactcatctcctccacctcctccacctcgccgccatttgatcgaacacctgatagccatg

SEQ ID NO: 5065 - DNA, 2000 bp, Oryza sativa
aaaatgattgggatgatcctaatgagatcagaagaaattaaaaaagggacacggctagatcgcgcgcgctaatggcatatcactaaccagcgacgtccttctcttaaaaaaaaaacaacagttatacaagccttttttttccttcctagagaattttctcctaaattacttatccgatctataatccgattacaccattatggttgttgcaattaaatctttataacaagatcttacacgattatattctgataaaaaatatctatgttgcaaattacttttattatatatgtaagttacttttgtcctatacataaatcacttttagatttaagctctttaataacttatatcttttaaatcacgtattattttcatgatctatttatatcattgtactctacataaaatatgagacaaaacaatatccatattgaatatattcaaatattttattaatttaaaagtaatttatttaaattgtagtagtaacttagctatgcaatagatataacttagctatgcaatagaagtaagttagcacaaaatagaagtaagttgttacaacattagaagtaaattcgagagaaaaatattttgtatctaaaaattaaatttaaagtccataaattatagaattgactaaaaactataataaacataatcgacttaaagcattatgaatatataaaaagtaatttagtcaaatctaaaagtaacttatatatatgataaaagtaacttaagtatataataaaagtaatttacaagtataaatatttttttatcgtagtataatcatgtaagatcttgttttgaagatttaattgcaacgaacacaatggtataatcggattatagatcggataagtaatttgagagaaaactttgtaagaaggggaaaaacatgcatgtgtaatagaaaaaaaaggcatgcatgtgcgccggcttctccacggcttctatggttggcatcgcgggataacacaatatcgagaggcctcgccgattagtttttgcgttaaaaaaagcagtacacgtcgttgtctggacatgttgtgcacttgtgcacactagtacatctgagcacgaacttattaacgtttttagtatttatgccataaaacagkycmagaaatacaattttaattgattatgtatgatttctggatgattactcttttttggtagtttatggcaagaaaaatgaggccccatttattacacacaggaataaaaacctagaaaaatagaacacaagaatgcttgtgttaaccagcgaaatgaaaaacacatgaaaaatataatatgggatgtttggaagaaaggattcattagtcaaactgcagctgctttaaaacgaacatacccgtaggcaagtttccaacaaaatttagcaaatatttgctttcctataaaattggggaaaaagtgcatggaaggaatcaaaaacctttaggaagactatccaccaaattctttgttcaaaccgtgaaaataatgaaatcccttaaaatttatcttttgcttatacttatgtttatagctaaattttgatttttcaactttaaatttaaagttaattttggagttttttcagcgtagtttatattttaacatttgcttttaaatcgttaagaatacgtatataaaagttttattcacaaattattttttatttccaaatattcctcctatcaaacagaggtgggcccctttttccatcccggaccaaacgaaatcttctcccgtcggtgactgacaggtgggccccacctgccaaccggtcaagccaagagacaggtagacacacacacgacgcgatccccccaactctcccccgcttcaacggaaaaaaaaaggggtcgcgtctcctcgtctcgtcgcctcttcctccttccaattcatctcgtcctctctctcgtaactcgtaaagagatctcgtctcgcctcgggaatccaaccattgccggcgaagtagagatcgggagggcggcgcc

SEQ ID NO: 5066 - DNA, 2000 bp, Oryza sativa
aaggttaagtccccatgctgttgtagattctcgtctacattcgtcaactgcagtattcattaactctgtgaactaaattatgaagtaacattgtgatgtaaactcatgtgtttgtccaattataaatgttatgttcgattgcattctgttgccccaaatcactaaatttgatggacgctatgttcaatcttaaatttctgagctttaaaacgttaaagaaatacagaatcattgccaccactgctttcgttttcaaatgtcggtctcaaaaaggagaagtcactgaattgtcttcaagaacaacagaaagaacctaatgccagaatgatctacatccaagcccaccaatgttcactgttaagaatcactcattactgtagggtagaatcaagaacggtagttacaaactcacaggactagctagaaacaaacatttctgaaaacattcttgtcatgtttctgctgactgtatactcaactactataactactgaacaagggtttgcatccactggtctctgccgagacgacgatatctcataccatttctgaccacaaaatttgccatcttgatcacagtatcagcagacagcagtaccaatatcatttgtaattagtaacacaaaactggcctacaaatttaccagagctcacataccaaacgaagatacaataatgcaaaagtagtaacattcaatttgagcatattcagaattccgattgcaactttgcaagaaccatagtgtgagcatagtcacacacacacgcagcactacactaatccgggtaagtagaatctaacacactgccatctaaatttgacagcttggggacaacaattctgaggcacaccatcaacaaattacatggtacagtacatacctagcaactcgatggcaaagtggcaatggcattgctcttcgccttcttggccgcggcgcccttgctctccatgaggcgccacatgtaccacgcgcccaccgaccggtacggcctccaccgctcacacagcgccgccatctcctccggcttcggcagcgccggcagcccgtacagctcctgcacgcccttgcgcacgccgaggtcgccggatggcagcacatcggggcggtgcagcgagaagatcatgaacatgtggaccgtccamtygccgamgcccttyaccttggtgagctccgcgaggagcgccgcctcgtccattgcggccacggcggactccgagagctccccggccgcgaacctgccggcgaggtcgtggaggtaggccgccttgcgggcggagacgccgatggcgcggaggtcggcggcggagagggcgagcaccgcagcggggttgaccaccgcggcatcgggatcagcggcgcgggatgagcgcgagaagcgagcgtagatgcgcggcggcggagggagcgagctgctgtggaggatgagtgcgcgagggagtgaaggcgggcgggaaggggacgagatgaaggccgggcgccggtggaggagatgacctcggagaggagcgggtccgcggtgcggagtgcgagagcgccgccgcgagctcccccggcgaggacagcggcggtggcgatagtacggctgttgttgttgtggcgacggatttccctttggcgggtgtgctcttgacgatcttgcgggagcggaaggagatcttaccggcggtgatgtccgctgcgcctgcgccgccgccgccgccggaggggcggggagtcgccgccgctctggtcttgaccattgcaaaggttgggtgttggagacgagacggcgtggattactggaccgtggagggaagcagttggccgttttgtcgggtggtcctcttgaggcccatttatcactcgcgtgggcccacccgtcctcctcgcgtgacgggccgtgatctgggcccataaaaaggctaagcaacggcccgtaactcggaacgggagtacgtaccaaaaaggttagccgtcagtgtcactgctaggtgggtcctaccatttgatggagaa

SEQ ID NO: 5067 - DNA, 2000 bp, Oryza sativa
agaagatcttctcgctcccaggttgcctcatcttcagaatgattgctccattggaccttgtagaacttgatggtcttccttcgagtctgacgttttgcctcttcaagaaccttgatcggtctttccttgtacgtcagattcttttccagctcgatattacccagggggacttgctcttctggaactcgaagacatttctttagctgggatacgtggaacacgttgtgcacatctgcgagaccttcaggtaactcaagctgataagccacttcgccacgtctggcggttatgaggtaggggccgatgtagcggggtgctaacttgccggacatcccaaacctcctcataccacggaggggtgatacccgcaggtatacatgatctcctttttcgaactcaaggtcatgccttcgattgtcagcgtaattcttctgacggttctgtgctgtcttcaaacgttctcgtatcagcttaacttgttcttctgctgacttgagtatgtcaggaccgaatatcagcgcttcgcccacctcattccagcataagggagtgcggcactttcttccgaacattgcctcgttcggcgacatctgaatgctggcctgatagctgttgttgtatgagaactcagcatacggcaaacaacgatcccaagtgccttcgaaatccagggcacacgcacgtagcatgtcttctaggatttggtttaccctttctgtctgaccatcggtctgcggatggtaggccgtactaaaatttcattctattctatttggactttgtgtcaagaaccatataataagaggttgtagctgtgattgaagtaaaggctaggtttaatatatattataaaaaaatactgaggaaaggtggtccaatatgcaatttactcttattatattgatcctagtggttgtttggaataatgaaggcttagcaaacacgcaacgaggatgtgcttaatttgctgacatatctcttccgttcttgaatattgatctttcgtttttctttcctagggtgacccacacccactacggaatcgaatagaaactctgcacctgctggtatgcatgaattatttaaagttggctacttggccttatagaattctttcagacagcatggagatggagaaatttcccaccaaatattgacccataccccacatgatttggatggatcccttgatccgatcacgaatgcttaggtggactttgtttctaaatgtagaaatgttattcagtaaccattgtggtttgttccataaactaaattaaggttgggttttctgatggcataaaaatcatcatttacaactgattaaatatttaaaatttagttgttgaaacactgaaattatatatatcttcacaacaagttgcaccaaataatattgtatgtatataaaatactaataatacagcctatatgccaaactgatcagttgatcaatcaattaaggaactagtccaccaatcaaagataagacatgcctcgtcggatcgatataatcgccttagccgtcgagcacatgagcaacgtgctgcgtcctccaatgactacgattcaacgacggcaacccccaaaaaaaataggagaaaagaaaaagaacacgtcgcatgcattcatgcatgtaccaaacacaaaatcattaacaattaatcaattaataaaaagaaatgagagtgaggccaggagagttttattttatcctaattaatccgctctcgccgagcagagccaagcatcatggctacttgccaagttgccatgcaaattgtaggattaataatcgatttattttgctgacatcttgggagctcatctggctataaatatataccttgatcgatcgcgagtaatatcgcatcagcattcaacgaacacacacacaatcggaatcgattaagagagcaaattgtgtagtagtgttgcatatggagacaccaaagatatcgggagtagcacttgcggcagccattgccgtcgttctggcc

SEQ ID NO: 5068 - DNA, 2000 bp, Oryza sativa
tgcattgcagtacataattaattatactagtacacagctgcaaattaattatgtgttcgtgcagcgcgtgccagcttagaaaaaggtaactaaggctgtatttagatctaaagtttggatctaaacttcaatcctttttcatcacatcaatttgtcatacacacgtaacttttcagttacatcgtctctaatttcaaccaaaatttaaactttgtgttgaactaaacacagcctaaggccctgtttgggggagcttctcccaactgcagcttttcccaaaagttgcttctgctagaagctgcctcaaacagtccaaagcttctgagaatctgtagaagaagctagaagctggagaagctgggtttcagagcttttccatattcttagaagctggctaccaaacagctgcttcttagaatctaaaactctttcaaatagaccctaagtgagccctactcctcggaccacggattgtgccaaaatgacaatcccataagcaaacaaaatgctagttctactaccaatggattaatcaacatgtgccaagcttgggaaactgcctggactatacgcatccaaccgttttctacgctgttcccaaaaaaataattaaaaaaaaaacgttttctatgcggagcaggtaggttttggaaaaatttgccagtcaaaaactccaactttagctagtcaaaaactccaactttagctagtcaaaaactccaacttctatcttaaaatagaactatagacagacagacggtgtcgaaatgtgtcatcaagcaacacgtaatttgttacggtaaaaaacaccaaagtcactttggaatgtacttatttacaaagcatcaaaggtatgctaatccaatagcaattctacatcagttaaaagcttttatcaccatttcactaaccagatcatccccagccattacttttgagatgtgaaaccaggtgtgatgctgattgctgggaatcaacctaacacaaaataatcttgtcgtatatgtatgtgtatatatgtgtgttccccccactaattaatgtgctgtaatctaaccaggcaacatcattaactctcctcaatgaggccatgaaacacaatgcaccaaccgatccagtccagagacatccacacattcgtcagctcgctggcgtccacggtcgttgtatgcacatgagcatgaccggcaaggacagtgaccattgttgacttgacaagctatccagtggctaccctctctgactcaaaatttagcaatttacagtattaaaagtttactccatcagaactctttcatctaatttatcaccataatcaattgtaattaccttttacaaacttttatgctatttcctcctatcaactaatcacaataatttactatttaggggcttgttaagattgtagttaaaataaaccttatcaaattttgggcaatatcaaaatattagtaaattaacaatattacmaagtattgtaagaatycctaatgtatttaacaaagtttagttaaaaaaactaaatatatacatattttttataactttaaaaatgatatgttttgaaatggtatcaatacgaaccacccattgttttcatccgtcttattaataaaaataaaagaactcaagaagaggagtacatcttcagagaccagaaatgccggcaagtcaatttccatccaaaaatctgcatcaaccactcagttgctgccaccctgccactgcagaaattacgattctgccctcgccaagaactattataactttgttgcaatttgcaaatggatgagattggtaggtagctatggcagctgcttcttcctcgcgcgaacaaatcaattctcagaatagaatataataacctccctttaattgctgtattttattccctaatctcactgtttacagcgacgcaactccgattaaattcgcccacccgtccagccatttctactcgtcttcctcctccctccaccttaaacctcgaggagtcaaga

SEQ ID NO: 5069 - DNA, 1849 bp, Oryza sativa
  misc_feature (1)...(1849): n = A,T,C or G
wrgscgwaaaatcccgggtttttgggaacctgggggttaggtcnaancnggamggsgggcccyggggggcccattttccggaccyctccccaaaammmccctaaamccccggttcaaaagggcaagtcgrtcacncttccaamttaaccccyaatwaccggggacccttccggactattaacggtnaaggkttttttaaaaaaaggctwtgggraaatttnwaaawttwtttttaaaattttaaaaccaawaaccaattaatwtancgctaataawcmmyccsktttaggggcccgrggggtwattcccmaaggtwaaagccaaamamrgcctaamwactcttttatacttttaatgtatttaaatatgcggaaacactaactcgcgcgtacgcgttgccggcgcgcatgctgcccactaaggcccatgcacgtacgcacttaagtttctctctttttttttcttttttttaccctgtcgtttcttcttttttttatattttgttttcgttgtttgttattcctatttcttactagtgattagtttactagtaatttttaaatcttaactttaaaattttcaaatctcaagttgaaagtttttaaattttttaaatttggacctgaaagtttttgaatcttgagttaaaagtttttaaatctgagttgaaagttttcaaatcttaagttgaaagttttcaaaactttcaaatctggacttgaaagttttcgaatctgagttgaaagttttcgaatctcgagttgaaagttttcaaatccgagtggaaagttttcaaaatttgactttaaaatttaaatcttaaatcaaaagttttcaaatctgacttaaaaatttttaatctattagtaaaaaaatatcccaaaaaaatttccctaattactcgtcattagtactaagtgggtgttaactaatactatagagtagttagggaggtgcttgctgcttggcgcatgcgcgccagcagctagcaacccctttaaatatgactagcacggtaaatatttctcttgattttatacacatcctaattctcatgtcgactcaaaaaatgccttatagtaaagaaaaaaaaggagagagtacatgttttctatagcgtgtcatgttttycttaaattgaacaaataattaattgtgaaaagagaggataaaacttagaaaacatcaaaacagcacagtccaaattggccgtagaacttccctttcagcacaggccggtttttccaaatcgctgtggaatattgatgggcagaactttttttagtcaaaaatgcacaattaatatgggtgagctacttattaaagcttgatagcgaagaaaccccgctgccactgtgctagcctccaacgcttaggccgcctgctccacccaccatcaatcagctctcacacaagcccaatacggcaaatacccccgtccatgccatgtgggcccgcttgccacggactctcctctgccccccagccgccttttctattttaatccccgttctccccgctcttacatcacagtccacgggaatagtccaaaccgcctccatccacggcaaacgcgacgcgacccgaacacgagagagagggaagcaagcaaagcaaagcgaagcagcgagaggagaagctacgaagaagaagaagaagaggaagaggagggcatggagatgcagcacgtggtggaggtcgagcagggccgcgcggccgccgacggccggccctccgtgggccccgcctaccggagcgccttgcccgcggcggcttcccgccgcccgtcgccggcctggactgctgctacgacatcttccggtgagtggctgctgctgctgtgacgacg

SEQ ID NO: 5070 - DNA, 2000 bp, Oryza sativa
aagggggtgagcgtctcgctctcacacggagacacggtcctcaccaagctcgacacgtctaccgatgcttagcacgattcgggcacagcacaaacacagcgatcgactccgcgagtaataattgcactgttcccctaaataaagcctgcccgaccatcgcaactacgcatcggaagccgaagaggcgggggctgatgaaggaacgcgccggatcgcctacgatcgaccttcgtgcggaatagcagcgaaataacggtgcatctggtctctcatggatcatgttcaaatagatcggtcaattaagatggcgagattatttttttctccaacatactctctccttccaaaagtctatattatttggttcttttaaaagtctaagtgtgctatttataatcactgtgccatattaaatttttgatcggaacaaagaagtaatttaattttagtacttattggttatatgtttattggttttatcacatgataaatgaattcactacatattagttttggtgaaaaagaaataagactcagactttttgaaggagtgagtagttctagtgttagttttattcatttaaaaaagaaagttcatgcgtttaaaggatgtgagtgacatcccatggctaccgtttgaagtacttactatttttttcttgcatactccctccgtccataaaaatgtgatgacatcccatgcccatcatattttttttttgttgtccctttttacaatcttcaatactcccgtcgtcatcaatattatttagagaaacattgatccgacgaaaaatactagagtgacattaaaatttatgcttgctacttgtggagctatggagttctcacgagacgactttacttggaactcggaaggtgcatctagtgtgtctgtgtacaatattgttttcctactttgattcatcaacacacaaatttccttattcaacctcctatgatgattatatctatatgtagttggactatcgggcaacgttatgactgttgtgaattgtgtaactcataaagcgtgctttctctaaggcagttgatagccgtagcacaactgcaactatcatttccaaatagcacttattaccaattgctgagcgccaaattatttagttggttccgactttagtattacacaatgtgtataacattagttcgatctttgatctctctttggtacttcgtatcactcagcactactcatagcatatgtttttttctcatccatatttttaacctaagataagtkagttaaaggaaaataaccccttcactagaatttctttaaaagcttcaaattactcgaaatttcaaagttcatgactgtacaaccaaaaagattcgaagttcgctgcactgtacagctgtactgcagcagtagctggtaaaaaccgtgaaagcctgaaaggtggaggagaaaaccaacctcgcaaacaccgatacccacatgccagttcgcaacccccgggattctttggccccacatgtcagtctcagaattggcgggtacgaaacagtcgggtacgcgtagccgcgtagagatccccctctccggtgtcagaaagaaaagcagaggtgggcccattccccttccccgcgcgggaaaccccggcaccgcctccgcggagccatcatgcccttccattcccaatccgacggccgcaaatacccccctcgcccatacaacgggtaacacctaccgaatccccagttcctcgttgggagcgcgtctgagccgttcgaatctctgagacgcgcgattggacggtcagatcgtgccctcgctcgtggacccggtgcagcgaggttcccaatcacgctacctccactcacagagccaacgagagctcgcctacataaacacggcgacccaccaccccttcgccttccccctcctcggtgatctctctccccttcccaaaagaagtcgagagggttttcgtggtggtggtggtggtagggttaggggtaggaggggtctccac

SEQ ID NO: 5071 - DNA, 2000 bp, Oryza sativa
tcaagatgaaattattaaaatagtatcaaaaatccactacaacatttattccatacatagtgaaacatcacgagtacactagatgaaacattgttggtgaacaaaaaaaaatagatccccctatatagggcgtatctgtgatatgcgggtgatttgttgcaacgacacacgtggtggggcgcgttgtgggggcggcatgcgagcgtgggaggggccggaggcagggcgcccgatttttttctccccccatcgggcgccccacgcggagaattttcgaaagtatttgcattcatcggtgagcggtaactgatttcactggagcaagtaagaataggaaatatacagactgaaattgttctctaaatgatactataagttaatccatgattagttgagcgtaatcaagattccctaatccttgttttattagcttttaattaattacagctcacgcttcctgatctaatcccccctctatctcctcccaactcccacacgcacatgaaaacgatgcataaagtatcggagagagctacaaatcggacacgcccacgtcatcatgacgtcatcctgcatgcatgcatctaagcaaactttaaactattttttctcttaaatttttaatccaaatcataatccaattgcacagttaaatctgttgcaattaaatatttaaaacaagaccacacatggatataatccgataaaaaaattagcttattattgaaatatttttaaatgttgtacactgttgcaccaagtatatcagaattgttttactaagtagatcgaaaatgtttcatcggacgctgtttcactttatatgaaaagaatgtttcagcgaatagcgaaaggatgtttcaattcattgcaatatttgatcatacatagtgaaccattatgaataaaaaacaaacatttttgatggaacaaaaaatgaagcgaattaagcgaattcccttaatatagagtttccataatatgtgggtgatttgttgcaaaagaatgtttcaattcaatgcaacattatgtctatacatagtgaaacattgtgagtacactaggtgaaatatttttagcagaacaaaaaatgaaatggattctcttaatagagggtttccaaaatatatgattgatttgttacaacgaaatatatggtggggacacgtggcagcacaagggcgcacgtgggagagacgtgggcgccctgcggctggcattttccgtgtccgatatttggcttcccaccggacggacggacgatcggaagcattctcctaaagtatctgtagtcatcagttaatcgtaactgaatttctccggattgagtaagaataggaaaccctagtacaaactgaaattgttctctaaggaatgtgtcttctaaacgacgcctctaaggagggaacgacgccaagagcactgtcgtcgtccatcctaaataattagaacgtggtttttgcatgaagaatttattgggatgaagaacttattggaagaggagataaaacacagtaacaccctaagaggaaacggcctctgcaggcatcatctttgcttgcccatcaacgcttgcccatggttgattcagttttataaacaaaataatttggttagttattgttaaggagaaatttgattccatgacaacacacggaaaaacgactagttttaaaaaaaaacgcacaacaaacacaaatgccgaaagtatttacagtcatgggttaattgtaactgaatttcaccggatggagtaagaataggaaatcctataacaaactgaaacggttctccgatgatactataactacaaattaatccatgattagttgactgtaatcaagattcctaatccgtgttttattatcttttaattatagctcacgcttcctctgatccctctcttctcccaactctccactcccgcaccgcacgcacacgaaaccgatttccctccgccgcaaccggagctcacctcacctcgccggagaagatccgcc

SEQ ID NO: 5072 - DNA, 2000 bp, Oryza sativa
ctatgggctggaggagaagacatctcaaggggaaaatgtaaggttaactgggaaagcgtctgtagacccaaagagttgggagggcttggcgtcctggacctcttcaagtttgcaagagcccttagactgcgatggctttggtttgaatggactgcgccagaaaggccttggacaggcaccatggtcccttgcgatcagctagacaaagacctcttcgcagcagcaaccactataactattggagatgggaggatggcgaacttctggcactcccactggattgaaggcaaatcgccaaaaagcatcacaccggcaattttcaccgcttcaaaaaggaagaacataacagttcaagaagctctgacttccaattcctggatcagggacattaacctcctacatctcacatccggtgatcaccttcggcaatacgtcgagctgtggactctcattcacaatagaacccccctgggacaacagcgtgacaccatcacctggaaactaactctcaccggggagtacactacgaaatcagcgtacagagttcagttcttgggggcagcaaaatcatttttcaatgagacgatctggaaatgttgggcgccgccaaaatgcaaattcttcgcatggctggttatgcaaaaccrggtgtggacggctgatcgactmmaaaaacgaggctggagaaaccaacagtattgcccactttgccacactacattggaaacggtagtccatctcctcgcycactgcagattctcccaacgcatctggctggatatccaaagatggactggtcttaatctcaacattcacaactgggacagatgtgccwccgtggaggattggtggtatctactcaygcacagtcggcaaaatccrgccaaggctgtcaagaccctaatcatcctcatctcctaggaactgwggtgtgagcgaaacgmgcgaatcttttgacacaatggcagcccgccaacggcggtggtcaacaaaataaaaggagaagyggctacrtgggtccttgcaggggcatctagtctgagtgcgtttactactctgggaggaatcccgtakagtcccccccctctatctgttgyagggccatgtaaatatcagtcmtgttttttttactttcytgctctatcaatatatatacgaggcaaagcttttgccttcttttcaaaaaaaaatgtaatccttccgtttaaagaaaatcccaatccttattaagttcctggatgaacacttgatcaggtttataactaggaaggaaaaattattctaattttattttgcattataagacttatatgtgagtcacacttacacgtagacattactatgaagttagcatacggagcggatgaaacttgtttagacatgtatgacatctaaaactatttcggaaatttgaaaatatgcatctcgaaagtttagaagccaacaccccacacaaattcagagactagccatacactccctttttcttttctgatatagggttagctattgcttaggatctgctttcaccttgctagctccgataaaatataatagataactagatatatcgttttgcttatgtttatgtttatttgtacgacctattagcaataaaagtaattttatatactccatctaaaagcaaataccataaaataaggtacgataacaaaactataaaataaatttcaaaattaacatttataaattaaaatttggcttataaccccaagcataaacctaacgatgggctgtgtacggcaccagctccggattcgccaagctcctggtttcttgggaccccatagctccggattcggttttcgttggagctacagctacagctagtcagctaccacgaaccacgttgctgttgctcctcattaatggcgggggctgcatttttctcaagccccaacgtcataaaatccacccggattctccctccgcgaaaccaaacaacccaacccaacccaaccaaaatcccaccctccgcc

SEQ ID NO: 5073 - DNA, 2000 bp, Oryza sativa
attcatgaactgattactgattagcattctattgcaagattaactactgaggtactcctctaaaaaaactactgaggtactaaaaccgagctaaaaaggatcagtgagggagagctgtactacaaaatacattatgcagaatacaaggctaccaagtcaatgaggatatcagttccagtacaccacctatatattttccttccagtctcagttcatatagatattttttagaaaggttcatatggacattaaacatataattctgcataattttattgatggtgtacatatttttcattcttcagcaacgaggtaacagactttaattttattgttccaatactaggtctatccggtcagcacctatgtatctcacctgcaattctgttgcatttttaaccacggctacctaagtttagatagctcatcacataatttttactccatccattccataacataaggaatctattgtcattataaaggttttacaaagtcaatcacttaggattattttttttctttcctcatatgctactatgctcatggtgcatctttgaaatttatttattattccccgcagcaacgcatagggtattatctagtttttgaatgcttccatcccaaacgttctttgctgagacggtctgtaacccaattcgcactgatattttggtataaccgatcagaagttgaaagttgaagcatagtccattcactgcaagatgttaaataaccaacagatagaaatttaattatcatatctataatagatgatatacacagtcaagttaaataaccttttttatctgattattatattatatactctctttgtcccaaattataaggtgtatatttttacacggtttttaatgacatattttgataatcaatttattctatattatgttctcaacaaattatgaaattagcatcacataaaaatatatttagcatatatatgattagtatgattattaattaaaagttagcgagtttgattttttcttaaaaaaggacaccttataatttgggacgaatggagtataaggcccaaattaagctattaaggcactctttgtttagatttgtaagttagcttataaggaaaaaaaaagcctaaacgaacgaacaagtttttctgtttagttttttaaagccaaaaactactattacactcttaaatcaaaagttgagttgaacaacctatttttgacttatttgaagtaggagtgtgacttcttcaccattaaatttaatgctctaaagccactaaaagtctaaaccaataaaattaaacctaaacaaagagtacggagcacggtggtatatgaaaacaaacattttgctagcaaaagaagcgtgaatgattttgctcagctatcccctattcacctccatcctccagctcagctcagtgtcacctatcctcttccgtttgatccatgttttccacgagctaacataacaaacactcccaagagagacggagggaggagtcccactccctcgctgctccgaagtgtcccgcacttctcgtcttcctcctcgccgtcgtcttccacaaccaccaccgcgccgccgcctaccaatccatccagaccttctcctcccccgccgatgcacacaaatcgccggtgacgtcacgccggtgaagcagcagcactaggagaaggaggagcatatggcctgtgtactccgcctcgcctcccgctcccgctcccgctccggcctccggcccaccctcgccgccccgcggccgtctccggttccgcctccgccgccgcgggtgggacccacacccgtcgccccctcgccggcgcctctccgcggtctcctcctccccctatccccgctccgcctcgcttcccctgatgccttctcatcgtcgtcgccgtcgcccgcgtggctcctcgacggcctaaatgtgcagtagacttccttctctctagacgctagatatcccggttcatgtcaccctgtgcgtcccccctctg

SEQ ID NO: 5074 - DNA, 975 bp, Oryza sativa
tctggkcttttttttttttggaggggattttcccctttttgttttgctgaatatttttccgcgaggatggattcattccttgtgtgggggatgaattggaggarctggctaagctttgatttacctatgcaagtctggaactcggtttccttcctgggctgtttttcccgagggagcctcttggtctccgattattccctagattttcggctttcatttcgattgctccgcgattttggagccttttccccatggcttttcgcggattatcctctcgaggcctcgattcctgctattgggtcctggaactggagacataggtgaacaattgaagctttaattaatcaccaaatttccctatgtgtttcagcgcttttctaagctccgccatcttggacctagaaagatgccattgacgcagttttcgttcttgttcatgatttctctcagttgcctctctggtgttcccttccatcctctttcttgagaaaaatctatgccatgttgctattagtaggtgctttatgcttaggagtagtacaacttccctccgatccgaaggctcattcaggttcttgtatgcgcgctgcataagcaaaatcagagggtccagcacatctcgtttcgttttgtaagccctgaatctgtagcgtgcttcgattttttttcagtggtctgtgctgtttcaagtttctccttgcacgactgtacgttatgtaatttagttatgtgcttttccaaaaaatttgctccacagaaatagcctatgcttgtgcatttctattatgagtttatgaccttccagagttggtggtgcctgtatagttgtatggtctctaataactgatgctatcattacctctcgcaggtccgtaaataggccggtcgttggatagcttatctaggcttatctaatttgctgattacttgtcgggcaattgcaggagtagctggtgctagaagtaatttttggaa

SEQ ID NO: 5075 - DNA, 2000 bp, Oryza sativa
tctgccgaccttacatgcttttcatctcgcgtacgagcacgtcttcttcagctaaaaagcctcaacccgtccccagctagcctgtatcgatctccatctctcctggatatgcacaaaaacctattctcaacctcccattcctccggtcaacttaaaaaaaaaaacgcattcgtacttatcgcgaaaataccaatcctccaaaattgaattaatttacgccactaactaaacagcacaggtcgtcgtggaatatactaggtcaaccaatwtgaaaatccactcgagcgataagcaccgcgaatagcaaggcgacacatggcaaaacacggcgcttccctcccaaatcaacgcattacgcatatccacccaaccttcttggttgcttcggctactgccggttctgactagtaggaggctggggagcagggccgcgcggtgtctcggcgcgtacgccgtcaaagttcggcagcgctcgcggacggccgggcgggcggtcgtccggcaaatccacgccacgaccgctgaattttcggtcgcggcggcgatcgacccgctggtggaatttgagcgtgggtgacggtggaatttgagcgtgggtgatgggctaggtgcacgtcgtatcagcattgcattgcgacgccctactgaaattgatccggttgtttcgcactagccaatagacacacgactacacgagctgctgcctacttgggcttggtttagtgcgttacgacaagacaacttttttgctgagataattaggagagagatacttaggcgtcagtataaccgaaagttcacagtaagtgaagtagtaattgtgtagtgcatatgggattatttccaccgaccgtgcttaatttatggtttagaactgtcgaccccgtctataagtggtatcacacagtcgttttgagtatagtgtaaagaaggccatagcatgcagtctagattggttgtatttgtattcttacgtgctcaacaacccgagaagataaggagaaagctcagaaagacaactttaaacgctcactacatattacaaaattggttgacaagaacgtttggtgctaaataaaccgaagagggaaaactcagttgaggtcaactgcctatcctagatatctatcactaccgaaagccgggcggggcgaaactgcaaaagcctttcgatgaaagttacgtacgctcacgatatggaataacatataggaaaataacagagctacgacgtcgttcattgacgatattgccgacccaaaatcatcatacatgctgcgccgttcgcttcgggaactagtattccaatatagaatcatccacaagtataaaccacaagcaaagtagggcaagcgaacgaagttttcatttgatagtattcttttacgagactagcgagagaaacagagacgccgtttatccattcagcgaacctcgttcgtgccggcctacctagggtgggcaacgcaagtgcgcaacggatagagatgtccgcgttaagcattacatcgaatacaacgtcggcgtgagctgccccaacgcaagagaacatcgcgattcacgacgacctggacatcacgaggccacgagcgcatccgccgttcacagttcacacaactagaggtcacctctccttcatccggataagctcaagatctctttcttttctcactttgcacgattatttattgcctttctctgcgaacgccagccacaggcacagggcccggcccacccgcggtttccaaaattgaatttcgaatcacgctgcagcagcgtggcccacacgccatgctggcacgctccccttgtacagctgtaatactccacttccacctagcgcagcagtatataaagacgactcatctgctaattctcgaggccaaactcaaagacaagcgaggattagcgatcgataactggagggagtatacagttggaaaattcaaactagacgctgatcatatcgagggagagttcaactcaactggagcgcggag

SEQ ID NO: 5076 - DNA, 167 bp, Oryza sativa
tyytggtttttttttwttggctgctgctgatttggtggcggcggctatcttggagagagatacagaatccgtgcttcttcttgagcragctggttggttggtggcatgaggcktgragagcttcagagtgagtgccatggcgcgtgttgattgctgttggtggtgag

SEQ ID NO: 5077 - DNA, 2000 bp, Oryza sativa
gtgacgaaacaagtttaaatcacgagaaagaaatttaagggcttgaaaacatattccatttttgctgctctttkgctttgtgacgagacaagtcaaaatcaccaggcaaaggaaatttaaggacttgaaaacataaatatcaaggtgaaaacatcttcttaaaagcttgtataagcattgtctggagtagatacggcgacgagggtccgcgtttggagacccaagtacccaacagttttttactagtgagaaaaaattgttatatccatatggtatagtaatgaggagtattggatatactctacgggtttattctttagccatccacacccactaatccatggttaaaaaaaccgtatgcatagaaaaactgccaatagttatcatctgtagcataaaactccttcggctttgctaaaattatgtcgacatatttctaggctaaatacagtcagtttgtcgatctaccatctaattttcttcacgattcatgtaaagtacatctgataagctaatcgaacaacttgctcctaagttggtgactcctttttgctttgcgtgacacgtgttggtcatcaaagaatgcaattagtctatttacacagtaattacacatgtgtaatttagaaacttacatatgtaattttggtacttacattataaatacactaaaattacatatgtaatttcgagatttacattgtaaatgcactaaaattacatatatattttagaaacttacaatataaatacatgccgactattttttggtgaaaaatatggcgccataaatatagctactcccaactcctttaacctgtctcttcggggacattcgataaaactcctttaacctctcaacctcttccctagtctgttgtatggcattatcatttaatttcttgattttggaatgtagttgtttggtctgtttatttgctaactttgatgttaaaatcattgtatacctgacattatgatgttaatggatgattgctaatcatttgactatagtgtaaattgcaagtgctcaaagtgtcacgtgtatcggtacccggcaggtcaatgacagacctaggtcatgagccacttaggccatgggtcggacctaggcctaaaaccccatataaaccatgcattttcacaaatgtaaaaagacatgtcttggctcaacatgcattgagttagcctaagaccttggttaaacctgagtccgacctgcaacgggtagttattgcccgcacatatacagtatagagagaatcttgtacctacggataggtgggattgcgattttctaacatggagtcagaaggacatggtaattgacatgtgagcctcaccgttcacggatccatatatcagtgactatgtgggaggatactgtttcgaataggtatggttggagatgatacggggtaagaaaacccagcggtaaccggtattgtatccattgcacctctaaactggagtagtaggcatgaaactctgttacgtggtggtacacgctgacgcaacacacgagcgtacgcacataatcacgcacgcaatgaatcacaaaaatcacggcccaacccgcgagcattgacgcgcgtagccaccgcatccaatcccaccaccaccctctccatggccccacccgtcagactgccaccctcgcgcggggcccatccccactgacagctgggccgtcagcccacacgtgcgagtcacgggcccacgcgtcggtgtccgaaccaaggcccactcccccacgaccgtccagatcccggtcgcgcgatcacggccgtccgatcaacccccatcccgcgagtcgtctcccccccctctcggctcgagttcctcgtataccacgccgccgcctataaatagagtctcccaaggaaacagataagatcgggcacacgcgtagcgagacgaggggaaaaaaaaatcaatcaaaccctaatcagatcagggagaggcgagggctagggtttcgactcctcggcgggcgatcc

SEQ ID NO: 5078 - DNA, 606 bp, Oryza sativa
ggasatagttkgcytgagctytggtggactaatggtggactcgccgcttatcgcggcggcatgcgcgtggaggtatccggaggtgagcggaggggggkaggcgsccgtggttagggtaggaggagacggggttcaggaggggttgggggttggggtggagttgcggcggggagcttcgcatttgctggttatttgggaggtatggagccgggttgggtgggggctaatcgcgtgaggttttaagcttggttgctatgaggggaggaatggtttggggggtggtgatgcttcagtgagctgtgttctgtccagcctcgcgcggcgggcggcgcctagtggttgggagactgggagtgctcatttgattgattgatccagattcgtgcctctcggtgcctgcttaaccatttggaattggatcattgttcaattgtgtagacataacccttaggaagcgcaaacttcttagcttgctgcattgctttgacagttctagtcattgtttggggaacttagggtcatgtcccatggtcatgttggttgtgaaatgcaaatgtgctagtcagacttctacaatacacatggagagtgtatttcgatgcggaa

SEQ ID NO: 5079 - DNA, 2000 bp, Oryza sativa
agcaaccctcccacagaatagtagagttccagcagcgagttagtgtccttgatcacagccttaagcctcgtagcgacatcctaacaccaataacacaagtgtcaccatgccatcaaacaagaaaaccccattggcatcaacaagatctgttaagctaagctaagacccacatcgtaaactccggaatcaacactgcacttgaggacgccgctgatccgggccgcgtggaacagatccttcgcgggcgacgatgacgaggaggccagcttctcggcggcgaacttgcacgccttaccaatcaagcccttgtccttctccaccccgagtatctggaacgtcctgaccgcctcatacgtcgtctccaaactgcgcgaatgaacagaccaaaacgcaagtaagcatccataattctcaagcagggagccccgcctcggatcgatctggagctgagctcggtggcgcgcgcgcaactgcgcccggcgtgggacaagcactcgagatcgggacactgtcgacttactcgccgaaggatccgtcgggggaagcggcgaagagctcggcggcagcggatctgtgggcgtcggaaaccgggcggacggcggaggcgaggggagcgacggccacggcggcgatgacgaggaggaggagggtggccgaggctgggagacccccggcggcggccatggccgcggcggcggcgggtggcgcggccggcgagaggagagggggggagggtgtgtagggtttaggagactgggtgcgtgggagtggccagatctgatgagaggttgagggagggagacgactagaaatattttcgctcgccccccggtcagcagccgcctcgacgtctggactccggcctccggggaggaggagaatgctttgagattggtgctctggtttagctttgagagcaggtacaatagagttataaaccagctataatcatatatcgagaagaagagagaagagagagaagaaagcggactacagatttgtagccggctacaacacggattccaagacgttacgtgtgtatgagaggtgggaccgggtattaatgatgtagtatatttttatagttaactattatataaatgggctagtattaatgatgtagtatatttttatagttaactattatataaatgggctattatattagctatagatgatttggagccaacagttagctatactattaaacttgctctcctgtttgggccaatcttttcacttatgcttatatttattagtcaaaatttgaattttcaatattaaattttgaggttattttattaaagtttactttttagtatttacttttatatcactaagaacacgtatataaaatttttattcacaaattactattcgtttgtaaatatatcgtttggcttattccgcgaataaacgaaacgaagggtccgttagtctctgccatttgcatgattttcaatttgtttttcctgatctttcattttatttatacgagcgaattacactatagctagtttttattactcatgttacgtgatggaccatgtttctactaggtttttcacttaacagcatataagattacacttgtttgcagcttggaccagggtatagcgatatgggcttttggctaccagcctagctcaaaatcatgctcggagcaaaagagtgaacatgatctcgtagagtgcatttaaggttcacgttgacaatgccgaaacagatggtgcctttggcgtgagttgtagactggtatttaacccctcaccgatgtggtgccaccgtgcagggtgccatccacttctcggcattcggacacatccaaacgacactggtttcttctgctagcgagctgcatcatgaaactaaaggtcagacacccacaaaggaagtgaggatgtgtactttatgcatctgtgctatatactagacatctttgttcctagcacccgctgcttcaattcaaataaaaataccatcacatatctcctagtaac

SEQ ID NO: 5080 - DNA, 2000 bp, Oryza sativa
gattttattcactggtgtcaaatatatatcatctatgttaataatcacctcaaactattatgaacgaataaacattatttgcaggtagtgtttttatgtgaaaaatcatgaataatataaacctccacactaatgaaaaatcatgaatgtttttatgtgaaaagggttattattatttttttttatattatcagttaaagttttcatcataggttggttgcataatgtaccacattatatttcttaaaacagaggaggtgcattataagtggtcctcatgagtgtattgcaattgagtttatctttaatttgtggctacaattttactttgatagaatctcaatgattccatgttcaactactttacctcccattgctaatagattagtcagattatttggagtgaataatgtgcttgttgggtcactatgttgagtgctccacatagctattttaccataaaaaaagaggaaaaaggaacattaccatttatattttttataataaattaattaaggccgcagggtttgcgcatccaagttccaaatgccttttgccttgccgctgacgtggacccacatgtgcacacgtggaacaaagctagcatgccacgtcagcaactccctcccttgtgcttacaaaaatcaaagtaggtctcataatcatccatagccgctggatatacacaacggttaaaattggccaccccactaactacaactacaagtgattcagagaatttatcccaccaattgcgtaaaactatttggaatcaatcgtccaagtgaaaaaaaaaatgcatattcaccttccaccgagcaaaatttttttctcagaatttacatggatcattcaactgattccctcttgaagaagcccagtggtcgtggcattttttggggattttggagtgtagatatttatatttaagaatatatagattcgggtttgagatagagagcaaccatcgaccataattctcgcatgggagacattacgaatctcgttgtagttttacttgtcttatcaattttgcatgaattactatatgttgaactcatactaacacgtactcggctttatctggaatctcattaaatcgaccttttcctggtggaattttcttctcatactattttcttgtttaacatgcggaaaccaactaatactttggtaaaagaaatacattaaaaaccagcttataattagtattcactccaataaaaaagagttttctaaaatatttaaatggacacatacatagccctattcggaaagaaaaaaaacaagtgcagatatacaattcttaactttcataaatgtaattctaatttatatggtagattttaaaagttaaattggatctgatatacaactcttagcatatgttagatagatatatagatagatagatacactatctttattaaaaaagaatgcaattttagcaatgcacgtggacaaagatatgtccaagttcatagctagaattatattctttttcgcatggcagtaatatataaacatataaatagatggatagagagatagatagttgaaattgttttttttctagggaggggggatggaggcactagtagatagatagatacattaattccaagatactattgaattttaattcctaatatacattttttgaagggaaaaaaagaagtttgaaaatgtgacacgcccaaatgtttgtttgggtagttctttatttaggtagtagcacagcttaagaggcacatgtgtcccaaattgcgaatctttgcagcccagtaataggggggctcacctaaattaaccccccaactcgcctcttaatcctgcacgcgccgcgcccgcgccttcttcttcctctcccgcgctttctcttcccgccatctccctataaatggcgcccttcctcttcctccgcccaacccctcaagcagccaaggcgcctcccttcctaatcctacctcgatcgcctcctccctctcgactcgatcgcc

SEQ ID NO: 5081 - DNA, 2000 bp, Oryza sativa
gtatacggtttaaattatcgtaaaccatgttaacttatataaacttatattatctagctatattatatagggcatgttcactttgataccatttcaaccataccatttttttacaaagttaaaaaaaatgtttacatttagtttgttgctaaatttggtcaatacgtaagaaatcctgccaaaattttaacaatattaccgaaacttgataagatttattatagctacgatctaaataggctcatattatttatatttattacggacagtagatattgtacaggacagcgcgcacgcggccatgccgacgagtcacgcgcatatagcggagaaggagaagaagaagcagaagcagctagcatagcaggaccgaatatgaatgacacacacacaccgaccagatcgcaacatatgtcatccttgagacctttaatttgacccaacaagggtaagctaggtataccagctgatctactacgtgtgttgttgcaacagaatggatcaatcgtttcttaattctgcacccacgcgtacgtacatgtgtctgcccttgatatgcccatctacaaccagcagcagttccagattcttttcctttttcttaatttttactctctagctagtagccagattgccaaaatactctagaaacaaattaaaagactggaggagaggcttctgcagataccggccatgcacgtttatccccaaccaaaaaaaaatgaagatgagatttgcatattctttccatgcaatcccctcccatttcaccacgtgcctcccttcacggatatataaagcgaaccatcggaatattgtttcctcaggttggttctttactccagcgacacatgcaagcccttttttttttaatatactacgtgttcccttttattatcccatccgaattattataatatattatgcaaatggsgtaatcgkcggcycttagaccatttttggawttccgrataaatgggccccmgattttctaaaccccaaatgggtgtgtttggcaaacgaggtaatatgagatgtataagaatgaaaagggacgatgaatgaatgactagaattaaacgaggtgtgaaaaataaataactatgatgcaattaatattatttttaaaagatgtgatattatttttctacccccatttactgaacatacccaaagttcataccatatagtctgagtgctcctcattccagcttctagctccttccgttactttttcttttcttttcgataattcatttcctttcattcagttaaggcagtaggaattgaaggaattgaatgtaggagataaaaaaaaaggaattgaaggtagcctccgatcaaatcccagtaaacccgccccgattaaaatcaacagcctaaattttgaaggctggccagaaattaaagggaaggaaaaatcaataaatatggaaggatccccattgcattccaaactgcaacggataaaggcagtaaaaaaaaacaccatccgatcgaatattcgatcgagagagctatctaccacattccaaccgccttaactttcttacctttaatttacatttaccaaccaggtcagtaataatttcttcctttttttactcactttatccatttcgattttgctcacgtaatcaccggccataccatgacgccgaatattcatcgcacccagccttacttaatcagtggaccccacttcataaatccagaaaraaatatcgcgccaacctgccgrggcccstcytttycaccgcagcckttygatytcccgtgccggamamgtgtacgtcccaratcccccgagataaccgtcctcaaccgcaaaaccgccacgggtagaggcgaccaggctccctatttaaactcctcctcccgctacgaactcctcatcaaaatcttgcagcacaccaatccattgaagcaaattaacatttctcttgcaaatttcgatctagctagatcatttgcaaagcttgtttgttgatcgatcgatg

SEQ ID NO: 5082 - DNA, 2000 bp, Oryza sativa
gcattctgttcattcattgttttggaatagtaataataatggtaatcttgagggcgtggaccgtgatgatttcatcagtgttaggaacaaaaacagacccattgatgtgcttttcagtcaccaatttgtttgctgacgccatattaaggatctaccagaagaataaagatggtgatcgatactctttcatacatttttgtgtgtgtgtgtgtcagggttggtcagttttgtagttgtgttcgtttgctcacatctcttatcttgttgcgttccaagatttgttatccctttgttatatttcggtttctctaatatgtatattttgtagggagaaagaggatttctaatcaaagggcataccaatcccttttcagtttgtcatgatacgatgatatcagaaagcttaaattgagcccacataaaggcgatgggcccaaagcccagtacgagcatccaaccaggaaaaaggcccaagttgtagtaacacgtttcatatggcccacaaggccataacacgaaagcttggaaagtcgggggactttactgataaaatgcactccgcgtccaaaccgcgtcgagggtacatacgtcattctgctcatttaaaaatgtcaagaaagcatccatcatcggaaaattccaccgttttacaggcccacatgccgtaaagtcacagaggcttgtccttgaccggaacattcaagattacacmaatgcccttmacacacatgctgtactttgacgtttgggatgagttttacgtaaattctgaaagaataaaactgtttttatgtgaaaatcctgtagaatttgcttttgtgcatacatagagaatcaatggaacatgtacaatagtacttcctctattttaaataaaaagatagttgctctctccgtctcattttaaggctctgttcgtttgggcaggtttccaacttctattcctcgttttccgcgcacacgtttttcaaactgctaaacgatgcgttttttgcaaaaagtttctatacgaaagttgcttaaaaatcaaattaatctatttttgaaaaaaagcaaatacttaattaatcacacactaatggattgctccgttttccgtgcaggggagttgggttccgaactgcctgaaacgaacagagcctaagtgcagacatgatttttcgtgcccaacttgatcatctgtctcatttgaaaaaataaagaatttaaaaacataagtcacgggtaaagtactattcatattttatcatctcataacaacaaaaaatactaattataaaaaattttcaaataagacggacggttaaaattagacgcgaaaactcatggttacacttaaaatgggacagaggaagtatatttttaagcgaaaggactgagggaatagctaggtagaatcccgccaatccagggactgatttttttttatcctaccaattgagggattggctcaaagcaaactcatgccaccacaaatataggatgatttggacattgacaagctaaagaaaatgcaactttaccaaataagtaagtaaattttactttggaccattttatcttcttatatactatatattttagatcatttcaactctcttctgaaacatatgagagcgattttgagtatgtcggttccttaataaactatcatgattatatgttttttgacatatgacaatttaggtgtagatggataaaagagttcggggtggtttaaagtgtaaaaaaatgttaataaaaatatgatcctgtaataaaatgaaactattttcatgtctatgttttgaaaaacattatacccattactaatgaggaggggtagtttgggaaaagcaggtggtcgaaggtaaagcggaggtgacggaagacgcggtataaatcgggggtgggaaacttccaccggacgccacgccacacaagtctctcctcctcccatctccgcttcccttcttcttcttcttcgttgatccactcacccgccgcgcgcagaggaggcc

SEQ ID NO: 5083 - DNA, 2000 bp, Oryza sativa
catgaacttctgcaaactcccccaagcaagcagctaaatccacttataatcgttatctcatccttattccttaacctcggcaaggcaccacgttccagatagccttccctggtcataactagtaaagaaagaatttgccccaacctcacctcatacctagcctaactaccaaagaaatgtaattcagaaattgccccaacctcaccgcatacctagcctaactaccaaagaaatgtaattctcatgttccacaaacctaatgcaacattaaggagaccctgtcagataaatgtccttgattccaaactactattagtcaaacaggttcgaatgtacaattagaaattaaaattacaattactccgataattgagaaactcgcattggtaggatcaatccaagtaagaaacacagaagaacgtgcacaaacctcttggtcgtcgggccggcacacggtctcgtcaggttccctggtgttctcgatcgtccgcggcaccagcttctccggcggctgcgaacacccaaaatgaaaaccatcagaaaaacctaagaaacaaagcttggaggaattcgagagggggagctcgctgcggaggggagaaatcgaggcgcgcgcttgcctgctcgccgagctcgacggcgcgctgcgcggcctggccgcgctcgcgggcgagcttgcgcttctgggccttcttctcgcgcttgagcttcgcgtgcacctccttgcgcttgtccttgttcttgatctgcgacggcagcaccgggtcgggcctctccttcctcggcttcttctccctccggtggtccctcccctcgtcgtcgtcccccggcggcggcgcgtcggcgggctgcctccgcttcctctccttcgccatcgccgtcgccgtcgccgccgtcgtctcgggggaggttgaggtgtgtgttcgtttgggaggtgagggtttaagcgtctagggcaacgtggcatttgatgatatagtgggccgggtttataggcctggttacctagatgggctttcctttccaagatgtgggcacggtgcccatgggctgtatgttgcttggtttgactatggaatcaatcctacaaaatactccctccattccataatataaggcacaactacttttcttatactcccttcgtttcaaaatacttgacaccgttgactttttagtacgtgtttgaccattcgtcttattcaaaaaatttaagtaattatttattcttttcatatcatttgattcattgttaaatatactttcatatacacatatagttttacatatttcacaattttttttggaataagacaaacggtcaaacatgtgctaaaaaatcaacggtgtcaaacattttgaaacggaaggagtattttataatataaggcatgcatgcatgtaagcccttaactatgaccatttctctattaaattattactttttaaaatcctttactctcatgttctctaattctatttgatacatgcattgtatttattaggataataaaactacgagatgataataataattatttttttgtctttgggttagaggtggttatgcctttatattttggaatggagggagtatttgacatttttattagatttcttatttctatgactccatctacatcagataatagtcttcaaaatcgtattatccttttagtgcctttccagggcacgatgaaatttacagagagaaatttgtagaattttggcctgaatgggcaagatgattttgctggagttttcttttacaaccagaactgtataaaatggattgcactaaactcttcttaaaatcgtctaaaatgctttcaaataaaacmaaactaaaaaaagacgcgagatattgttcgattcgacacgacgacactatcccctcccacttccccgactcatcgtcttccacggcctcaccgcgaagccgccggaaaaccaccaccgccaccaccgccaccgctacactcgcgtcgaggtgatcggcg

SEQ ID NO: 5084 - DNA, 2000 bp, Oryza sativa
cggcaagkggamcgggaggttttgccccaggggcaamgccgccgggttcttcggcccgscgcmgccgccgcccgttamcgscgacccgggaattatttccccccccccggcctcgaaacccgatctttcttcctccttttccaatccccccaacgcagttcagattaaatctgcagtttttctaccataccaccacaatcaaaaccaaccacccaatctcgcaagaacgcgcggcgcgcccacccaagaacacacagctcctcctcctcctccccccttcccttcccccaattcctccccgtctccggttcaccaacccgccacggatttcttctcgatcaccaagaccatccacaagacggaaccggtctccaagacgcaatccgactcctccgccgagagggtcacctcaccgagcgggtcacgcgcgaacaaccgcctcgccgggatccctcctcctcctccttcttcgccgggaagacggattcagcagcgagcgtgcgtggcgttagcaagaaccagcgagaccgaggggtgagagagagaggaggatgaggaagaggaggacgagaaggggaaggaggcaaagtaaataaagggagatgtcgaggggttgaatagaaaagtggactaggcttagcttaccgtgcgggagtagtatacagaattgctgcggggatgtttttgcgaatgggtccttgtagattacagaatttacgttggagttaattattggaggagaggagagtgttgcttccggtggaagggtaagcggcgtagggaatagaataccgtggatttcttcccctccggttttttcacgtgagtgtccaattttctctaaactataattattttcgatgtgactttatgaattttgttgttatattatttatttactatacaaaaaatataaatatcatatcattaccaatgagtttgattctaatatatgaacatgtttgattggttgtattgcgcatgcactgtattgccgccgccacacacaacatgtaacacaactgtagcaataactagcgaacgcgtccaatatattcaagtaaaaaaatagagtgaccaattcaaaataaaattatcaatttacttccatcatcaagtaacaagatagtagttagtttgtgcatgcagaagaagtcatcatgttgtcgcctaaagccttaaactccgcattttttactagtaggctaggagtaagagaaaaaaaaggcaaaaaagccacatgtatattccatataaatcaggctagtccaatgtcaacactatcgtgaaaaccgaagagactttcaccagtaatttatagatgcatgtgtttttaaccatgtttttattactatgttaaactgcgaggcatatgaataggctatgtgaggtagggcaattcaacgagcgtgtaaaaccacaagttagtcaccatgaagctaagatactcatttggctgattaaggctacgttctgctgtgttgctgggataagctactgcctatccactagaaaacgaagaaagtctaatacttaatatgaaacagtttattgagcagattgagtatctacttggcattagaacaaatttaaaataaacttaacatatatcaacataacaagtgacatataaaaatatttatacaaaatattttttcaaagcatagagtaaataaaatatagtataacattattatagccataaggttcgaggcctgatggcccggcccaaggcacgaccatttggcccggtccaagcacggcacgacccgatagttgggtcatgcctaggtcgatgcttcggcacggtgggccgatccagcatggcgcggtcgaagaaaatatagtagagggatcaaattagacttaatcaaccatataaggcaaggccaaaaaaaaatgaggaatacaaaatagattttttccagccaggcagccatgtaagacacagcccaaagagttgagggagtacaaatagacttattctatagagaagcacg

SEQ ID NO: 5085 - DNA, 1320 bp, Oryza sativa
attaaattkgrgwaaayygggatagggggatccgggatcactwggaatggatgatkgcttggtcacattttattggagccttgagatgtttttgaaaagtcaaggagtgtgatattataaaccgsttttcaagccatgaaggaacgcagaattaaagctactcttccaagccacgaaggaaccgaaatagaaaattagaggtaccatgtaataatttgtaattttaatttcttagattatcgggtattgacatactgtgaaccattgaatttttttactatgaattttttkgttagacgggaatacccaactttcaaatcctggctccgccactgaggaataaataaaaaatatatagagaaagtgggaaacatcacttctccatgcatgggccctcttaattattttttttttgagggcactcttagtcttatcttcatcatatagtagtgtgactagtgtcattgaattcaacacaagtaagaccagagtagacgtaaagcaggcttagcaacaacacataaggcatggtccacaggccccatcgcgttgtattttgcaaagaaaaacaaaaagacaaaaaaacacacagaggaatattttttatatacgtaaatgacatattctctacttctcaaattgatcatcatagaacaaaatccaaaatttcttaaattgatcattatataactgcatgatataactgtatggacacaaattttatcggaatacgattaatataacatgagagaatgtgtgcatgctagggcgtaattggcatattgttttaattgatgtatacattgtggaagaatgtgtgcatgttgtcttgattgatgcgatttaaattattattggtcttggtgtataaatatatatgatgatcaatttagaatggcggaagtatttactttgaaacttataaggtatttttttcgcagtacacacgctatttaaaagtagtatataaaaatcaacttaaaagaggagacatatgagattcagagaggtagcaattacattgaaaaaagtggctgaaatcaaatagtatatgatgtcgtatttttttagcaaaaccgttttcttattttacatgtaaccttttgttttgtttccccctaaatttcccttattttatccacgatcccttaaaactagatcgtcactccagttccttgtgatatttgtacctttttttttacaaatattctttcaaaaaatggagaactatcagatgagaaatgataaagttgatcttttccgttgcttacattttgtgtttgagaagtaagcttactgatgacggtgacactaaacagc

SEQ ID NO: 5086 - DNA, 1549 bp, Oryza sativa
  misc_feature (1)...(1549): n = A,T,C or G
namamaaaatgtrtyggnatacrncankanagcakggwaatgcctacnwagctaggtrtatgcnacmkngmtaamtactgywgcaasmcgtngtaacacrcnaacanstngctacagtgtntmntaccgccwcmgtnyatagcnaacratagggntrtantacmstnccannnatrccagttttamatmtactacgtrcrccagagngtacnagtcnatnrgcagtgtaagngnnactagtcnnagkngaaatgccagyacagkngtacgagtanaangcwtgcawganwatatactracktccwncwtgngaagcganaackttgattgagacttgcmgtggtagacttctttagctaatctagaccganaaaactatgcccggttahaccaattaaaccctataccawtaaaaccctagaaaagatctggcagatacatgtaaattgagacattgacttagattaaactaagatatatgatataaataaatgtttacatcaataagattagagtgtcgaggtccwagccccgtcgatacagacaaccataacaagccttaaccttcgtcggagattgaagctgatgcaacttaactcaaaacaataactcgtcaagaaatatgaaaatgaaaaggatggtgatgcgccgaagttgtattaatcgagagataaattacaaggaccctaggtgtatatatttatacccatagaccgataagagtcctagtcagacacaaaacaaactttcttaaagataaaaaaaaaacataagttctgatcggtcatgatacaaactttcctaaattcaaaacttgcctaattaataaataaatttaggctaccatgccgtggtctttgtgactccttctgaaactcggtctcttctatataagcttttaattaactgattattatctttctttaaccgaatccaaatcttactaaattttggcgttatctggtacatatatgtatcatctttgtacctataggatattagacttgataatcagatattaatagatatcatacagggtaccacgcatgtatacagtgacgtcagtttagacatcaatatgatgtcatcacttgcagccctctttaaaaaaagatcaaactgaatttaaaaacaattcaactcaacatttgcccccactttgttggactagttctgcgtgggccatgccgtcatagagagagatagcaagtcaaaatcaaaatcgaggacgagaagaattccgaaatctccacggtttcttcctcctcctcctctctctctctctcctctgcttctctcccaaattcgccacctctcctcctcctctgatccctccccacgccgccggcgagggcacggccacaacggccgcggcggcctccgtgcgccggagacaactagactactacaactactactactactactactactctttctctctcttgttgagaggagcggagatccatccgtgcaggctccggggggtggtttcgtgtgggatatgccacacgtgcagtcagctcctgcggcggcgaccgcggcgggg

SEQ ID NO: 5087 - DNA, 1378 bp, Oryza sativa
  misc_feature (1)...(1378): n = A,T,C or G
ccgccsccccggggggntktcctgctttttttcttcccgggcgngggggcttggcggcttgtgccccgccgcaagacgagctcggtgcgctgtggcaagatagatccsacgagcccscctttgccggcggcggcggcggctattgtcttgcggtcaagtggcstgacctccaccaccaccatcaccamagccccgtgtcggtgttccagggcccgtcgtcctctccgggggcttcccgaagcccgccggcgtcgtggctcgccggccgcgaccgcgaccgcgagcgcctcttcgccggcttcgtgcgcaacgcgctgggctcctgcgttgactacgccccggcactcagcccgcggtcggaggtcggcggcggcgagctcgcgttcgagctcgacgagaacctcgcggaggcgagccccgcctgcgagccgtgcgcccgggagctcctcgccggcgcccaggctcgccaccgcatcttccacgaggagctcgtcgtgaagaccttcttcgaggccgagaaggctcaccgtggccaggtcaaaaccgcgagctacacaatctttagctattggttcttggaacacttgaattgcttctgcatcagtctcttatcttgttcagtttgtgatttgtgattagacccgggcgagtggcgatccatacttgcaacattgtgtagagacagccgtgcttctggccaatattggggcgaattcgacggtcgtctccgccgggcttctgcacgacaccattgacgattcattcattgattatgatcacatctttcacatgttcggagccggcgtggccgatctcgttgagggggtacgtgttccagtttccttggattttgataattgttcccagtggatcggttaatgagttttataatatgaacattgaacttattttggattatcacgctgctgacaggaccaacttgaattatttgatctgaattaccatggtttatccctttatatacttaaagtcaattatcatgtgtctgcattttttctaatgtaagacaactatattttacatccctcactaataaaggttcctccatttggggtcaatgtacgacttctatgatatgatttaagtagcttaggtactaagtctagtgcattaaaaggtcactttctctgtagcattatttctcatatgatgaatttgtgacaattggcaatatatttagtgaaatacgtcatagcattgtgtacrgagaaaatagattgtattgttgcaaaactaatggttgatatctaatatgttcaggtctcaaagttgagccaacttgagcaaacttgctcgtgataacaacacagcaagcaggattgttgaagcagatcgattgcacacaatgcttcttgca

SEQ ID NO: 5088 - DNA, 2000 bp, Oryza sativa
gacaccgacastggtagtatcctcattcttccccttgttgcaggcccaaatgatgagcacgaaattactgccagtgattgacaaactctgscttccaattattggagtacctgcatcttgcctctctgctggacaaacattgtaggagtacgctacagcaagtgaaatatgatactgctctgaattaatctattagaagtttagtactatatacttcgatttaaaaagggaaaaaaaaacttcatttatgataatgaatttgaacaaagcactactttggtttaattgattagttcaaaataagagtttatgtaagtgcaaacatgtatactcactgtaacagatagcaggtagtagtagtgtcaagtacactaatcaattaacccaaagtacattccggtaagtaactgctacagctaccacttttggcaaagatctgatcacaaggctcacaagcaacctcagcagttacacctcctagctagcccctatggttggttggttggcaaagttgcttgtactagttgctactctatctctctctctcacacacacacaaacaagaaacaactacagtacaagccctataccaaaagcaagattggctctaggctctagtctagccacaatgcacttgccaaggaagcagctgcaggtagtaacaaaggtgaaaagagcgatagtgcatgcatggtggtggcttggtgggcaaatcccgatacgtatcctaatatatgatactaggattctaccaaactgaaacaatactaatcccgtctagtatcctaattttcatagtattttgatattactatttattttcacatgatcctacgaaatcttaggtagtatcttaattctaagattcctactatcctacaaaatattatttaaaataagatggattgatagtaatatgaataaatatactcaagtttacataaaaaacaattaaatttatcaaaatcaatattatatgctttaacttttcaatatattatatattttatataaaaatatgtactttgtaaaatctatgattctatcaaacaaaaaggatcttacatagggtgtgtttagttcacaccaaaattggaagtttggttgaaattggaacgatgtgacggaaaagttggaagttcatgtgtgtaggaaagttttgatgtgatggaaaagttgaaagtttgaagaaaaactttatatctaaactcggccatagtatctcgatactgaggccatgtttagttccaaagttttttttccaaactttcaactttccatcacatcaaacctttcatacatatacaacttttctatcacatcataccaatttcaaccaaacttccaaacctcggtgtgaagtaaacacagcctgactacgggtgtatttagttcatgtcaaaattgaaagtttggttaaaattggaatgatgtgacaaaaaagttagaagtttgtatgtgtaggaaagttttgatgtgatggaaaagttagaagtttaaaaaaaaatttggaactaaactcggcctaccttctggtggtaggggctgcagctgcaccatcttggttgctagcatctctcttattaactcctatcaactgatccaccctcactgatcactcttgtagagtcttggtgtacatttactcctactgcactgcactaccaaactctccttcggccctcacctcacaccttctgttactgttagtgggccccacatttgcaaccttctctctctaccactctcttgcgcaactcctcctctatcgatctccttcctatatatacatgctcacttggacacaacacattccatctcccaaagcagcagcagcagcagcagcagcagggcagcagctagcattatcagaggagagagagcaaagtgtgctctcttcttcctcttctctgctactaatcaaagctagccagctagagacatctatagcttgggagaaagaagaaagctgagagctctttcttgctagctagctagca

SEQ ID NO: 5089 - DNA, 2000 bp, Oryza sativa
agatggtcctcttctcttactctcccattgttcggcccagttattatcatttttcctttttttttcttctgttctttgatatttcccggttcttaattataatattttccaagaccaacctcaaatgcatgcttataataacttcgttcgttatcaacaacgtatataattgctgtccaaattgcacatcattataatcttgagaacattcttcatttaccccttaaaatcaacagcttattttatttgccctcacaaatttaaactgcatcctctcctttgcttcttcttctctaattttgtccctataataatatgtcactcaaaattgctaataaagtaaaaatgcgtatatatgtatattaccatatgaaaaaaaataaacattcttaattgtctcgagtccaatcacacgatggagcagaggttatcttcaagagttcttggttaggaattaacatgatgtcatggatcgagtcaatatgcgtcagattaatcagtgggttactcactaattgatgtggttatggttcaccaacctcccttacctaacactgagctggaatctattattacctgatagtttattttattttaatttgccctctcttagaattgatgaatactgatggctactgattaacaggtacacatcagccataaatatttcatactcattctaaaattaagcttctctacatattaaaatggagtaggaacccccaaaaaaaagcatcaccaaacctgcaataggatttgcaattgatagtattattaatgttgaaagttgatgtgtgttgtgtatatatacacatctctaaatggcaacctaatcttctgatctctttcggcaaaaattaaactcatgtactctgttgtgctattctttttcatgaacttaaaacagaaaaaaaaatggaggataaacaaagaactataataacaaaagaggaggaaggagtaggtccaacaagaaggtgggggcccacccaccaaacaaggtgttgaaattgcagggtttgttttggttaatcaagaggttgagcttagctgaccatgtttgttggttggtttgacccttcctaatcctacctttggttggtagttaaaaaggagcacacacacaactcttgcaaatgtcagggggaggaggagcttttcctctcctccatactatcttctgttggagaacagcagcaagcagaaaagggaccagggaatcaaaggcttcctgtatagatctttggaggaaagatcctttctttctgcaggaattcaggtcaatttctttccttttcttctttttctctctctctctctctgaagtagtatcaatcatagttgaaaagttctgcaagaatcccctttctttcccccataatcttcggcgaaaacagcttcttgctaggacgcaagcatgccctattgcgtttttagttgaggtttgagtgcgaattgagtggtgccaggtttaataagctagtataagctagggttgatttagtttccattctttgtaggcgcggctcgattcgttgtggttttgggggaaattagaggattctcccaactccattcttgctctatcaggttattttcttgttatttctctcaggtagatgggttggttcttggaatgttcatggatgtaagattgggctctctaaggccaagaaattggggatttttacatacttagaagcaggagttcagttcaccatggcgccaccattctcctcactgaaatactagcacctcagctgattcttcagtgttctacttctgtgagaaaacctgaattggtactgattttcttttctttttgtgtgtgtgtgttgttcagggcattgctggtgtcctcttcagttgtgctaaatctgtgacgagtatgcgccgcgtccgggtctcatcccaccaatctccagtccacaagcttggtgattcacagatgaaattgacacccaaattccggcttgcacaacctccgcattgccgtgtcg

SEQ ID NO: 5090 - DNA, 2000 bp, Oryza sativa
tgttggattggacatgtatctagtaccctttttgactagccagtcagcaagctgtttggtagatctaatcgaatccaatcagattgactatttgcttaattgaatccaggagttgccctttgtcgatgtgtgatagctgaacaattaaatgtagcaagcagtatcaatagatggatttttcgcaccacgggcgagggaaagcaacctgtaatttaatactccctctgttcttctactatttgaatatcgttcaaaaatataaatatttttcacattatttacagcaatgtttgtccatttaattattcccaaatttcttttcaatttaccccccccccccacatagccattttacactataaaccttttaaattgtacaaattaaccctcccctccctactcaatgcgaaatggtatcgatcctatacagtgacatacacgtgccagtctagtcagaaataaatgaataaaaattagtagggaccacgtgtcagcactttttcccatcttatctttctctcaatgaggcttaccaacctccagccgccttcaatcgagttgtgccttcaacgccctccttgatttacttccagcctccactatcgagtctcttccgccgctggttgcctccaaattgattgtggcatcccgctccgcttccatcaattgcagaaacacgttgcgttgtgtcgatcctggcatcgcgtgaagacaagactgttcatggcatcgttacgcacgcctagagccgtgcatggtcactgttgtggaggaggaggctgacctggtggtgtcggagggggcaactcgaggaggtggagatggaggcggcgacgagactgggccttggaagtcctggttggcaaccgccatggcgccccctccccacttcgtgagcgttaaaaggatggcaacgagcgaattacccttgccaaagttccacagcttcctcccacaccaacgcatggctcgatttcctccatgccaactagccctattacccttgtcaatcgcggatgcatgatatataggttgggcattcactcaataattataggcatcatgtgccttctttggtagtatctgcggtagttggttactgtattaaaagtgtcatgagccatgagtataagagtagtggatttgttgaggaaaaaaaggctgaaaatgaagtattagacctaatcagttatatacatatgtaatataccaagtatccattgctatgggcttcctctacagcctctacagctgtcatgaccttctcccggagcgccgctttcttcttggtaacaagaacctaataggtggatcccactattttgtttaatatattttgtctaattggaccgctatatcagtatgtttactacacatcagacgaaaaccacatcggattgatttagagggtacagtttgtccggattaaaaatatctggttttaaatttagaggataattcgttgggttgaatttacttgaggggggtaaattcagacttaattttaagtagattttagaatagatgtgagtcgatcgattggttgggtgacaggtgcgtgctggtcgggtcgtgtctctctgtgtggccatatgtacacacacacttggtacagttgagatgggccagcaattaaataaaagcaaaagagatgtggttagcgttgaccccgttgactcgaagaggaggaggtcactcactgacaggtgggccccgcaaacgaacgaaccgctgctcctcctcttcttcttcttcttcgtcgtgtctagtagtggaggagtgaccatccccctccgagagagacgcacggttgggttggtttcctcttcttcgctcttgagagatttgagctgagagagagagagagagagagaggagggctctcgatcgtcttccttgttgcgcgcgcgcgttctctaatcgaagtcgataggataggaggatagtctcccccgcttgactcgatcttctccttcctctcaaccggggaaagcaaggcc

SEQ ID NO: 5091 - DNA, 2000 bp, Oryza sativa
gccctgatgtgctgggctggagtaatcgattgattcgccgcttctgcgttggcttgcgctgtcgtgccaacgtcatcgataactagtacctcccgcggcgcacttgttgtcgatgacccgtagtcttcgaggagatgtaagaccgatggttcgtgaggatcgagatcgattaccccaacgaatcgatctgaggctggagtcgctccctgttccttgccgttatccctgacggggacgtatgacttaggagacggggttttcatggcgccgaggagaactttgcagctcgagagatcgtgattctttgtcttttggataggacaatagacatcccgagttggagaaatacgctgaattccacgttctttgcaggcgcgaagttcagcacggacgttgatgaatacccagcaatcttgaagggtatgtttcttgggttttgtggataggacaccaagacctgatagcttcggaagtcatctttgtcggcccgtgatttatgtcggagggacaagacttggccgcatcagaatccttcccgagtttggatgtagtcggtaatccattctccgtttcaacgggtggatttttcgacatagagccgtcttggttcgtagccactgcgttctcgttttcagtcattgaaggaccgattgagatcggcatcgtggtgtaaaccgggaagacgatttcgccgacttgagtccataccagcattgttgaagttgagagtgcttggctggagctggtgttgacgttgttgtcgacgaagcttgatggcatagtagtagaaccttgagtaccaagtgcccttacctggcgcgccactgtcgacgggtgatacccgcagaccggatatagagggtattggggtacgctggtacaaggatctacgtagtacgacatcgagcaatcaaaagataagaattatactggttcaggctccttgacaggtaatagccctaatccagttgatatgggattatatggtggaaaacacaggttacaaaggaaaagatggaacttgtcagatccggcgagattgtagtcgagttgattcgactagctctcgacgacttggctcctcacaggctccggcttcgtaggctgtgtgggttgtgttggctctgagattcgatcccctatgccctcctcggggggtcccttttatatcgcaggtctagtgctcttcgagtaggactcgaatataccagacctagcacgatacgtaggtaacccggttcttatccgagaaggacttttcccgtctattgatttcgtgaaaggtttccttagatcataaaggaaatatccgcgtgcgcgtgggtatgccatgtcgacacgtaacgtatatcgaagggtagggggtatgcctgacccgtaaccctgacaactcccttttcggattttagaaagttgtcagaataacaaagtgactactgaatacccttcaattggaacgtggggcatttttttcgagatttaaatctttttctacaaaatggttgttttctagaaaaaatatttcaggtaatggctagagtcttttttttcctcaatttttttttaaaatattagtaataactatactaaacggattaataactgtttattataaagaaaaccaggggaatcgatattcagaggaagatatccccctccatcgactactcggccggccacctgcgccgtctctaccccgaggccccgagcgggccgagctcccatcgtctcatcgccccaaacccccctctcctcgcctctcttcctcctctcgccaaatgatgaagtccctcttcctcttttccgcccaccccaagccgcctcctctccccccatccccccacctccgcaagctcctccggctcaccgcctccgcctccacatccgcctcctccccgccccgcgccggctgctctcggggccccgcccatgccaggccccggcccagcccccgsccctycccctcctcctccctctacgcgcgccccagcctcctcgac

SEQ ID NO: 5092 - DNA, 2000 bp, Oryza sativa
aaaacattagcgtaaaatttaggtatttacacataagtgctatggcatcttgatcaaaaaacattagcgtaaaatttaggtatttacacataagtgctatggcatcttgatcacctagctagatgcatgcatgttgtttaaacaattatataaaaaaaatataaaatttgataaaatatattatgataatataataccctatacgaacacacaagtctaaattcgatgccacatggaaactaaaataacaaaaaaaaagttatacatgtattattcacttcctgattttattattttttagtggataataaagtctacatcgttgtagataaaatatagtcttgaatgatatctatagatttatatcatcccaaccaattgatgttattaaattttttataactatttaattcacatgagaatgacggataccatagcacctaacctgagtgtacaaattccctgtctacctgaaggtaactataaaattcctcatattacataggagtatacaataagattagcaacaacgatgatggccggccggcaccatctcattccatcaggccatcatcatagtcttgaactcgtcgaaggtgagcaccccgtctccgttcatgtcgaacctgcagatcatggcctggcactctgcaacgtccaggtgcgtgcccagcttgctcagcatcagcttcaggctcagcggcgtgatgcatcctctcccttccatctcgttacatcgcaaacgcctcccttaggcacctgcacgtctcgtcgtcgttcgtcttcttcctcatcaccatccgcctccatttctgtcaccagcctcacgaactcctcttcgtccagcaacccgtcgccgtcggtatccgccaacgccatgagcgcctgcacctcctcgtccggcatgtcctcgccgagggacgccttcacgcagagccgcagctcgatagcggaaatcttgccgtcgccgttcctgggtcaaacgatccaaagacgcgcctgaactcgtcggaggcaaccatgttcgcctttcacttaactagatcaaattatcaaattaggattgattattgagacttgacacttgggtttgttagctaggaaggttggtgtttgagagttcatcttaagctctggtatttattgttgaacatctaggcaatgaggaatgagcacactaggaatgctatcaggtcaagttcagcaatcagattaaacaatgggaattacaatagcaagtaaacccttttgcgtcaaaaaaaaaagtaagctttctttgacttggagagatgacagcacttttaaataattgtacatgatttacccaaaacaaaaaaaaatgcagatgaatgttgaacagagttctgtcctatctttgtcaaaaaaaataaaacaaaacagcatgcagtcatataatatcccttccagtaggccttccaacgaaatgatccactgcaagaactttcatacatagtgacacatgtacataccgtggattcgaacattctctacctacttccataaaagttggattccacacatgatcgataagaccaagcataatggaacaaactaacgaaaatgacctcgtcaatgcggccggctgatgctattactcaccacacgtcaaactcttgggacattacaatatacaagtaataatttagtatcaacagcaagccagaaactgatcacacgcgacgaggtccttttccctttctcttggaattggctggcgttgctcgtataaactattgctactaatcgttcaaggaagcctcctattaattgacactatcgattgactaattccgtcagtcttcagtaaccaaccatgcctagcttgaactgatcaacaaatcatgctgaaatcttgtatatataaacacaactagttaagcacgagaggtattgcattgcagcatctccttccaatattcagaggctacgtgtgtcgagtacattgcagttctgaacattttaggttgcaactggagaag

SEQ ID NO: 5093 - DNA, 493 bp, Oryza sativa
agttgggtccgggttgaarttggttaagaagggttrattgctcggggamsccttttcggggaagccgagaggcmaamcggggggaaratttcttggggatattttaaaggagccggsgtaggagggagagggagataggcacacgaaagcaacagcgaggaggggagagagagagagagagagagagagaggaaaagggagaagccaagagktgttgttskgtckagtcgagraksagaggaggaggaggagagakagrgtggcgagctgacttggcggatcgcggcggcggcggcgggggatcggagggggagcagggccactcggatggtattgggcttcgccggcgccggaggcggcgatcgcggatgggcggcgggcgggscgggggccgggggttgtaggtggaggaggaggaggggcggttccggagtttggggagggggcggcggtgctcgtgctgggggaggagtggggaggaggaggaggaggg

SEQ ID NO: 5094 - DNA, 1809 bp, Oryza sativa
tggtaggcaatgtaccgcgacagcgagacgcatgtggtgacttcgtcaatttatccaggatttgccggcccagtcttcgaagatgctcataagggtagggtttacgtgcgtgtgtttataagggtgagtgcgcgtgcgttgtgagtgtctgcgttgtattgtgtaattcttaaaaaaaaaaagagctgtagccagtagcctgtaaaggctcccagcacgagaaagattcamagctgcaggaaaatgacaagatttggcaatctgatgatctgatcagaacggcgccgcgccggcatgtgcagataaaagagcatcgggattcacgggcactgagtaaaagcagcgtcgggcccttttctagcacgaatctggatgctacaggtataccaacagcaaaacgactgaaaaaaattgggtccaaacaatatgcactaccacatatggtgccatggtcctattctccgctctttccttgccaaaaaaggggcatcgatcgcgacatgcaaccaaggctcaagtcgtgattaaaaaaaacatatagtcattccagatcattaatctaaacaagaactactgcttgacgggaggaagtaaaataaatatcaagcatgagacacatttccggctgcaacatcgaacaaataaaagaagggaaagaaaagatgctattgcatgtgttcagtaaggcacgaaaataaaatagaacaaaccgtagtcctctcttggtcaatggcaatattgatcgtaccgtgcttcctgaatccttctcccgaccgttttcatggtcacatgcacctgaaaaagagaaactaaatagagaataaagtgataattatcatcaaatcaacatgacacgacagtaccatccatccatacagaccacacacacaaaaaagaagacattaccacttgctaatacaattgagatgtgcttctatgctcctcagaaaaaaaaaagcacgaatgttaaagatggtgaatggtctagattaaaaggtgattaacaggctaacgttattaggaaggcaatttcgtccttgaggtagttacccatatcccaaacgttcaatcctgatgcagcgccgccccgactgccgccgcattcgatcgcaagtacaagagaaaaaaagaaggcattccatgattccaaaacagcgaatcctcctctgttccggctacacatgtgcagcacctcaatccaccatttgattggcatccatgttcttgccaaatcaaaaaatgagatgggggtagagataagaagcatgacaagaaaaatcagaaatgggcgaaggcagggagcacgccgcggtagaccaacgggacaggcggtgtggcgagaggaggaagaagggggtggcgcagcaaaagtatacgggcgatgcacggtggaggaagcgagcacgatcgctgagagtcatcgatttgtaactcctcatcggctgatcgagtatgtgataacttcacaggacaaaattgcccctccctaatgacttttactctgttaagcaacttttaatctaaatcattcatgagctttaatatccgtgcaggtttttttagtgagaagcatagaagcacatcccaatacaatttcttttaagttcacctgctactaaaacatgttctgcgacgtggataatgaacagaagataagataaaaccacgaagtatgaaagttaagcactcattttcccattctttcttcccaagtacatcacttatataaagtagcggatccagaaaaaaatagcaggtatcctatacctattaatagtttacttatcaagtaataatattgtaattaac

SEQ ID NO: 5095 - DNA, 2000 bp, Oryza sativa
ggtcagagatatactccctccattcctaaatatagagcattagagcgtaactgtcttgtacgcatagaccaaagagtggtgtaattatccgttaaatcaattagagtttgctcgtcccaacacgtagctttgcttcgcatgcatgcagcaccaatcacaacattgtcccgacatgtttcaatgctcgcatgcggccatgcataggacaaccaagagttaaagtcttcaaagcctacatgcatccgtgcacatgaataggatttgaggaggtgccgccctatattctggtacgtggaaaaaaatatagttgcgccctaaatcacggaatggagggagtaataatcatctcaagagtaaatggcttgcgtcgtgataaattttgacacgcgcttatgaacgctactcaccataacgcggtcggacggtagtaagacaacagtttcatatgtgtagtggctttctttttttcgaattaaaaacatcactgtatagaagtggtgcaattcaccgttaagaatatcgttttttagataaaaaaaacatacatcaagctttactacatgtctaacataatctagtccttcaaatattggggatctcagcttgtgaacacaaaatagtactgcacacagaaacgctaagaacaaaacgtcaactcagctaagtctaagcaaataaattaaacaccaaactaacttgatcaaccaacactactaaacagaaacgggcaaaccagatcggtgtcatccatgtcttctttgtcaaatcttccttttgcttgaaacttgtgcaacttagcaaatatagagagctggtggttcaatgtaggagggtaagagctgcacctgcaccaccttatttaggttgtgtttagttcaagttaaaattaaaagtttggttgcaattggaaagatgcgacggaaaagttaaaagtttatgtgtgtagaaaagttttgatgtgatggaaaagttgaaagtttgaagaaatattttggaactaaacacggcgttagccaacaattaccgtggttcaatgcacatattttgtattctatctatttccagaatttgaggatcgatggatgatattgaaagtttagaggaatctgtttatacgcatgctaaaaaaaagtggcaactactacgattgatgattcaccagagatagagaacagggcaagcaaaaaaagaggagcgaggatgcatgaaaacttttaaaaaaaagtgtgacaatatatatagaacaatgtttttttaaactttacacacgtgctacatcataaggttttaatataatacatatatttgcaattaatattttgctgttatcaacccggataactttcctatgttccaattatgtttttataactctgtttcccattatagctacaaagacatatcacagcttcacaacacatatactattttctagagcattgaccatagcaaaagaaaattttgtggatgtgagcatcagtcataaataacgaacaagtggctaaaaatgaaatactgtatctgtccttttcaaaattgtcattagggtgcccatcaattagtttgattaattacaaggcagctataacggtgtaacctaccgatgatttccatcacaacaaagagaaaaataataccagacgtagaggtcatataatcaacttgaaagttgaaaaacaatagtccaaaatgccagctaatatcaatcgcttaacagcaaagaaaacaggtggcggccaggggcctatacttaactagaaaggaaacaaagggccttttttgaaaattccaccaaccaaatttgatttcttttcccatttccacccccatcatttcccctcccactacccaaagcgaaaccgacctttcccccttcttctcccctctcctacctcgccgagatctagccctagggttcgccaacttcaccggcggcgaggagcacgtcaccggcggcgagcacaggcggagggcgaggggagagagagagggaggaggac

SEQ ID NO: 5096 - DNA, 2000 bp, Oryza sativa
agccgagagccgagtgtgggaaagggaatgatatgtgggtcccacgtgggccccaccatattatttgttggtcgctgacatgtgggcccacgtgggccccactatttctaaactattcttttgtgtgcagctgacaggtggcccatggtttttwattattttttcgagatataattgccacgcaagcgccacgtcaatgccacgtgggacgaagacctagtcaaacaagtcacataggcgccacgtcagccaaaactgccttcaaaaccgccgaggggactcgtttgtccggttttcgtaagttaggggacgagtcgtacccggttttgcggtctgggacgaaaatcagaatgagcagcaaatagagggaccaaagtgaacttattcctttcccaagggctactttgatggccgttttgggccacaaattggagtccaaaaggagttggtcaaaatcatactgggctgttgttgacaggttgtcgtctcgtggactatttgccgcggaactgtctatccatttatcgggtaaaaaaatcacctagatttttctatccttagatttacatccaacgaactacagaagaaaatwattaataccatattatacttacagaacattttattaaaattacaatccatttacatatcatatcaactacatttacaaatgtaatttagttatataggactataattttatattttattttaaattttagtttcaaatgtcttattttttcaactgttaaagaaatcaatttttatttagaaaagaaccgggcctaagaatccaatgcatggccttatccatacatgcagcctccatcaccaattyttkccccaawtytkggcgcacatcatgcggccaaaaaatggtgaaatacctgggaaaaaaatcatacgacatatatctagcaaaaacgatttggcgcccycccaatgatgtattctcaaatgctacttttwcgggwtaattttttttccattaccattggatagagaagatkttttttttcytttgtattatttttgagccttttaggttccmcgtcaccattgtagcgtgaacggtggacagaagacaaacttggccctggcccgaaaagaagaaggggaagaaactctctggtgtgcaccgttgcctctcctggcggcgggtagcaaacgatgagttagggaagccgcggggtcggccttactccgccgtcgatactgggagagcgcggtgaagagataataggaggggatagcattggctgaccattaatgacgagaggttggtgtcgtctcactcatttatatctgtagttgctcgcggtactcgggggacgaaggcgatggccatggagtaaggctccaatgatgggctccacccctggatctagagctccctgctggggtgctccatgctcataggacaatgacgatgatggtgatggagtcgggtactggtgatggtatctcgttaccaagcggccatcgccactagtccacaatggtgttggcagcaatgcagtgaaggagggacctagaagatggtgaacagaggaaggaagatcgcaaggtggagagctctcttgagattgccgcagctcgccgcttagggagacagagggtgagtgaagggaggagaaatgtagaagggtaagacggttattttgtcgttggagctaatgatgtggtgtcttacggataaaaaatagcacacgaaaagacaaacggattgtaatttatcattggagctaatgatgtggtgtcttacggataaaaagtaatacacgagaagacaaacatactgacacacaagtggcatttgagaatacaccatcagagtggcaaatagtccaaaaatcccctcggcatgcatgcagagacggtagcaggtcaaccgctgatcgaaacctcgtttttgtcgatcccctccaccgcatcactccctcttcccctccggcagccggcctcctccaatccattgacctccacgcgccgccgccgcc

SEQ ID NO: 5097 - DNA, 2000 bp, Oryza sativa
accaattctatacttgtatttggacgtagcggctttccttgggcttatttaccgtcatcatcaggtttcccactagattagcaacaagttaccgccatcataaggcctttctaagagtactgttgatgatgattaagttaatgcgagatcatccagaagtacgaaaccattcctgtgaaacagcattatattttcccccacaaacctgacagaggagagcaacatatcctatgcccacaaacttttttcacaccaactagtaaatatcacaaaaaatctagaaagaattagacatatactcctaaattaatgcacatatctgcaaagtctcaaattcaaattcattatattttagcagtaacccaaaaagtaaaactgtcagattttttgcctttttttgttatggctaaatataataaatatgagactttgtaatatgtgtaatactattaggagtatatgttcattttttctagaatttttatttttcgtgacatttgctaatttgtgtgcacaggaaacttgtgtgtataggatatgttgccaaattacttcacctgatgatcaaagcagactaaatggtggtaaaatttacaaagttaaatcttctcccacgataaaagattaatctcctatccaaacattttgcccatgctctgctcacacggctctgggaagacaaacaggtgcaggaaagaacaacctgaaactttgcttaaattaaaggaaaagcaaggacgatttctcaaaatcttacctcagtaacttgcatcattcaggaactttcaatatcaattttgagagtaatctccttcactttgtcctcagctttcatgtacgagggcgatagccctttgactctgtacatgaatttcaccaactaattctggattcttggtggtaattttgatttctgtgtcttttttcctgaccttagctccgttgttccagtcttgcttacaacagtgccacctagaccaagtagtcctcttctgagcttttacagggatatatttacctaactcctaccactgggcagaaaagtagttacaggataaggtaagctgagttttgaatgtgacctcttaccaaattatatagctagggagttgcattgattttttttttaactatgatcaggcaaaatgacacattacttatatcactgggggaaacaatcaaattaaattagaatatcagatgaataatcacatttggcatgaatatwaaaaaattctcacactggcatatcatgagaaggtggctttgatagaacccatccttattttcttcatctgtcacttgcatggtctgtaaggacgaagagttttcaaccaaacaaaatataattacataaatgcaccatttttctacattaaacctctgtgcattacagttgcatcattacctcaatcataagtaccatagaaagcaagcaatgttggtaaaagaatgggtctagaaataccagatgttttgggtcgaatcgcgttggaaaatgcctcacatacaacacaagcacacaacaaaatggtcccaatctttggtaattttccaaagtcaatcctaccataaatatacaccaaataaaatctacaacattcaaccaaatataatatgcatgcaatacatataaatctcttaaaaggagtgatacttcaaacatggtaataataatttgaatcagtcagatcctaattcatggcagataacttcatgctcccctgccagccaatagcgtacagttgactcgcattgctctctctctcgcttgataaaatttggggccttcaccattaattggatgattttttaaaaggcatccattgagaggagatgacagtcacattcttgactgattccattaactaatacacaactgatgtgcctattcagccttcataacatcgcgtagttgcaagtgcacaaaattttagtagtggagagttgctaaccttgcataagaaagggcttctcagcaacctgaaatcaagatcact

SEQ ID NO: 5098 - DNA, 1114 bp, Oryza sativa
cckrgggsccccccccccccccccaccttccctyccccgctcctcgctcgagtttgagtagttgatggtgctctggctctgctctctagtagtctgctagttcgtgatttgttaggttagtgtgcggtagaywgwstgtgtttgatcttgagttgtggaagtgtagggagtagcatgggcgaggggattgaatttggtcatactatatgggggtagtgacatttttttttccttttttgagggaaaaaggcagtgacattgcatttgaacacttaggaaagaaccatttagcccatgtttggttaatccccaagtgggagggattggacgagatttattcggggacgactacacatcagacggccgcagttttacaaatctccggacggtgttccacaacgtattaaagagatgttgcaatgtttcactaagagatgttgcaatgtttcactgttccaaataaatgtttcaccataagttgttgcaatgtttcactgttccaaaaaaaaagtttcatcagagttgtttctttgatgttccattcttcatggaagaatgtttcattattttaccgaaaatgtttacagtcggatgtgaacactaaaaaacgcatacttcaagagcaaaacatatgcaacatccaaagaaatcaactgcagcatcagtaccaaatgcaacatccagatgatgattgcaacatcaagaaataccaaatgcaacatcaagaaacacttgtgtgcaacataaagaaactagcaactagcatggaacaaatccttgctagctcgatgctcccaccatcctcaccttcgtcggcgagttcaaggccatctccatcaacggcgcctcaagctccagcccgcttcctcgcagtgccgccgccaccggcgagctcagggccctaaccgtcgctggccgtatctccttgtgacgttgacaccaccgccgccgagctcgagtcctctttgacaacggacaaccatggtgcccccgccgccggcgagctcaaggcctaaccggcgtcgaccactttctcgcggtgttggctgaacggctagaatccggccacccgtgacggtagccccgccgtctacagcggcgctagcgccacctg

SEQ ID NO: 5099 - DNA, 2000 bp, Oryza sativa
caaaaatcgtcgaacaaaacatgaattaagctacgagcctatgaataatatatatcactataatctatgttccctcttgactttcgtcacaattattctcgcgcttgtggctattgatcatcaaaattatttgggctggccgacaacttcgatgtatacaaggatggagctaaatagattatgaaactctgtaaaacatagtgataataaagtttgttgtggtccatatcagtatatatctgacgagaagattcaatccacgcgggtgaagatattagagagaaaaagtgtacacccaaatactataaacacatgcaaaataaacgtagctcaactgattgaattggtgaagtcaactcactcaagttcaaatcttaaacgtaacacgacgcctttacggctaattagtctttcagtggtagttgacgtacttatctagtgagatgtatgtggtgacttcttgaattttaaaatatgttgatcctagtcttctgaaggtattcatacaaatagattttacgtgtgcatgttataaacatctacgtttatcctatgttttttcataaaaaagtagggccatgtttagattctaacttttttcttcaaacttcaaacttttcgtcacattaaacttttttatactcacgaacttctaattttttcgttacatcgttccaatttctttaaacttttaattttaacgtggaactaaacacaggctagaacaacatattcgtttccctaaaaaatattctcgattacacactcgcatcaccatcccacagctgttgttttcatcacgcacgcaactcatgcaaagtaaatttaaattccatgattagaaaagggggctgcgactgctatacagtgatgcaaccgaacacggccacctgcagagccagagagagacgcgcaggcatgcgaatttggcgaagccgacgaggcgttcagattcgtagttgagacccgtacgacgacgcgggcaatccacacaacaaaaacccaacaccaaacagagccgtccccatcccgcccgccgagctcacaccacaccgcgtccgcgtgcgcccggtgcgccccagcagcagcaaccgatcagctgatcaatcaactaccagtctaccacgcaccgcgcgtgcaacggccaccaccggcagcacttaggccagcctcaatgcaataaccagaataatgtactcctacgaagcattaaataaactatcatctaaaataaaaaaaataatatgacaaggaaatagagaggaaaaaagaaatatccaagacatagttttttcacaatatccaagacatcatatgaaataagtagtacttcattaaattgaagtatgaaaaagtagtgtctaatacttactttcttgataacgtggagtttatggaaactatatttaatgtattgggctgggtctggccttatataaaccgtagtgatttattaacatatagttaattatgtattcagtggtaagtgacgtacccgtcgacagcgaggcgcctgtggtgacttcatcagtctcttccagaatttgccggcacagtcttcgaagatgctcataggggtagggtttgcgtgcgtgtgttcataggggtgagtgcgcgtgcgttgtgaatgtctgcgttgtattgtgtaattctaaaaaaatatatatttgttatttatttataaattaatataatcttttaaaacaatttttatataaaacttttttagaaacgagaggggtgagttggcagagccaaccgggccgacgcggccgcttcatcaaacgtagtactacccccgcacgtacgcgccctcttcccctctcctctctctcgcctgccgaaataaatcttggcgagctttctgattctccctttgctattgctaccttccgcggttcacagttcacactgcctctgcctcctcttcttcgcctacaaaaggattttggaccgcacacggttcgcgtgcgtgcgtgcgtgcttgcttgctgcaagaa

SEQ ID NO: 5100 - DNA, 2000 bp, Oryza sativa
ccaccatgcccaggtggcgcagcgacacggggtccactggtatctgcctctccttgtccatggcggcgcccatcgtcggcgtctcgccgccgtcaccgctcttcaccggcgccgccgcttcgccggcggcgaggtcgagatcatcgtcgcgcggatgcatctgcatggtgggcatgatcgtgttctacgtggtgcatgaattgatcgacgggggtggcggtggcgcgcgcttaaaagaaaaggggttttgactttgggtggagtagtggagagcatgaagagattgaagaggcgtcaggtaatggacttagtgccggattggtggtgccttagtggctcagatcaacatatttctcatttcttttcatttgtgtcagcaacttagcattttctaaatgtcaaaaaaaatagacttctccagggaattgcattacctatttctatattctactagcagtttgtaaccactgaaacataaaattctattaattcatcatcgtactaagtccaaaacaactttaaaaaaaactttcatgctgaattttctctgaaaaatactccctcaattctataataatcttatttttggatcctcccatttatcccaaaataaggttttttaagtaacaattacatcggaatttgtgaaattcgtgaatgcattgagatttgatgatgtaggagtattttactccccccgtcctaaaatataaatatttttagacttggcacaatcttcgagatgctattttgactaacaatatctattaaaataagatgttttaaataaaaagagttgcatattatgatagtttgtttaatgataaatctagttacgtcaattttacatgattgatcttttttattttttttgctattaatagtcaaagttaaaaatgtttgatttgacactacgctaaaaatgcttatattttgggacggagagagtagtttttttggttttgtattggtatatgtgtgataaataaaacatatacttattttgggacagttggaagtacgtcgtcaaatttgtaaattgtagcgaaatgattcacatcccacgggccaaattctcttgggccctcggtattcaacagtccatcaaagagaggcaaccatccaaggcccgccccgagacgaggcctgataggtagaggacaaaacagaagctacaacttcgtgagaccaatgccaaagcaacaatgcatttcctttaggatgaatgcagctattaattgatcagcaaggaactatctacttaataacaattgtgtaaagatgaatcaatctaccagaatattttccaacaagtgtggcataaaaattaaaaaactgcgaacatgatctagcaaatccctgagaaaatctaggcttgtttaaagtttaaacacaaggaatgcaatggattttgcctgagatttgactctgcatacagggttcatgcattgaattgtaaagtcaactatcatattatgattattgtggcctgagagatctcatacctgagattttactccttccagtatgtgccgcgcggtaacaccatcaccacgattcaaggcggctgaactgcaaaggctgaaccactgaaggcaactagatatctcaatgattagattattaccatcatcattcatttttatatagaagtaaaacaggattgacaactcatgtatagttcacaagtcaaccataatgatgatgagttttgaaggatactaggcaagttatctgagctaaaccacatgggaatagtgaaatgtacttggacaggacttacatatgcctcctatcaaagcaaagcctccttcctattcaaaccgcatcatgtttcaaaatcaaggataagaaattcctaataatcccatcacctatccaggccattataaatacctatcttactgcagctgtagcacatcaactttgagaagagtaacacatttttggttgaagagtaacacatttggttgaagcactatattccagtgttccaggaa

SEQ ID NO: 5101 - DNA, 2000 bp, Oryza sativa
atttgtgaataaaacttttatatacgtgttcttattgatgtaaaagtaaaaactgaaaaataaactttgataaaaaaacctaaaatcagttttaaatttaaaattaaaaatttaaattttggttgataagtataaggataagcgacaaggcaaggcagtatattccgttctcatttttcatagaatcgattgtagactcactggagcagctattagaaaatgcagctagcttatcaacgggcaccagcaccaccaccttagtcctgccgtcgctatccgcccgtggctggcgccgtaagctgtatcagccacccaagaggcaggcaggaaatatggattatggaataagcgtggaaacgagagtaaccccgaaggcgactgatcggcgatcggtcgatcgatcgggcgagaggaggagagagaccggttgtccattgtggtttctgtcgcgacgaagcatccaagaaagagggagataggcatcgatcatccatcggcatgcgtccgcacgaggtcgtccggcccccatgcccgcgacctcacgctcaatttttcctccacgaatggtcagcacaacacgtgaggatttgtcgaaaagtctatccagaaccctttttttttcattttccttcgtttattgatcggatggatagcgacagcagtttgttcttcctcctctggtcataactcattaatctctctatataggttttggtttgatcattcgttggatccagggggcaggttcagtgcacccagagaatggttgggcccaggcgcagctgggaatccgtttcggtgtccagacggggcaacgcaaaggcaaacatcttcttctgtctttctttcccctttccctttttttttttttaagaaagggacatctgaactcttcataaactgacaaagttcttcttcgcaattcatccattcagatactattagcgtagtgcaatcaatcgatattgaggtgcaattcgaagttctcaaaaaaaaaaaggtgcaatttgaattactagtaggtgctgagatgcaatgtcaacccctctgaacgtacgacgttgtaaacttctaaactttaatggagaagagcagcgatgacgatctctctctagaagagtccacacctcaagttttactggtggtattaactggcaactggcaagcaggtagtagtactattcaatgacaacgatgctgtcgcgtgtaaatccacgtggcatggtaattttccatgaaatggtagtttgagcatgtggggaagcgtacgagctcaaatcaaattaggaaatcaccctgaagtttcacctgtcgcccctccctctcgattgcgactagattgccgctggtttttcttcaaccgtggagcattgacgggtggagtccggcgagtcatagacgaagaattgaatcactttagattcggtaatctaaagtgaaacaaattcgctttcttgccctctctcgcgtggcggtgtgtcaaacctggaaagtccagtggaaagaatttcgtgcgtgcacacattttaatcgcgttcgtatatgttctgtgagaatagtttcgtccgtcttgttttctcctgcgtcacaattgtcccgtattatctcatacttcatcagtgaataatttcatgagtattgttgactgtagtatatacattagacagggtataagctactaaagaggtgccccgtacgagaaaatctaaaactaattaacacttaactcaaaagctataaaatcatttgtcatgtagttagatgctgacgtttaggctacagtgttgcacccaatccaatcgcaaaacaatttagaaaccattaattaaatcacgtgggggataataacgcaggaaagttcaacgaaaccagaagcgagacgacaaaagacgacgcactcccactctactatatattctggcgcgaacccgactccctccacaattccgctagtccgagtcaaaaccaaatcaaattcaaattcacgggataattcaaag

SEQ ID NO: 5102 - DNA, 1324 bp, Oryza sativa
  misc_feature (1)...(1324): n = A,T,C or G
atatagntatacatttgtataaaaattttgaataagacgaatggttaaacatgcgaaaaaaagtcaacggcgtcatctattaaaaaatgagagagtataatctactccctccgtcctaaaaaaaaggcaaaccctgggtttccgtgtctaacgtttgaccgtccgccttatatgaaattttttataattagtactttcattgttgctaaatgataaaacatgattaatactttatgcatggcttgtctttttaattttttcataatttttttaaataagacggacggtggggtttgccatttttttttgatgaagagggatagcgaaagataggcagatagcacgtgataaaaatgtgtcccgtatcaaacaaaaaccaattcctatggaagaaaaaagagagagagaaaactcccacgttgaaaaagacctcaagttattatcactgtttctctcactctctcgtgatactgcagtagcctttttccattttgttcctcgctggagtagtaaattttcatttcctttaaattttgttgttttgccccccacacctcctccccactcccccacttctcagttcgtcggctccaccgttccacgactcgcgtttgctttcccttcttcccacttcgatctcctcgaatcacgcggtgcggaagtacgtggtgcgagtgggaggtgaggtcgctcgggaagtagcagtatatcaggggggaggggcgaggcttgactggagaatggctgggagacagagagactgaactgagctcaagccgctccgggatctccatcttgagttatccaaggtgagttttcttttccccctcttggtcaggctcgttcaggtttcttgggaaagtagaaatatttgctgttcggttatgtgcgcgaagatattaaatgtgcttagttttgcttttaggattttaggattcgataaacttttggtctagttccagtggattagagttccattcacaaatccatgtccaatttggcgtgttaagctgattattgtgcatttctctgcagaactgagagtgctcccggctcctacatttgccctctttgggcaccaataattggaggagcaggctgtggattcttgatttcttggtggctggaatcctttcaattacagacaagttgcaggttgcttcaggttcttgaaattgtaatttggttggttgcctgcggtccctacttcctggagctttgcttatttctaagaatcttttaatgctcaaaactgcttcaatttcattattttgggagagtaatcacctcagtggttgagcgctggtgatgctaaagttggatg

SEQ ID NO: 5103 - DNA, 2000 bp, Oryza sativa
cctctctctctctctggcgcactcgaaagaagatactcattttttctgtccgggcccacatgtcagagctgtcaaatggttaaatccaaacagaacagtgatatacatgaaggttcaaacattttagtggcacatagacagttacatctttttttaatggcacataggtaaagaactccaaaacccaacccttgtctagtgcaagaggcacacgcacggcttgtccctagcacggggagctccccgcctccgcttcaaaggctccggtccctcccaaaggtcccgaaccccggggagtgcctgaacaaagctccaaggaaccttcgccttcaggtcccgtttccatcgtgcatcagtccatggccagcagaagatcacaaatctgccatcaaaacacaaacaagatcgacgtcttaccaaaattcctgcaaccaccaaagatatgccagagttttggttcttattaattagtagcagatcaagggataatgttcaaacactattatcccatattttaggcccccttttgagtcaaagggaattcatatgaattttagaggatttttttatatagaaatttttcctatatagtcttttgaatcaaagaaataaatctatgaaaattctatggaatgtctcttcccatataagttttcgaggaaatttaacatgtggtagaaacttatggaaagaatcctctgagttttcatcttttctcaaattcctgtgttttttctgtggcttattcaaatagtcgttcttatgtttttcctgtgttttgcaatcttctgttttacacttgtatttatgttagaattttacgtttttccttttcctttatttttttatttacgtgattcaaaaaggcccttaatgcaacaaccaaaatatatatgacaaagttttggttagcagctaaaacacagctctcccatatcatatcttagtgacgaatctcaatgcaacttctgccttgccaaacaaaatctgataacatcgatcgctggctcgaatgaagccaattagccaaaccggcccgctcttctgatccacatcccgtcgaacggcgagcgagcgctggccaatggccacagcttgtcgtgcgagacgccaccgacgacaccgcatggattacgacgcattcgtcgcggctctgaattaccagacctggcacggttgatgctcgctggaaagggatttctcctgaagtgtttagtttagtttacagctgcacgtgctgattcggtttgttgctatcctcttgatggggaactgatcaactgacgatgaatttgctaaagcaagcgcacttcaagatgtcacaagaaagggggaaaatcaggtgtgaatcacggctccacctgttatttactggagattgagataccggccggcggccgttgctcaggcgagaaggaagacgtcaaaccgttaagggctcatttgaatcgtacgaatgaaagaaataaccaaatagaaaaacccacgatcctactccctccgttctataatataagagattttgagttgttgcttgtaacgtttgatcactcgtcttattcaattttttttgaaattattaattattttatttatgacttactttattatctacaatattttaagcataacttttcattttttatatttgtaaaaaaaatttgaataagacgagtggtcaaacgttgtaaggaaaaacttaaaatctcttatattatgggacggagggagtacaaagcagaaaaaatcgtaaaaaagatcttttgattcaaaaggtcctgagcgtcaggtaagaagaagacaagcctgaacgtatggtagaggtgacacgacacgatcaacagccggcaacctgaagttctgaggtctgaacacaatagttcgagcagagtaaaaaaaagctccaaaatccccaaatccaacgccatcgtagcaacccacgctactactccggagcagcgaccaacaccaactacctcgcgtcgcggcggccgcagagg

SEQ ID NO: 5104 - DNA, 2000 bp, Oryza sativa
cttcgatttcgctaattacaacgggaaattccaaaagaaaaactgaaatgatagtagaaatcacgtggtttactgatcattggacagtgggtgatggcactggcctttgttcattccatcgaaggtgacagtgaccggccagcacctgtactgcgagcattttcacgtgttcatgtacccttttattcataaaaataaacattctaagtacttcaaatttattacaaatactaaaatatcatagtactattcgtcttataaattacttcttatttaaatttcgtttatcctactgtcgaaacaagaattcgacaataataaaatagggtagcgcacgagacctaaaagtgaatggatgcggagacaaggatttagacaggttcaggctctctcgatgagatgtaataccctactcctgtttggggatttgaatccgtcgggtgtattatagatctgacgatctagttgtgaattataccccctagagggcctcctgcccaccttatataggatggggggcaggattacaagatagaaaccttaaccaatacgatatcagtttcctaaatctactttacaatattatcaaatcaggactttaggccgttccataatatacaaggaaacgtaatacccaagtcatgatccgttacatatttcataaatataagttatcccctataaccagtcggataaccataccgtgtgtgtatgaggtacccataatctccacacctacatcaacctgtcctcccatcccctatacatttctcattaaatgaggagcgtcaaagttctatcttcttgatcttaatatctacttaaataagctagaaatgcttatatttgtggatgaaagaggatatatcatattatggggatgtttggttattaatgagattggttgacaatatgatattgaatcttatcgaggtaaggtagaagaagacatgaactgattttatgttttattgatttactacgcgatgactttattgaaaaagatcatgctcacaatatcttttttcacttaggactagatatccatattatcaccattagtattataggagtgtttggttcatagccacattttaccaaatgtttagcaaagttcaatcaatctggtctaacgtttagttttttatatcgcttttgtggcatgctacaaaatccttcctaaagtttgtgtaattcaataaggatttcctagccacacaaattatggtaaagcagcacctcagttcaaaacgtttagcaaattgaaacatgcagccaaacaacccaacccaataagacaatgacgccgcacaacgtacagttcatatgggaaagccattttaccaaatagtgatatttttataatgaaaatttgactatcaaaatatgacgtcatacaagtatcataattacttaacacttcacatatataagtttctcaatatgtagattgagttttgagttagaattttcttttggaatgatatgacacaggagagatactcaatattcatcaaaatatttaaatattttttataattaatttgttcgggagtttataactaattaaaccacctgatcagcacagtcagcaactcagcattattcaagcgcttgtggatcccacacacacttcccatcttcgatcttcctataaatgaagtggccatgcattccactttttccatcccatctaaactcgcttgagcttgatatgccacagatcaaggcttagaagagatagctaattactctacgctaattaatccagcagcttagcttagcatagcttatctatggtttgccacgtcttctcgtccttctcctcctccctaattcgtgtgctggaggcgccgctgctccttccagctgcttcggcttcttcttcttcttcttcttctccggcgagccggagcggtggccgccgccgccgtgcagcccacgtccgcccttcgccggcgatctatcccggccgccaagaacttgcctctcactcatcc

SEQ ID NO: 5105 - DNA, 2000 bp, Oryza sativa
gccattcctttgggttgtcaggtccaatgaggagcacaagttatctgtccaactccgaaaaaagtgtgagaagagaggactaattgttcccttttgcccccagctggaggtgcttgctcacaaggccacaggtattggaactaaccaagaactcaaattatattaatcttgataacaaaaagtatacaaaagactagtgaataagtaggtwagacaacaataggctaaattgcaagkttttttttacctggcaccaaatatttatagtrtrgktkgtttcttggtccgcacttgtggattggaactcgacattkgrrgsmawttggttaatggcgtaccgcttggtggcaattgccacattggggctgaccaaccaaccatttcaaagtatggtggagagcttgttggggcatgggcgtgcgagtgcagcttggacaagagcggcatcttacaaagggaaagaggtagagagatgcatccgggaggtgatggattggtgacaggaaggaggactacaggaggaatgctacaaggttgatgaagaaagctaaggagtcaatgcaggaaggagggagctctgacaagaatattgctgaatttgctgcgaagtattcaaattgacaaaaattattgctgaaatctcaagcacctagctatcagagatattctagttctgacttctgaatacaattggtttttcttcctagagaagttcatggaggtcaaggtgctgatgttttccacgagtcagcagaagtaaattaagtttacagtgtgtgtaaaatggtaatttatactacttacaatttttattttataattgaagtgtcgttaacttatgtcctcgtcgagggcaacaagctaccttagagatatcacgataacaaatgaattatgtaagctttacatactttgagagtaccgggcatagcttgcttaccaaattacagaacatatatatgtgcatgcatcaatttcctctgataccggaaaaactgttatttatcctctcctctcaattctttctactaaaattcggcattacaacaatatatctctcttattaattacaagtttctatagtatataaagccaaaaaaaaaataaagcgcaatgaaaaactcaagtaaataatatggttaaaaaggatgagacttcaatcctccatatcttccctatcgcacaaaaccatcaaccagagcactaccagtttatttaaaactgttactgaaattaatatcattctcagtttaatataacaatactaatatactattccaggtggtttattatatggtttagttaagatgaaattcactgtgggagttcacttagatatatatatttttagaaaatcatgagctgcagttaggagtccgattgtctcaagttagcatgcgattttttttaaacaaatttcttatatgattccttctatattaccaaaagtgaacggtcttaaaaaccgactcaaatacggatatgtattttcaaaagcaaacgaacttaaaaactgactcttacacggatgacgtaaaaaaataccgataaaaatattttcaatttttataatagagatagagatagtgattgtccactggtcggcccaagcacacctctaagagcaattgttttgtttgacagaaggacttcaagggcaggaatcccggtgagcaacttctcttcgaccacgcgaacacctatccattctgtgaggctgtgatagtcatagtccctggacaaagcgagtctccatttcgcctacaaacttgtcgtcgtcaagcgcgccagcacaaccaaaattaacttgcgcgccactctgcctctcaacccttcaaacacctagtataaagctcatcgtcgccgcgagcgagcttgctacctccaagtcaaatcaccaagtgattcgaacccatggcgagcatgaatgatcaacacggcggcgccaccgcccacgtcctgctcgtgccgttgccggcgcagggccacatgaacccccg

SEQ ID NO: 5106 - DNA, 2000 bp, Oryza sativa
tttgagttaaatattaatgatttcacttgaaagtttttaaatatgagttgaaagttttaaattttttaacttaaaaattttcaaatcttaacttaaaaatttgtaaatctgagttaaaagttaaaaaaaaaggaaaagagaatgaatataagcccccgtcggttcagccggtattgggggtgaagttgggattagagcaggtacaatagcagactattagctagctataaacatattttaatgatataaaagatgaaagagaaaagcagcgggctacaaatctgtaggtagctgcagcatagactccaagagacggtgtgtgtatgacagatgggaccatatattaatagtatagtaagcaactattatatgaattggctattaaattgactatagataaattggagcttgtagtgggctatactgttaaacttgctcttagagttgctcccgatcggctggcgctcgcccaccgggtgacgcaagcaggcagcagccgacacgagccgtcaaaaaggttggcgttgccaagctcacctcctcccttggagtctcaaacatggggcttcccgtaaacagataccaggtgggttctgttaactccgaccgtgccgtgccgttcggtttcaaaagccgcgagtcgtgcagccaacacgcgccggatcttagtttcaacggccgactgaattcttcggttggtttagtccacttaagtactccagttttgatacttgagcacggcggattcagcttaagggcctgtttgtcacagctccaactctggagtggagttgtggagctgcctaaacccagctccacaactctattacattttgtgagagagctccacccaactccactcctagttttggtggagctaaaactgtttggctgagctccagctccaggaggggtggagttggagctggagctgtgccaaacaggccctaagtgttctaagtaaacaaagcatcttaatataaatatgtttgttttacggtcttatatgctattttcacgttccattaattatgtcataaactgttgttgatttgtgccagttttctcctatttcagttagtagtatcgtattttgcactacgtcggtattttacttacctttggaaattgtaatcgcggaacttgtaaccacaatataccgaatttgccattgttcattggttttctctcgtatctctaagacaatcataattagcatgtgtagctcacgctaaaattaaaagtttagttaaaattgaaacgatgtgatggaaaagttgaaagtttgtgtgtaggtaagttttgatgtgatgaaaaagttgaaagtttaaagaaaaaattaggaactaaataagacttagcgtaaaaaatcgtcaaattcactcgaacgtactactatagtactatttccgtcaaggtttcaaaaagacattagtcgatcgtaccagtctgactcgaatcgtcggtcgttccagcagcagatgcaattgtttagtacaagttgcatcctagtacagtagaagattcgccaggttcagcgaaaacctcgcacggtttacgtgccagagttggcttcgtgatcctctcgtccagaaaggcaatggaatatactctactgctcgtacgcgcccgtgagatgagcccacgcgcacgcccaacccatcggcaattcggccttgtgctgcccagtttttgcgcgcgcgccgctgaatcctcaaaaatggacgacaaggcgacggcattccgtttcgcgtggtcgcagttgcgcctcccccacccctcacccgatgaccaccctacgctagcaatcttcctcttgtcgtcgtcctcctcgtgctccgtggcatggcggcgcaggtgctcgcagctcgcgtataaatagcggccatgtccatacacggcagactcacacaaccaacattcagagttcgagtgaaagttctctcacaagttcagagtagcatttggctagtgacagtaactggtcagtgtctctcacc

SEQ ID NO: 5107 - DNA, 1806 bp, Oryza sativa
cggrgaamsggggaaaaaagcccarrgaaaaaaaaaaagctcgstccaataccccgsgctaamgcamgcggstccaccttaagcttatggtcctccgatttytacctgtccggccgcgatacgccaccacgtattcccacaaaacaaaagggggaaaaaaaaaggggcacgagacgaatggatgcgccgtgacaccagctgcgtgcagcgtatcgcacccaacccgtccattccatatgcacgtatcgtatcatatgatataataacgatgacaatatcttactagcaaatcatcgtaagttcatagggacatataggcaatgcgagccagctgatatttatctctctctctctcccccgacctagcagccatgttcctcttatgtgtgtgcgtgcgtgcacagttcgtgcaagttgggaggagacgcttgccaatggctggagccacatgatcgagccagcgattctgattccgttggcctgcctataaataccccgaggagcgagcactgcagatgccaaggcagaggccaaggtttcttctctgctagctaactagtgggctgcttgggtggggagcccgggccggcagatatcctgtctgaaacccttaggtatgtattttccctcaaatggctggttaatttcggctccgaaatggcagttcgcatactatcatgcgaatggcattgtcttcttcgccatcacttgtataaagtcactagtgcacatgtagctttcaagaatcaagaggatgatcactgctagctagcttatgcgtctgtttagttaggccaagcagcagcctgtgttgtgttacctactcatttccaattgcacccattgcatcaggaaccttccatctttcacttgtaaaaatcttactgcatctgttttgcctgttcaaacatggattttccatgctctctcaagtgtgaagcagatcgtttgcaacttgcagttgtgtttaggagccatagtagacagggtatcaattaagcacaaaggtcatgttgcatgcatgactcaaagtttttttttccttcatttttttttgggtgggaagaaaaagtttggaccaatggttttacgccagcttttatctcctgtagcatttcacgcactttcacgttgtgttttttctccctcccgggagtcaatctttcgccgtacgtgatatgataatatcgaatccgagcccatatgtccttgaagagactgacagaattgtactttatctgaaacccggttgctcggtcggtcacaccaaactgagccaaaaaggagatccgagttagacaaatcgcgccttgtttgcataaagcggcctaaacttagatgcccatattactatcacattattctgaagaatttttgttcagaaaacaaacattattctgaagaatctcttttgcacatcgcgtgtagcaattgttcgtcagtagcttgctacgttctacagttctctgcacgagtggcctaggtagatactgtatttttttttaatatcttgtgcgaaatgggtgtacaaaagcagagtcctgaacatgtacgcactgcattgcgtgatcacagggacagggacttcgaattcttggaggcaatggcgtcctcgttgctccactgctccgacaagctgccgttcatgaacgtggagaccgtcctccacatgaaggaaggcctcggcgagaccagctacgcgcagaactcgtcgcttcaggcgagcaccttgcttccttgccgctcatggccattgattctttttgatccgtgcatgcatttttttccgagttctggctctgagcc

SEQ ID NO: 5108 - DNA, 2000 bp, Oryza sativa
ctatccgatcggacgtgaccggccacagaccggtcacaatccggtcatgcccgattgacgcaggtcaatcgggcagcgccgcacgtccgccctcaccacattaaatgcggtgagggacggttggggtgctgcgcattgatggcggttcagcttcgaccacsgccccactcactcctcccgccacgtggcggtcgggctgggccatggggcgaggtagcccgagggcccgaggggcgtgatgtggcaccccgaggccccccgggcgcctctgcgtcgtccgagatgtggggggagggccaggttgtatggccgcatggctggacgggaaggagacttccccacacttcgcatacccctgggcctatatcaccgacatgcagcatctaagcttcagcatgcaaaatgcattaggttcttgttctcttcacacttttattctcttccatgcaacaaaattttctttagtaaatcctaagagtcgttgttatgagtagcaatgatgtttccctccccccttctcttttccacgtcactaagtttacctgtaagccaatagagagagcccattaataaacatcattatacatgtcttaagatgggattggaaacaacctagtataataaatttggacatgagatcctcttagttgttatattttactgagggattaacttttttacaaagagccttcatattgcccgattgattagctgttatgtaacgatggaggtcttgatgaatccaagcagaaacaaacatgtagattataatttattttagaattgctaaatagcacttaacaactgttttgggatatgtttttagatttttatatttgcttagtgatacattctctggtgaccccgatgaatggcattggagttagggtttaaagtctcaagttccaaattgaagtgggggacggaggagggatttattgggcttagagggatggttgtgagaggtgttagcagagcaacggacgatggacataggtaggcagcgagatgtcaacggtagtgccagagccatgaggataaagaagagcggtaggcattagtgacatggacaaagtaaaacttgtttttggaaagacgggagctactagacagtgggacggaggtacctcaccgccaccactttgaggagggttttggggggtggggggtggggccggggcaagaggatgtctggcgggcctcacgagcatcgtttacggcttatgcctgggtgacggtgtcgttgcctgaatgagggtgccaagaaggagataaagaggattcaaataaaagcgatctgaaattgtaaaattataaggtgttttttttccaaatatgcaatggtcagtcttattttttaaccgtttaatccacaagtgattttacaattctcaagaaaagaccaggaggtatcatattttctagtgtaaaatttgtaccctatggtaacaggatgtatcaaaatttgtactaaaaatattgttacgtcttagagactataaaattacacttaatctaatccaactgaaatcaattagcctctgcgagtgaactaaatcatgcaaccgtattgctgaccagaccattttttgccaccattagtttaccggccgtaagcatgtcaactgccagttttgtctctcctgccgtcgttttgtttacgcctttaaacaatgtgaagaccagctctcccgccgtccccaaccttcgctgccccttcctttccaatccccccgatttccacaccgcttagcctagtcgcgtctcgcctactcggcaaattcggcatccgcttagtactagtactagtataatcttctagttaaaatctccggttcaaaaccatgatgcgaacaagtgctcgctccgaccacgccgcaccacgcgtctcgcgctcgcacacgtgaatacatatattttctcgcgccaagaagccgcgagccctctagcctctcgcgaacctctcgatcttctcgccgccatcgtcgtcgtcgtggtcg

SEQ ID NO: 5109 - DNA, 2000 bp, Oryza sativa
cagtggtaaatttgcaaaactttagtgttgaaaaaaaactttgagtaacaggacaagttcccaatgcttttgaaatgataaccagctaaattaaattatctttttaactacacgttcccataaaccattttctaattatactttcagcttatgggaagaggagatattgaaagcaaataaaacacgtcactataactctataagcaaattgagataagtgacttttgaaagaaaagattctaaattgtctattacacatcacaacgttcttttgttagaattatcttcctgtgaagaaaccatatacatattttgggtttatgtgtcacctcaacttttagaagatcctctcgtgaatcctcgcattatagtttatggtcactgttatatattgagtgaaccgaaaaggatttgtatataggaccaatgaatgaagtaaatcatttttgtttgatagttgtattaggtagccagcccaccaaatcatcctactcaacaattggccatgtaaattagacatttcatgatgttatactcgtacactcgccgaatagccgtgttttttttagccatgttatataaaggatgataatcttttgggatgacgtgttctcacttgcatctttccaatatcttagtcattcattaatatcatacatgcacaaaactaggataacctgggtttacgaagcatacgtctgagagattatttttctttttataaatactccatccgttataaaatataagaacttttggttaaatggaacacatcctatctagattcattgttttataatgtgtccgattcagccaaaactcggatggaggaagtatttgtttcacaaaataccgtgtcacgtgtttttgtagttgatggactgaaatggaaccattaggtagcaaacatttattattcaggtttttggacacactactaccccttgttttttacatatcttttcctgctgggtcaatatatatttctttttcatggttgtcatcactcctagtagaaaaaaacatgataagtagacaagtccagtttttcttgttgtcactgcggctgccgacgtgcgcagtgacgcagcatccctcgtctccgctatttactccgtcagttggccaactccggcgcggcggcggcggcggcggccaggaggaagaacacacggttggaactcggaaggtctttacaccggggagaaaaaaagaaaggagtgatttttgggagtcgcgctttggcaattggcgcacacaacagagagggggtaataaaagttttcatctttggttggttgttatcatctctcttctctcgtctcgtcttttcccctccaaggctcgagggcaccgagagctaggctagcgggggtttggcttgccgttgctgctgctgggcgtcaatgtggtggaggggggttaatttgggtgtggagagggggggttttcgacgatcgcgccttctgttcttctgcaggatgctcgcgcattgccttgatttctcttggggttcttgttatcgaggggacgtgtcatttccctccctcggcgacgcgattttggttgcacttttgtgttcttctcctttgggtgaatgtgtgaggtgggctggttgatgaacggaaggttaattaattaatttcttgatttttttttcggtgatgaagtgaaatttcttgaaactactaatcttctgcagtacaaagtctctatctaattaaccccttgttctgactagtttgctactttgctttgctttgctgcagaagttaactgtctgattcaaccggcggtgcaatagagattggaccgatgggttccctcacaagttagtcgttttctcacaattttttttcctactacactgttgtatcatcaattcatcattgggccttcttcacttttggactgacacaatttttttttgttagttttcctactaaccttgattcttttttttttggtttgggggtaatgatgctttaggttcttggacg

SEQ ID NO: 5110 - DNA, 2000 bp, Oryza sativa
ttacacacataaacttccaacttttccgtcacatcgttctaatttcaaccaaactaccaattttgatgtgaactaaacacaaccattgacttagactgctctcttttattatgactggcttatgccctgttctcttttattattctatattttagattttcttatagatgtttcccaagctattaatcaacgcattttcgtgtaaaataaatattggaatatatttttctaaagcaacttttctatttcataatagttaattcactcgtttatactctcaaatagctatgaggaaaaatcagataattcatcaatctgaactgtcaaatgtgtggcctttcaagtcaaaactcaccacgcacgatgaagagtggttttgggggtttgggctgatttcaagaccctgatttgcagttcgggaagattgcggaaacgattgtacttggtagtgcaaagttgttgtgaaaatggatgctcattttatttctcgattccaattagcaagctaaccatcgcgtcatacatgcattactgcatgagttgacccagaggcaaaagatcacaaaacattctgttccaacctgcccaagctatctgccctttgtggacgagcaatggccaccatcagagatcgcagcatatcacggtcagttcctgcacccagaagcatcttatcacttgtgacatctcctgctccaacgtacgagcaatgcaacgatgggaaacacgcgatttcctccagaaagtcaggcttcaaccacactgcttccatgttccagccccaaactccagattatactaaacggtgcctagttagctagtatttagcttcaagatcaagcggtcagataaactaagctgtttcagttttatcagaaagcgacttgcatgctagcctgaagaattgaaaacggtgttcggattgagtgatattttcagctcggttgacttgtcaggtaaggattattataaatttatattagagcgtgttcaaagataagacccacagatcgattcagatgcaatgattttaacaagtggatgcaatgataggaacaagtgggtcttgtgcctgaatgcatgcggcgcctacggtacgcatgaacatgcatggcttgtgaagcagatcaagcaactggattcaggaaagaaaccctcctctgctattgtgatgacgcaatcattatgtgattatcttgttcgttaaggaatttgattaaggagatgctttgctcctgatcaatgtttagtgtttaatatagttcttttgtgtaatcgatggggatgtcgtatgtcataaccaatagtctagtactgcaacagtgcaattacatggctgacataagaataaaatactttgccatgcatgaatgtgtcaaattctcttcagaattcacatgactcatctccctcaaaattgcaccaatttcacgaatgaaagtatgaatgaaatggcaaatacatttattgtgcccaaagaagtatttgtacatattttctgaatacatgcctttttcttaaaggacattctgaatatgagctggaaattctttaacgagaacacctgcaactttgatatctgaactccgaaacactggagctgacctaagcattacatggtagccatgcatctggtcaaccaagctggagaaaagaatgcattccagagcacaaaatcaaccacctcaagataccatgcacgcgtgaacatccctggatttctgcagagatcttgcgccgcgactgaattaattcgggttcactcattttcaggccaccgaattctccctctcatgcaaattccttagctggcttcacaaacgagccacacgcgctgacttgctttgtcagaaatcggcaaagcagccagccagccattgtcagctcagctatgacacagccacctcgatcaagatagatatatattgcacggtgcaaatggactgtgctaatcttcagaagaagaagagaaaaaatcttcagagcttgatcgatcggtc

SEQ ID NO: 5111 - DNA, 2000 bp, Oryza sativa
attactatactcctactatatgtacatacatactctgcatacaacaatgtggcgtaagatgatacacggccaggaaagaaacagaaaaggcgcaggcaggcaagcaccaaatgcgtccacatgcggcacggcccatgacgcggaatcctctctgctccatgcatttcgatctcgccacagcgtaatttttgttactccaaactgaatgatcgatccatgagttgatccgtggcacggaaaactttatcttgtctggtagcgatcgtgtgccggtactctcgatcgtccgaatttttctttttcgtcttcaattcggtgcgcggtggtacgtggtacgtagcacgcagccaacaacaagcaagcgtgttccaaacttcgtagcacaattctcactttgccgcgcgctgccgcgttgctgatgcgacctggtatcggtttgttctgagcgagagagacttttcgatttctcgacgtcgacaaccttgactcggcgcagcttcagacgcgtttcgcttgccgtatgtataaccctgcgaaaacgcccgaaaattacccccaaacgagccaattttttttctgtgatttgacacacgcgattaaggtgccgttggtttctaccgaagatagaggtgaggttaggatagaaaaaaccattagcatataattaaataacttttaatttttacaaaactaaaaaaatgtatttatctattatttaaaattaacttctaaacaaaatgtaccgtttattaatttaaacctttcgctatgtagtcactgcataccggctctgttccatatggagttgtggagacatatttttgttgcaagcaaaacgagaaatctcattagcataatattaattaagtattaactattataaattaaaaatgaatttgtttgctttttaaaaacaatttctatatagaatttttttgtcaaaaacataccatttattgaaaaatgtgctaacggaaaacgaggtagttgaagttttgagtagagaaaaagaactagacctaagttctttttctaagtgcttgcgttggactttttttttcatatttgattgaacttttttctttgcatatagcaaaacttttttaaaaaactccatatagcaaaacttagtgcgataatatttaaatccttctcaacatttctatccgtggaatcaagtatttaattttggtaaaacaacattgatggctcacattttctgattcggttaagcacacgtactagagtgatttttgcaataaatttgagtaagttgatgaacatttgtaacaaaataacttgtgatataatatatcattagtaacaaaataatttatgagatcctcccttcttgtccagattcacccaaaatcccttatattatgagatgaatggagtagtttttgcaatttaacttagggtgagtttgaggagaaggtgattgacgagattgggaagatacgcaaaacgaggtgagacattagctcatgattaattgagtattaattattttaaatttcaaaaatagattaatatgatttttaaaagcaacttttctataggatttttttttaaaacgcaccatttagtagcttagaaagcgtgcgcgcgaaaaacaagatgttatctccctcaaatgttacccgaacgaacgcagcctgtttgaaagaaaacgtggcccaacccaaccgcgtccgcatcaggcaggaggcacacgcacacacaaaaaagaccaaaacgagccgtttttgcccgtgaattttcggcgtgcgcgcgactaacccaacccaaccccaaccaactgcattcccttcccgcacaaacaaagccacccaaaaaagttggggagaggagagaccgagatcgatccgcacccaccgcgacaaacgctctcccctcccctcccctccccctccgcccttcgctcccatccgctccgccccctcgccgcgcagcgccggcggcgagaaggttgagttcgtggggggtgtgaccgaacg

SEQ ID NO: 5112 - DNA, 2000 bp, Oryza sativa
taccaatacgtcgaaatgtgtcaattttaatttatcccttaaaattgtgcaggagctgaacaatctactacttagtagtacatcaaggattctcatggtgcaaaatccgcagttaaagtcatgtttgcactagctaaaaatttcatactaattgcctaaaaagatacggtggagtaaacaaacagattcataactttttgacaaccagtattcgtacagtcgtacgtatcgtaggacactctgattaatatagttctgacagatatgcaattgcttgccatgcaattatagctagctgtatctgcgtagtactgtagcacagactgatgattgcacttgatgtgctctaaaaaaatcggtccttgaaaaaaaaagcgtgattgagaccctgtttagatgggactaaaacttttaagtccctatcacatcgaatatttagacactaattataaatattaaacgtagaatattaataaaacacatctataatcttggactaatttgcgagacgaatctattgagcctaattaatccatgattagcctatgtaatgctacagtaaatattctctaattatagattaattaggcttaaaaaatttgtctcgcgaattagcttccatttatataattagttttataattagtctatatttaatactctaaattagtgtctaaatatagagactaaagttaagtccatggatccaaacaacacctgaattcatgaacgcaaaagaaatgaaacgaatggtgtgagtggtcagaggtagtaccagcacaagtttgacatgttctcaggacaccactaatgtatatagtaaaagttaaataaactttaactatagcacttctcacaaatgtatatggatacaatatgacattaagagaagagagagaaatagagatagataatattatttatatcatatgggtagttcatatgcatatggatacattttgctattttctttatatgaactagttgcacaatgttaataggtggctgaatggaatagtttatattgtggatgccctcatagcaatgcaacttcttttcttaaaaaaatctgtggaaataaattccatcaaaatgacgagttaggcaaatcactaacctgtcatttgagatgcaaactctattaaatcttcaagccattaatttgcaagaaattaagaatccaaagccaggctgatattagcaatgcattttcctgcattgtcatcgtttcgcacatgactgatacgcttattgcgaaaaaataattaataaatatctttttaaaatgtgcatttaacgacttaaaaactaatgctaaaaagtaaacaacgattaaatagttatttttaaaatttaaattttggttggaactaatagtccaccaaatttatgtacagttaaacctggtgcattggggtcctattcagattcgtagtttctagaaaatatcacgtacctttaaaatttcttatattatactactccgtaggacggagtaccaaagaaccacaagaaaatttatacggccatctgaattctgaggagaacacaaccaaagatggcaaatccagcgatgagcaaacgagccgttgcgtccagaattcgctgaacgtctcggtcgattttaatatctgtactatactactacgtgaccctctatggcgtcgtcgagccgaaccgagccgagccccctctgctgctcgctacagaggccgctgtctctcgcccctctggtgccaactcacacccattacacggctggcaatggcacggcatggcatggcagagaaaagatcactcacttcgcggcaccatccatccaaccatcttccaaaacccctatataaaccccagcttcgccccctgaatctcccacacacactgatcaccgacacaaacccaaagctaagcttcgagctcccccattgatcagtgagctagctagtagctggttggttaaaaggccttttggtttgtttgagttggagcagaggagaaga

SEQ ID NO: 5113 - DNA, 2000 bp, Oryza sativa
tcccacagatcttattgttatttaataaagtatttatcccacaaaaatcttatttttagatactggtaataaggggtctcttggcctctgtattattctcgttttttcctcctcggttagagaccatcgcccaagctctaattattaggtgcaaatattagtaatgagaattgagagcttagaaatgcttaaaagtttaatgagacatgcgaacgtagaagcaagcatgtaaattttaaggagagcatattcgtcttttaccaataattgtttgaggtaaaaaaataagttttttttaattgatggagaggtaggaacattcagttatttttttttaatttttcctttttctgctccgtcatggcgagtaaacaatacagttgcggcagctcataatctaaatattctagtgatctaagagcagtataatagcagactattagttagctataaacatattttaataagataaaagatgatagcgtagagcagcgggatatagatctgtagccagctgcagcacgaacttcaagacacagtgtgtatggcagatgagaccatatattaataagtattgtataaattggttattagattagttatagataattcgaagctagtagtgggttgtactattaaatttgctctaatgcaatcatgcaggatcttttaccaattgtatactcgagtacatcggtatcattgcagctaacatcatcattagactccatgacagcatcaaacacatgctgatttaattgaaaaagaaaagaaaatcttaatgccatgacatggacaactaatctttccaagagcgcattaggcagagtcattagctttcgccgctcctcaattattggctccaaaatttctaaaggccaaccaaatggtgccaaatctagcaatttctccccactccacccagaagaaaaccgtgaagaaattctccggagagaaaaaatccaatcttttctcccccgagcacacatccctgtccggaataatgctcccacgcgaattcctaacatctcaccatctcttcctcatatccacaagccagcgtatgggtgatgtgttcttgatgatccccaaggacggacctgtccggcgaatctacaaagtggtgagtaggaaattgtggtaaaaaatcccccttttgccgatggtttcggaggattgctgttctggggagaagttttgatctcgccggcctgttttgtgtgagcccgtgaagcttcgaaccccagagaatttctcgcctcttcgcatgcggagagttgcaaggttagcatcttccgattatcactaattctgccgcgagaatggcatgtactttcgagccttttcaatcttttctgtcatccctttgctagtactattggtaatcctctgaataatgtgcattcggaattaatcttgagacagcctttttgttaaccacccgtgttggttttgaagtgaaataatgggctgtgtgatttccacaactatgcgtgattatcatcgaaatttagtgcctccatgtgaaattatgcatgagttgtgagtttcgtgttcttgaaagttagacgtcttacgggttcaggaattagtatcctacttgcagttggctatttagttcctttatctaaaaaaaagttggctatttagttcaggttcgtaattaataaatacaccatctttcaaaattgggccgtgtttgtttcctgattcctcctcctggtttttaaattttaatccactgtgtagccagaaaagaaggaattcttgtgttttgctggtgtgctatggctaccaaccgtcctggtattctgattggtccttttagaaccatatatcttgttagttgctatttaggcagtaaccacaatgtattttgctgttcacttggaggtattttctttgcaagacgagaaatattagatacagttaaactaaggtagttcttgatgcctgcagcttgtaaaaaactactgttgaatgatctgaagtctgaaccc

SEQ ID NO: 5114 - DNA, 2000 bp, Oryza sativa
aaaaccctgtttagttctaaagttttttttccaaactttcaacttcctatcatatcaaacctttcatacgcacacaacttttctatcacatcgtaccaatttcaaccaaacttccaaacttcagtatgaactaaacacagccttacataaactcctaatttttttccaaactaccaactttccccaaacttctccccaattttagaaactaaacagggtgtgtttagtttcaaagttttttttttcaaacttccaactttttatcacatcaaacttttcatacatacataacttttcagtcacatcgtctccaatttcaaccaaattctaaactttgggccgaactaaacacagccacagcctaagtccgcaacagactgaggactgaagactgaagactgaagagtttcgtaaaaacmaaactttcatctcaaaccaaaaaaaaacactattattagagcccgtcctgatgcggagactcaattcaagccattccggcgaatgcagcacgtacacctgttcacattcacacacacgttcaggggtcaggcctctgactatttcaaccgcccctcattctgatccaagcacgcaaccacggtaatccccggtgttttgtactaactcgagggatctggacgactggactgtccagttttgcttcgctgatcctatagctcggaaaaaaacagccaatcctagcctaagatcgaacggatgatggtaactaaaactggaacgcaattagccagaagtgtagggtgattttgagtaaaaaaaaacgatgaggtggcgacgtggcgtgctaccctcagcaagtgaaaaggactatataacggtataccgtttcaacggaatagcttatgtcagcatgataccttatagattctagatttaatatctacgatatcagatatgacactccataggtatatcatatcagatacttaggtaccatgttgacattagaatgataccagagccatatcagcatcagcataggtatcataggtttcggatctagaaccaaacataagtctccgttcatatcatatctaatacataagtaccatgctgatgtcatcatggtatcttcggtataagacatgataccctgtaagttttatgcaaacgtcattatgacattgcctattccattagaacagtatgttgttatgtagtactccctccgacccaaaacataataacttttgggtggataggatatatatcctaatactacaattctgcacaggaggatatgttcaaccaaaaattgttatattttagggcgaaggaagtatttacttcatctgtttcacaatgtaagtcattctagcatttcccatattcatattaatgttaatgaatctagatagtattatattgatgttaatgaatatgatactatcaatatgaatctatctagattcattaacattaatatgaatgtgggaaatgctagaatgacttacatcgtggaacggagggagcatgtttcagcaatcctacgatatttagagagattactgttctgttccgtcgggtcaggcggtcagtgaaagcggcggacggacagacagacagacagcgccgcgcggcgacgaacaacgcgcggaggccgcggcgtacaacgcaacagcgactttgaccaattccccaaccctatctgctgcatgctgtagctgtgctgccccatcacgcttccttcccttcccatacgcgtttacccccagcgagctgaggcgcgccatctccatggtccatgctgctacggtggctagctagcttgaccgtttgcgtgcatgcatgcttgaattgttgaataatgcatctgagctaagccgtttctagcttgctgagaagttgggaggaaaatatatggacgcgagcgatcgttttcttgggtatctggaactggaatgattttcattctgcagccattgctcacttcgcaagtagtagtagtagagtagctgagctttttagggtcgttgtcc

SEQ ID NO: 5115 - DNA, 2000 bp, Oryza sativa
ccggcgaggtgtcctggatgatcaaattttgcatgtcgattggtcaacacatgcatgtggatctagtggctggcgatctcgatcgtgtgcgagctgtaagcactgcctattgttccgcgccactcccgtgtcggattacatcggcatctgtacatggtgcattggggatcccgaggtattgggcagacacaccgagatgacagccattgatcttgatctcagtcggcatgcaaaatcaagagaataacaggaaattaatctgccgttagaaaacaatctgactactgaaacggcaaagccagtgatattaaagattaaatcgatgaaatcgccgagactaatccctttggctggactgaatccgagacaaaaagaacatgcttgacgaatccggcgacgccggagattttccatcgcactcgtcgacgggaaactcgacacacccctacctggcgcgccaactgtcgaaacaaattttcggcaatatgaaaaggggtagcgcacgagacctaaaagtggatggatgcggagacaaggatttagacaggtttaggccctctcaatgagaggtaataccctactcctatttggggatttgagtccgctgggtgtattatagatctgacgatctagttgtctcatgccccctagagggcctcctgcccaccttatataggatggggggcaggattacaagatataaaccttatccaatacggtatcggtttcctaaatctattttacaatcttatcaaaccaggactttaggccgttccgtaatatacaagaaaacgtaatacccaagtcataatctgttacatattccatatatataagttatcccctataactagtcggataaccatgccgtgtgggtatgggttacccataatctccacaggaacgcgtatattttttagcttataaatcactaatcagtgcatttcttccattattaaaaggaaaagaaaacgtccgctaggtttgcagtttctactcggtccctctccggtcatggaagagtgaaaatgcttgctgatcgcatacgtcaggcgaccacatcaaaaggattcggcatttgggctgcagtattataaacacgtacgattgttccactccaatcatccatggtaagagactaattaactactaactaaagacgcagtcagtctgtccaaattgcaatattattataagctaaacgtctacatcgcgcgcgtctcacgcttggcactcaattttttcaccaaagaatcaatttgctaatcgatcgatatataattaaagcctgaaaaaattgtcctacctagcgaagtgagcatagattaaccgtttaaatttcttgtgataaaaccaacccacagggttcaagttctagtcttgataagaatactcgtatttatgactaataattttttcaaggtactcatgtataagagtaaggtgtttatgtttgtttttataagagtgaatatacacgtgctatcaatgtctgtgttcatactgattttagaaaaaaaaatgtaatactgactatgaaatgaaattatatgatatgatcatttatggagtattttatgtgacagcagtttcacattgataggaactcccactccatgacagacacaaataattagggacaattataaatttaccactactttaaatcgttattgcgaaactgccactagaaaattacaaaaataccactaaaactatcattcgagtgatatccttgcaatattaaaaaaaccggtgataaatttgcaaatgcccctaataattaatactagtgtttggactgctataagccactcgatccattaattattgcagggactaaattgcatagtaaactctttgtcaggtgccatttgataaacccggccattaattgatccgccgctttaaaacccatcctctcttgatcgggctccttgcactttgcacttgggcagctagctagctaagctaggtagtattaagaattattgctagca

SEQ ID NO: 5116 - DNA, 2000 bp, Oryza sativa
tccgccgcctactctttattgtcattgggattctaaaaatcgaacataactatcgttgtaattcattttaattttctagaagtcccgccaaccatcggcggctctgcaactataatcctatacacccctcccgctgcttctcctttttattgtcattgagattttaaaaatcgaatatgattatcaatggggttttttttttactttctagaagtccctgcaaccgccttacccgtttacttcacggcctacctgttgtccctccttttaatcgtcatttgaattctatttgatgttttatgaacagtttttatatatccaccatactctactcttttataggcatgttatttaatttatctcgtcatgtgttttaaatggtcttttctttcaatagtctttatttttatcaccaattttagttatttataaattgtattactaattgaaatatttatttcttttctaatatcaaaatttttttgtttcaaattttaattaataccgtatagtgttcttttaatatattttattttttaatttcagttttttcaaaattctattcctactttaactctcttttaatttaattttggatattatcttattttttattctgaattttaaattgtattcctacttaaattcttcttttctttttgctaatttcagattttatttttatttttattctgaatattaactaatctctcttttcttttttctaatttcagattttgtttttatttttattccgaatattaactaatctcgtattgggttcttatatggactcttctctcaatatcccttatttttaattccgaatttaagttattttaaaattgtactcctatttggactctccttttattttctaatttcggtttttattttatttttatttcgaattttggttaatctcgtattgggttcttatatggattcttctttcaatattgcttattttaaattccgaatttcagcaaattttgaattgtatttctacttgtactctccttttctttttctccgattaatgtgggaatttctagtctccacaacgaacgtggtgactcctttcaaagctgttttaataatataataaatttactttgaatatatatatatatatataataaatttattttagaatgaagatagtagacgattgaaatatatatttgtgtggctctcatcttattaccttcatttgcatttacttatgaattctttgccactaattaaattttatataagagttagaattgactttttgaattatttgctactaactttaataacatcaagaattatgaagccatagagagtactatgaacaatatcacggttaacctacttttataatgtgatatcttctatatttttcttttttgaaaaaagataaatagtgaaactttgcaaataaatagtaatccgatgacaaaaaatgcaacgatcaaaggaggtagcaagtacaaacctatgtcaaactgaacttacgactaaatcgcttgcacgctgaaattttcaagttatttaatyctcacatggttaaagtgtcaaatgtggtccagtctttggtactcacatyacgccacctactaataactagttaattgtctattgtgcccctagttagctctcgttaatcaattgcattgtagtaatccatccatgcacmcascacccacctctctttctcccgaacagcaagaagatgagccaagcccatggcgtctataaaagagagccctaccccctccatctcaaaaatttcaatccttcctcttccttagcttattagcttccttccttcactagtgccagttttcctcctacctaatctaagctagccaggtcgtcatcttcttccttcagctcacgctgaccaaacaccatctgttattctgtttgtttgttttttttwaaaaaaagaaaaaaaatctagctaggcgagccgattgaaggagctgagcatgccgagcagcggcggcgcc

SEQ ID NO: 5117 - DNA, 2000 bp, Oryza sativa
gcactttgcagcagctgaacgccaaacgaatttcgctaaaacatcatttcatttgcatcgccgatcttgtgcgctaatcatattctcagttgtacatatgtacatctcaataatcgtgtccactggagcaagatgctatcatcaggtccacaaaccctgacttgctctgctgctactgctagtgctatccattctccaacttcttaatgacactcgcatatggttccattaaaaaatgcaggtactagtataataaatacgccgtcagtgatcttaacaatggtagttaatgagatgattagaactcccaaatcaagggcaactgtatctgtcctgcctgcatttgtcctccggcattctgaccaaatgagcagcagcacatcctgcccccacacgatcgatgcaaaatcctggtgtttttggacaaaaaatgatggcgttcaccatatgtcgtattcttttgatgctcctgcggaaaaaaagctgactccacatcacacgcacctgctgctgctatctctctcgcctcggacacaaacaagtgaagacgagcacgaatgcaaagccttctgcagtgcaatgcttgcacttctgcaggctgcagctcacacatgaaaacttgtcgatctcttgatgacagccaagctcagtgacagtgatattgaaacaggaactcaagaaacctgtgtgaacaaacaattcgtaccgtgtccaaggattcacagcatctcaatcgctgatgacatgcctgtctatctgcagggagtcacagatcacgagaaaagtttcagatcatcaaagagaaagatgcttctcgtgtgaccaacgtgtcggcaaggatgaacagtaagaaaggccatcgatagaagaagcaaagtcgagagctaagctcagtggctaacgcaattgatttgatcactcacgttttggggtagggaacgcttggtatgaacgccaccaaattagtcgccaagggaagtattcgcatcgacgcaaaggatttgctagatagctaggtggatcgagcactatcgatcgccatgggaggatatcttgagcgtttgtcttcatgctcgagttgaggatgagagattcgattgatcggaccccaggttggtggaactagttaatcctggcgtgttcgtcactttaagcaaccccaaatcgctcatgaattgcaacagtgcgtgcttacaggatgaatgctgcatatgtcatggttattttagctggccctaatcaaagtttgctgcagctttcaagagttctgaaatgtttttggatggatcagtttggattcagaaattcatgttgagcagatggctttgtagatggccgattagagtccctattttggaatggtagttgcgatccaataaagcccaaatgaattttcaggcctaggcccgtttatggttcacgaaattccccgccaagctaattaggcccacaacactttggatctaaatttatggcccaccagtaaggcccacattaatgggcccacttcctgacgtgccgtttctttgccgactgagacccatctcctccattggcgcgaatctctcgccgccgacgcgaatctgcactgcaactctgcgagcctcgaagcaaggattctgttcgatgatgtccgtaactgaatttctgagctcgaacacgtcaaacgttcatgccgtttcgatggctttccactccaccctcgcgttactgtggcgtgcttcttgctatctcttctaccatttgatcttctttcccagttagggcatgcagttacacacgaagcatatctgctcatgtcatcatgcatctacatcatcgacatgtcatgctcatgccattggcatgcactgtgagtgttcgtcattattcccacgagcgcaagaacgctcgagaaagattggcaccatgtcaaccattgccgctgctgtataaatggttgctaggttgcagtgtgccagtgtcaattgtgtggctgtgacctagctagtcgatcggtc

SEQ ID NO: 5118 - DNA, 2000 bp, Oryza sativa
gaggtacggcccgatcgtgtcggtgtggttcggctcgtcgctgaacgtggtggtgtcgacgtcggagctcgccaaggaggtgctcaaggagaacgaccagctgctcgccgaccggccgcgcaaccgctccacgcagcgcttcagccgcaacgggatggacctgatctgggcggactacggcccgcactacatcaaggtgcgcaagctctgcaacctcgagctcttcacccccaagcgcctcgaggccctccgccccatccgcgaggacgaggtcaccgccatggtcgagtccgtccaccgcgccgtcacccagccaggtaaagcttcaagaattttagtgttctttgtgtaattttgagcaaggagagggtgcttggtgcaaacgtggttggtatgagtttggtggttgtggcgtccttgtgtttggtgacgaattgttatgtcgtgttgactctcatgtgtcagctaaattgtgctgccttagatcagcgattgccgattggtactactagttgttttgcaggcttattggtgctcaatttgcatcgctccttgagggaaatggccaaggcgtggtctgccatttcgtaggcttcgctacgatatgctgtgcggatttggtagtggatcctagaggaaatgctagctattggtttgatctggtgggataataaactaataagaggagttgaactgcctcgagtgagtgggtgcatttctctgagatggatcacatggtgagcacgttgttagagagccaagctaagattttacttgctgaattgaaaatgtaggtaccatgaaactaggtagtgatcatactctgcccagctgtactgctgtagtgtgctgactgctgagagaccttggccctggggattattggttatgagctatggttcatgtcaagcagatatcgtaattggtatagttatagtaaagtgggcttcgtatgacttccagtatacacggggttggtaatcacatgctattttaagcttaagtgaagacagtttggtgctttctgcattattgttcattaaggcacttcacacctctctagtggacaagaattacgctattccctttttggtatataagtttgctctgttgttggcatgctattttagctcctcacatgataagtactctacttgctgtaatgtgacaccttgctagttgaaacaatactatgctgtttaagcttcttactggtatgccaagcattctcttgtgatgttatgttgtaccagtttgacagtcaaaaaaaacatgtttggcaacaaccttgtttgaactggttggaagtcttttttttttcttctaagatgtttgtacattttgatagcattggagtttttacagactaaaattaatgagctgctattatgtactttgcccatctgtctcaactggtgctgacagttgatacagcttatcagcgactcttttcaacttatttctgactttgcaaccaattttatgttccatttgtgttgctgtttcaatgtagtcctcaacattgacctagccttctctctattttccaatttagtttacaagaattaagccaggctgtttagaaaaatgaatgaatttagctttatttatactctgttggaaaaaaattttggcctacaaatgcatcctatgaatacctggtgtcaaactgtcaattgcaaatcgatccactagctgatttgtttacatgtgtacataagttagcaaagcttttttttttgttggcctaaagccatgatgggttacctcaagaaaaargaaaaagaagtatattgtgcacgacatacaataatggaacaattacctagcacggtaagagtctatttgcattggaatgaagtttttaactaacagtcattttatcgatgtgctgttttcaggtagtgaacataaaccaatcgtagtgaggaatcaccttgctatggtggccttcaacaatataacaaggctagctttcggcaagaggttcatgaatgcaa

SEQ ID NO: 5119 - DNA, 2000 bp, Oryza sativa
gttgcatgcacacgtaagtgacacgcataagaatccagaccgatcacacgtaatacacatggaaatcaaatcgcacagagactaatgctgcaattaaaattccatctggaatttaacacgatcagtacgtctgaacatgcctacatctacctgaaacggacccgtggaaaaccggaaaacgccatggccgacacacatctacactactctcaggctagtccaatgagcactccggtcgtcgccggccgtgcaaccgccgaaataaacgacgacgacggtgacgactgatgagacgttacaagctaggcaagaccataaaattaaattaaaaacaagcacacacgcactagaattccaagaaaactacgtcttgttacgactctttgcttgtagcagtacatgtgtcttgttgtgaaatgttgattaattctagcccttgtaagtgttatccatatcgatgcaatgcctgatcccgaagccacgtcttgggatttcgtacggggctcctcctctcacgaggagctgagttttctaaccaaaaaaaactgttacttattgtgcatagtcagatcgatagataggttgtttcaaaaaagaaaacgatataagatagatgttgcatgcatatacattacattagcagtgagattaattaatagtaagaacattaattatccataatatgtaattaacattcataatatatatatgtctgttgcattgctggtggtaatgagaatcttgagatctattccaagtccaacgtccaattaaaggagaacagcttatatattagccagtttttggttccaacaaccagttgacctcaatcatcatgacgatcgaagagctagagaaaaaaattatcaggatcaaaggtgtattataatacagaagagaggatagttggcgtaaaataataactatacattgttactgaaattctgtgtggcccaaacaagttgactcgagattttatacggagacgcaactgctagtccggccttagttttccattatactgtataaatcttcggtcatcggtgagctatagaaggagatcagattaaggcactgaaatggctatcaccttacaggatgcagacgatggcatgccatgagtcaacattgcagaggtccgacttaagacatcgaagcatatatatacactaagtgttgtgaatcacaattaatgcatgcgtttagaaaaccaaatggtaacaccttaggtttttttttctaactaatttttgggttttgctaggtttgcatacaagctagctagcaacctcaatcaagggcactccttaattacataagaattatataaaggtcatgaacgaattatatgtctaacacatatatatcatcaaaaaaaaatttgcatgttgttttactcaattcctaaggtgctgtagacagctatattctccatgaaatgaagtgcttgcgagccacttgatactaaattatagtcacatacacaagtcaacagttcaatttatagcgcgagcgagttctataaaagtactaaacatggcattgaaagttgacattgtgcaactagaatgctagatttatacatatgaaaagaaaatattaatgtatatatagctcacattttaatctgtcattttggtaatggggaaactaaggtgcgtgatgatagcggccctgaagaaattccaagagttgacctgggctccatacaatactaatccccttagcgttagaagcgctctctcccatcatgcacatgaccaagcccccacttgacttcggtatcccttgtcatttggatcacaccaccgtgcacttcacaattcacactactccttcagattaatccatctcgttgatatttcatctcgagtcgtaaaaaccctcatattgtattcatcactgacatgtgtgcccccaaaaaatatcaataggtgtagaaggtcgtgtatatatacgcattcatgtgtgtcaaggcaatatattttgttgaatatgag

SEQ ID NO: 5120 - DNA, 2000 bp, Oryza sativa
atgatagctaatggtttttcacaatcatcatcataaatgtgcatttatatatataatattattatcccagatacatggacgtgtccaatttaaatatgacacattcggtggccttttgacttatgagaaaagtcatttacttacaactgaaaagtggtgttcagagatataaagaaggaattggttctcttccttttagctgccctgcccatggtcttctcatcataacaaggtgaccatttaaggttaaacacaacaagacaaagcaaataaggtgatagtacttaatccttcgctgtaaataagaatttgtttcttgatatatcatttgtagaaagaatttatctcttgattatcataataagcaccaaaattcaaagtcagcacttcgttttcttctgctagaatatgtttcacgattaatctcgccggaatgtcttatacagtatttgcatacatggctgtttatcggttatgattgaaaatcttgcggataaactgcccggtataccggccagaataattcaaatttaaatataatatttaatgttttctccttgtatagtaagaacatactacgttttttttatcaaaagaacatactgcataaactagtattttatcttataacatcatgcttctagtatataaatgtaggggaatttaactatttgccactattgcgtttgacaattatccaaatacccctcttgcatttgcacttaactttttttacccttcttaaaaggtggcttcttaactatttgtcacttttactcacgtggcatgcacgtggcaacacagagcgaaaaatgatgtgggacccactagtcaatgtctcccttctcttcatctctccctccgccggccttctcacgacggcggctttttcctcgctaccgtgctttgcacggcctgccgccccgggtggtcgctgcmaccgtcgccggtgttagcctaggcgaagtcaaagaagggcggatcgagggagatgaagtggaggagactgactagtgggtcccacatcgtttttcgctcaatgttgccacgctggcatgccacgtgggcaaaagtggcaaatacttaataagtcatcccttaagaaggaaaaaaaataagtgcaaatgcaagaggggtatttggataattgacaaatacaataatgacaaatagttaaattcccctgtaaatgtaggagtatttatacatcgaaactatgaaaacctacactttagctgtatcaaaagttcaaatccaaagttcaataagttaattcgaaatttgggttcaaactcggttactggtgattgaccagaaagacaagtttttgtttttttaagtatttttctccaaacccggcatccgaaacttgtttgtacgatggtcgaaaaaataatacgaacatccaccaccggtggaatatccaacgatttctgcgagaataatcgctaagaaaattctgcaagaatcttgtgactaaaataaaccttaaacacaaccgtcatcagtcgcttaataatgcgctttccttcaccggattatccgattcctctcgtcacctcacccgcacccccacggtcgtcgtcgtcgtcgtcaccggagccagtcaaaactcgccgatgaccgtgggccccaccacccccgaactccaaccccgggccccacgaggcagcgacccatcggtcgccatggcaacgccacgtgggaatgttcctcgtctcgccgcgctacgcgtaccccgggacacgtccccggcgcctcctaccataccgttataccatccgacccgacacaggtctcctcctcctcgcctcgctggaagaagtagcctctgctctgctctgctctactacagccacctctctctctctctagtttctctctctagccccctccctcctcctcctcctcccccactagcgcagagcccaatgcggaacaaaccctagtagtgccccccccccaacaacggggtcccctcctgatctcgcgcggcggcc

SEQ ID NO: 5121 - DNA, 2000 bp, Oryza sativa
aatagtcctactcctctcacgtcgccctcccccggcggctcgggaggcaacacgaccgccgccttcctccttcgcctcgccgccgccgcctgagagggcgccggcaaagccgtgcggccacaaagatggcggcgacggggcctcgtctcgcccatccggcgctcggtggccgggggagttgccggggcaatagcaccgatggccagatccgggccgtgccgaccagatctggccgaggaggggggtggctggtgatagggactgacggtggcggatgtagcggcaacagcggcgaagtccctctagatccgcgccgcctcggctggatctggccggatggcggctggcgacacaatggtcggcgataggccgttgccggcagtagcatgtggaggtggggaaggagtcgagcggcggagaaggagaccgagtgtgggcgcgggcgcggcgtcgatggtgggaagtgggcgatggcgactgcgagaggaggcacgggcggccgcggaccgctagctagggaggcatggtagacaaccgcatctggccggcgcggcggcattgatttggaggaggggtcgaaggccggcacggcgcgaggaggcgtggccggcagtggcggaggtgggcatggtgcaagaaggaactgcggtgggcgtggtgtggtctgcggcgtacaaaggctggccagcaggggcaccggtgcagtggtcccacatgtcggtagaggtttgacggtggtggagcatcgatgcgtcagccgtgaactcgcaggtggagggcggcgggtgagaacctagcccgtccttagctgggccggtaacgacgacgtttcgagtgtcctcccctcctgagggtgttgtcgagttatctcaccttctccagtggaactgccgagtgaaaacctagtcttagctctctttgagacctttacggatgacggcggtggtttttccatcgtttatttctttggagacgtcgtctaggcaaccttggctgaatcctcccagacttttggtgcaatatcgctctctagatgcatgtcctcttgtctcagcatcctagcttatgcaagttggccatgtcagagggcctatgggggagatcggttccatctctctcacccccctctctctctcaatcccaaatatgtggctagagttggggtttagtgtcagttgttagggataggtttgtgtgacctcgactgtagttcctttggtggtctagcgacggccggttcggtgctagttttatcctgggtttgtgtttggtgctgttcttgcgtgggaggtggaaaatctttgtttttttcctggttacgatctcccaaggttgtaatattataatttttcctgctctatcaatatgagcttcgcaactttctggtgtgagtcgttaaataaaaaggctagctttcctctagcagttttttttttaagttccaaacacgtagcctagccaggcaagagctgaggatccaaacatgctttgctctcaccttgtcactccctccgatgtactcctactagaataggtagccactcgcgtgttagctcgacgcacaatgttgagctgtagtggcaacatgctgcgcgccgtccatgtcctcgccatcgccgccgccgtgctgaccctcgcgcccctcgccgcctcgtacccatggcaggcctgcaacgggagcagcaactacacggcgaacagcgcgttccagcgaaacctcggcgtcctggccgccgccctgcccggcaacgcctccacctcgccggacctcctcgccaacgccaccgtcggcggcgcgcccgacacggtctacgccctcgcgttctgcccgccgatcgacaaccagaacgcctccggctgccgcgcctgcgtcgccagcgccttcgcggacgcscggagcctgtgcccgaacaacaggggcgcacacatcatctacgacggctgcgtcctcaccttctccggccgggacttcctsggcgccgccaacaaacccggcggac

SEQ ID NO: 5122 - DNA, 2000 bp, Oryza sativa
  misc_feature (1)...(2000): n = A,T,C or G
cagggaaaaaaaaagaagatttttttttattttagccctcgtctgatcgtctcgtctcgcgtggcggcgagcggctgacccgggcgacctccgccgcgccgcaccgaccgggccgggtcggggtcgtgtcgcgcggtcactcgctcgtggcgcggcttgctgctctacgcgtcacctaccgagctctcgcttttccggtactcaccgacgcacgggacccacctgccttggcgcgccaaccgccccacgccccctctctcgctctcgctgctggtggtgtgcgcaggcaggcgtcgcacgcggcccgtaccccgttttgcacaaaacgcacctaaccttcgcagcatattgcaatattcccgtggatgaaccattttttcttttctttttcttttgtgtgtgcaccacatcctttttcgaaatactagctaaatgtttatgctttactatgataaaagaactatatcatactattatcaaatacaagtaaaacctatataattcatgaaatatgttactaccttatcttttatagggaaacattcacttgatttcatatgtgattgtccacgatatttctctatttttaacattaaatctttgaatgagtaatttgcaaaatttacgataggataaatgggttggcgggttcactgtcaccaccgctatctttttgcaataaatttcttcgctattataactggaaaaggattattacaatattaatgtagagagataaaaaaaatattttagcccccaacaatcgtagggaggagacatgtgcacagtaaatggtaataacagttaaatggagaaggtttgtaagtttgacagggaaatttagagaaatacaatagttgctagaaatccaacttctatattcataggaaatatatacatttaagtatgcgtgtattgtcatatttaaacaattttatggttcgtttcagattattgaaatggattatttactctaagctttggaaawtmcactcaarggacgcatatttgttaagtttgtttcttaaagtattcaatttattcatataattaagtatataatcagtagcagtaatctgcctaataatccaaatcaaacatagctcaagtccaaactctacagctttgagttttctctaggctggagcaataccaaacatgtcaatagatagataaagatatgttcgattgatgattaacattgccaaacctcatattacataaggtgaagctttaggcaaagtgttgcaaaaaattgtgtctttgaaataggccgatgaaaaatatagctacccataacaatggcatcaactaaacaactgcaaaacaaccacctaaagttgggatttggcaagttgaaggcatcatccaaccataacatagttctccctccgaaaagaaataatactaacatcatactaactccatcccaaaatataataacttttagtacgaatctagacatgcacttgtccaaattcatagctaaaagttattactccmttcatyccaatatatagaaactakcatcagacgaatatgatcagaggtttcctgttcatattcatattactataaaatatctaatctggtatatggctttcacatttaggacaaagagagagtactaatctattttaggaaagaaacaatattacagataacccttaggactgaaacgcacaattctcccgtattaaacccgtcaaatatctagactttaattaacataattaattccaatctatccatcccgtcgtcaataattttntccccctggctcccccccccaccttcctcttcctcccctcaatccccccttttctcacggcgtcgcggcccccccgaaataaagccgtcgtcgacacctcccccgagccgcaagcaaccccgcgattcccccgcatcgccggcgaatcggcggcggcgacgacgaggacgacgaggaggccatagggttgtggaggaggggttggggacctgtcttcgatgcgcggcgc

SEQ ID NO: 5123 - DNA, 2000 bp, Oryza sativa
ataaaaaaccaacctagtaccggatataayacattctaatactataaatctggatatacatctacctagattcatcgtactagaatatattatatccggtactagatttgttttttatgtaatgagtactccacaaggagtacgacattgtgcttactgagcagtggatgtcggccatcatggttggagaactgatgataaaggacgaattggcccaaaaatctgacagcccagcagtgcttaacggcgactaggcaacggattaaaaaaaccctcaaaagcatattgtgactgatcaaaactcaaaagaactgaattaacaaaacacaccaggaatgaggatctttttttaaactcaattcacctaacccaggtattgtggtctaaattgcagtaaaatcacaggggtttcgagacatgacatataacctcaggggtttcgagacatgacatataacctcagatattattactataaaatttcacgaaaccacactagtgatctttttgaatttgatctatcaaactcttaagttctacaatcacgtctcaaatttgtaagttgtttatccataatataaatgttatatcaatgtaagtaaaactttttaattttctttgagagtgtgccacaatttggttaatggccatggtttcctgaaactttacgaacataacacttagggttatatgtcacgtgccaaaataactttattccatgaaatttggaccataatagatggagttttatgaaatttactctctttttataaaaaaaaattcactgggggtggggggggggggrgaagttccccacctgaattcattaagagtgggcaaaggtccagtttagagaactacaaattcagggcattacactttcagagagcagagggaggaagaaaaaagagtaaagtgtattggtggttcttaaatttgttgggttgtgtcatataggtccctaaactctcaaaacacatatccaagtcccagaacctgtcaaagtgtatcatataggtcccaaatcaacacatcccctctaggatcctatgtggcgctgatatgacatgccacatggacgtgacgtgtcattttctttttttttcttattttctttttcttcgttttcttctcattcttcgttttttcctttcttctgctcgagtcacagagaaaggagaagaaagggaaaaaatagaagaaaaaagaaaaaggaaaaattttaaatgggacccatttttcagtcaaaatgatgccacgtcattccgtgtggcatgccacatcaacgccacgtaggatcctgaaggggttgtggcgatttgggatctagatgacacactataaaaaattctgggacttggatatgcattttaagagtttagaacctatatgacacaccgctacaagtttaaggaccacccgtgcactttactcaagaaaaaaggtcttccaggacgaaattacatgccgatcctctaatttgagtctttcgctccagagggacgcatcttcaatacacagcactaataatcgacgcaaagaggggcttcgtgcctgaagacaacccagtggtggtgattccacgggttccaaaagcattgcaagtagaatacccaaaaagtgcttggagggaactcgaatcggtgtgggaagagaagcaagctcagctaacgtcgcgtcattaacctgcatattcagcgtgccccagaaggccacagcaaaggggcactggaagcagaggtgaagagctgtttcatcggcagaattgcaaagatcacaggttggggtcggcactatggttttcctgtgcaagttgcgttttgttgggaggcgatccttagccaaaagccaggcaaaaaagaaagggttcaaaggagcttcggatttatcatcagcaagagcaattaatattcagccatttccatttccaaaccatataaattgaggtagcccttgctagtatcagttgctttgcaaagctgctctgatcagaaatccca

SEQ ID NO: 5124 - DNA, 2000 bp, Oryza sativa
ttttttcatcggaatgtaatgatgtgataccttgttataaagatttaattataacaaatataatggtgtgatcatatcgtagattggataagtagttcatgagaaaaattattttgaagaccattacaacatgtatgtatttgtggagtgaatagggaggtagtagtttatccgtccggtttttattggttgcgtcgaacatatgatcctaagcattttcggaggtctgagcgtcttgctgccggggtccggagctgtagtgccactcagattttctgctgatggcccgatgcgcatgcgccctagcaggctagcagccattcctgatgggccaatatcgtgccatgggccatcgggccatcatcgtgcctacgggccattcgcgtgccgtgccagcccaagtacggcctagcccatttacgggccgtgtcagaccgtgctttctagcatgtcgggccgtcgtgccttaggccggcctgataaagcacaacccaagtcccagctcccctcgcctgcacgccgccgtcgccgaggcccggagcggtggcgtcgaatgggaggagcgggtggcggcggagctcctcggcaaggaggtgtcggtggaggtagggatggcaatgggtcgggtcgggcacgggtagagcaaaaccatgcccgacctgatgcctaatattgcctgtccaaaccctacccactagagttagcgtgcaaaactccgtgcccgtacccatgcccggtgggcgcgggtatgtccggcgggtacccaatggatctcatataaataataacttaaaatatatataatttaagaaagaaaaataaaatcaataatttacgaaattattggttaccaacaataatttgaattacatcacaacttagtatcagttagcattacaaatgaaccaatagaaagggtataagaattaagaaatgagtcaaaattagctaatacatatgtatcgggtcgggcatgggttacccatgggtaaaaaatgaaacccgcctgttgcccatgacgtcttcgggtatcgggtgggcgtacccatgggtaaaaagtcacactcacacccatgcccatcgggtcgggtatctgtggatacctggacccatgggtaaaattgtcatccctaggtggaggaggcggataacctctttgaatttgctcgatgcgggatgcggcgaggcccaagaagagcgtagcggaggagaagtcgaagggggagaggaccgggtaagaggcgaaggtgttgagtagggaggagggatcgagggcagagaggaggtggtcggggatggcaacgataggtcagggacgacggagtggaggaggaggtgttggcgatgaggtccatggaggtcggcgagaggagtagcccgtcgttggcacggccatggcccgcgcagtggttggcacatgtcatgtggacctacatggcggtggatcccacaattttttttgtgtgaatgacaaataggacccatatatttttttaattctaatgctacataagtgacacgtcaacaccacgttgtataaagaccagttcaacaccgtcacgtaggcgccacatcagcgaaatcgctctgcaaaaccgtcaagagagctaaattgcaccggttttaatagttagagggttatgatatccggtgttgtagttcagggatatgaattagactcatccactagttaagggagtcaaattggacttaatccaaaagagaacggcccatgaaacaccaaacggaaacagcacgctcggatctctttcccttcccttcccccgccacgcggccacgccaacccaaccaataagctgtctcccgtggcacatctccccaatcgcatcacgccacgtcacccctctgacgcgcgcgaccccttctccttctccccagttgcgcccccgcttctataacacgcgcctccgccttcctccccgcggcaccgatctccctcccccctcgccggcggcgcaccgaccgaaccgaaccgcgcc

SEQ ID NO: 5125 - DNA, 100 bp, Oryza sativa
ccccccccccccccacagtaggactacgcttytcgcttagcgacgcaacagcaaagcagcgcgcggagagagagaccgatcgagccacaccgccgcgcgc

SEQ ID NO: 5126 - DNA, 2000 bp, Oryza sativa
ttcttctcagaattgggtgctactaaatggttgttatgatctacttgttgttaggaatatgggagaggaaccaaatcgcaagcagcactagtagcgctgatttgatgaagtcaatgctcttcactccggagggcaaacggggcaaatgagtacttgttggaaagatctcgtcgtctactttcagctatgtgtggcctcaccatcaagtttgacccaggctgctcagaatgacgaaaatagttctttacatcagaaacttgggcttgggccttgtatcattacagcccattaggggtccacaaaacctagggtttgctcccacctcctctcctggtcattcctccacctatataaactcctagcagccaccattttgcactttgggttttgttttgatgtaagtttagctgcagctacttccttgtactcgcgtgtgtcggctagaccacccggatacttgtattcagaaccccattttggtttgtttaagtttcatcatttgacaagtgccgtgagctgtttccttgtcaacttgttcttgcttgttcttcgattgcttgcaggttcaaggttgttcttggcacggcaagaacagcaacaacgtggagtcggtgtacccggttgctaaggcgcagcacccctgtggcagttgtagtcggaccgccaacgtcgtatccttccccaaatcaaagtttatcctcctctcatcgaacgatcaggaaccccsgttgctgcatcagtttgtcgagcaggcataatagaagcagtttgtatgtgttctacttcttactctctccattctcgagaacttgcatatcgaactccattatagtctgacaaatttacttgattgtaatggaaaatgaactagtataatcagttcaaatcccgtagagaatggaaaagttcacatgtttgaagcaagtcaaatttactccgaaatttcaacgaaattccaataatccaaaatacactggtattaactactcataccctccaaaagcccaaatttgtggttaagtacaatttctaaatttctatattcaatatatctaaagaatatcactataaatgtccaaaaaaaaatattagcatcatatctacataaataaatactagggcgaaagggcctgtagcccagtggttacaacagcctcactgcctcagtagcacttgaggtcctgggttcgactccccatgggagcgaattttttaggatttaacaacgttgtgctttcagtggtaggcggcgtacccatggacagcgaggcgcctgtggtgacttcgtcaatctctccaggatttgccggcccagtcttcgaagatactcatagaggtagggtttacgtgcgtgtgttcataggggtgagtgcgcgtgcgttgtgagtgtttgtattgtactgtgcaattcttaaaaaaaatactaggataagtattctctagtttctactctctactgacagccaataaattaatttccctcaatccggtatgttggtcacagataggaaaagtatcaaagcttagtgaactagtagtagctggattcagatctctgatagtctgacaaacgacaactaattaaaattactacttttttctataatggaaatgattttaatctccgacctctaccataagacacataagatgatggggcagaccttcaactttctataaataagttcaacctaaaaatactttccaaaatcaataaattctagcacgtcactccgtaagtactacaccatctaaaataaaacaaaagactcttagctatggatgccaagagttacttygcaaaaaaaaaaaaacaattactactaagatttggcagccaagccgtgtgacctcacctgcggacacaacacagaaaaagccaatcaatcaacggctacttgtatgtaatctccacgcattccaatggcggctgcctcccacaattcggtggtcactcgtcagtcgtgtcgtctgctcacgctcgccaagaaagattggcc

SEQ ID NO: 5127 - DNA, 2000 bp, Oryza sativa
aaaggtactgttaaggacttttgatcaattgaaaaataactcattttcggatagccaacatttgtcacacgatggcattgctcaagtctttaatacatattgatataaactcctgacagatataagacatgcgcatgaaaacaagcaaaatggatggttagataaaagtttcactaaattgttacagttgttgataaatattctttcagtgggtaatatataaattgccggaaacaacataccaaacgaagaagattatatgtccctttggtcttgaaatacataaaattcatacttatcagaatgattgcatactttacttgggtgagtatacagatttggatcaatgttcagtgtgcaaggcatctcagtataagtgtgaagatgatgatggtggaactaaaaaaaatgtaccaagtgaagaagattatatgcccccttggtcttcaaatacagaaaattcacacttatcgaaatgattccatattgtatcgggtgagtatgcatatttggatcaatgtgatggtggaactaatggtacagtgaaagaagaaaaaaatgcctcagaaggtggtgtgatattttcaattgtctctcgtttggaacgtttgtttgcaaacaagaaacatgctcaactaatatgttggcaccacaaagggcgtaaaagggatggaatggaataataagacacccaactgagggatcttaatggagaaagatagataggaagtatataaaacatttgtgtatgacaagaggaatgtccggattgtactcaacacagagagcatgaatccatttggtgacatgagacgtcgccataacgcatagccagatattgttattatctacaacattcctctttgacactgtttgaactgcaaatacatcattaattcatgatgccatttctaatttaagggcctaaataacttgagaacaatattaatgtgtacttcgagccactgatagaggatcttggaatactacgaaaggatggtgtaaggatgtgggatgtgcacaaacgaaagcacttcacctgtcgggttgttttgttcatgataaatcaatactgctccgctcttagtaacacgttcggtcagacggtgaaggacatgaaagcatgtttaagatgtatgacccagacaggagacaagtgattaaatcactaccggaagaccgtttatatgcgtgatcgaatgttccttggacagggtcactattacgagagatttctacgagacgatgaaagacggatcacgtccaaagttcattgcatgctggcagtgagatctgggagaatgtaaaggatatcaacattgtattcgataagtgaatggaagcgtacgtgcatctacatcaagcggtgagacatctctttcgaaaaggaattgaaatccgtctttcgggacttaccgtactagaaaaacttagatatacgtcatgcaatcgacgtcatccgcgtgacatagagaaaaatgtgtgcgaaagcttgatcggagcattgttgaacacggtatgcgtacacggtacacgtgaagaaatatgtgcgcgaaagctctaatctctctagcacggccggatgaatcaaccacgtacgcggtactcctcgtcctcgcgatccgagtccgacgacgacgaagccgccacgtccgcccgcccgcccgcgcgcggcgccaaggcaaaagaaagcacgccgcaatggcgcccatgcaagcaaagcatgtgcgcgcgcgcgcgacccacacgcacgcttctcacgtacatatcgatcgcaaatatcttgtgcaccttaaacaatattcaaatcgatcagcctctcgttcagtcgttcgatcgctcgcctcctcctctataaatagcgggccagtttgctcgtacaactcacacacactcatatccactactactactagctaccgagcactgagcactgcactctgctgctctagaactgaagctttgcattggttggttagtgagagattaattattccaag

SEQ ID NO: 5128 - DNA, 2000 bp, Oryza sativa
tggattcgttgacaagttaagggacctcggatgaacttattccgctccacgtaattcggccataacttgcagcttctgaggcccatgactcaaaagaactctacacggctaggccggtgtaaccgctcgatataggccggattgatctgctgttgcatgttgaggcccatgattacaatactaaagatggcccagaattacattacactcttctggaagattacctgtgggaattttgtgaagctctctgttggttgaagcacatgttccccggacctcggcgcctggccatgtaaccgactgttacgttcgtggcagcaaagccggtgaaccatgtggacaacatgggacatggtggtacggtggtgatagctaggctgaagcaaaaacatctgtggctccccggactcttctcccgtcgggcctcggaaaccgggcagcctgatcccgtcgaaaaacagaaaacggccggtcgcccagccggccgtcgmamgcggmacgcccamgcccgcggcacggcgcgtccgcgccttcgctcgcgcgacgcgtctcacggccggctgctcctccgttccggaggcgctcgccccgttcccacgtgttgcccgtgtcaggcggagcccgtcgctagtcgctactagcttctctggaacagtccggttccgtacctttcgcgtggcccgcagaccacgccgcaccacctgtttccacgtaatccgcccaaaaaaaccaccggattcagactcgatatcccccttccctgccatacccgcgcacggcgccatcattcacgtgcagttaacaaactcgcagtaactctgtttgaaacgttggggagaaaagaaaattcycctgtagaatwtcacacacaccgttatgcmaaggaaagggaaaatcttcctgtcgctaacacagttgcattccaggggtccagggagttgccatcaccaccgtcactacatcacatctattataccagtttaggcagcaatcctacgcggagcacaatcactcggcgcgtaaagttgggagcaagaagagtaccggatcgacctaattcgcgcccactgaattaatcaatcagtaaagctgccaccgtgccaccacacaccagggtgatcagtcatcacgctgtgcgtaactgcgttagttgttgcgtcccgccttgtccgtccttgtcacccaccaccggccagccctgacaagcatcgtgttgatagccacatgcgtttggatttagcaaattataccagctttggtgttcaggataagccccgcttgtttgcaacgccgatactgtactcctgcacgctgtcaagttaccatttctttggtcttttcctctagcagcagcagttcatgcctttgtcaggcgttgtttccacgtcgaggcgtttgtgtcctatgcagggcaagtaactaagtactccctccgttccataatagatgacattttttgactttttatttgtaacgtttgatcattcgttttatttaaaaaactagtgcaaatataaaaaaagataagtcatatgtaaagtaattttggataataaagcaaatgacaaacaaaataaataataattctaaaattttttaaataagacgaataatcaaacattgacaaacaaaaacttaaaaagacaagtaatatgggatgggatggaggtagtatctctagtaatctgagccggttccgcgggatctttgcccgctccgcgagcgcgcgagtacgcgacaacccccacgcatttggcgtgtccccttatcctcgtgagcgtgacgtgccctcgtcgacgcgatttttataagcatcttgtggagctcagcgatcagccactgccgcatcgcaagctggagcagcgagcaccgtagcagcagcagcagcagcctcctggtacacactgcactacacagcgcagcagctagcgatagtgtatcgcacttactggatacgcagtcgagcatctccagcagcagcagcagcggagtgatcagcg

SEQ ID NO: 5129 - DNA, 2000 bp, Oryza sativa
gagatgtcatgtttgatttgattctgcttataaggtaggaaatgctccctgcagggattaattgaagaattgttgtctgacattagactaatccacatttctcccttcagagcccaccaaaaacactgcaaaaaaagagttttttttgtctttaaataaacaagatcttcaaggacgattaagattacctttacattttcaagggccacacgcatgcacaaaatttagcttacttaagaaaacaataattttgctaattaatataatgctcaagaattttttttctcaaagtctaactaaggaaaccatgcatgttgcatatggacattttaaacggcaacatgaattaaactaaccagagcacctaactacaatttgttatgtttaattacccccccaaaagtgcaaccatatatggcaacaaggagacatcaaacattgccgaaatctgccatccattttctagtgctaccaacgccggtgatgcttatgttgctgacgtggggttagccacttaatttttgtcgattatttgctgttgcttttcaatcaggcacggcggaatatttaaatatacaacatgtcaatttcccaaaaccgtcgaagaggttccgtggttttctcttttcttctgccaaagctgatttgcaaaaccaccgcggtgtttccattcttgtgccaattccagctgctaggttttgaagcttttctggttttcaattaggttcagtgttgtaataaagtttcgtactccttaatgacaggtttggtccaagtaagctactccatcgattttaaattaattatcattttaattttatcctaagtcaaacgatatatctttgaccaattattataaattcgtatagttaacaacatgaaatatatttcttttagtgaatctaaaaacatgaattttatgatattaaactataggaatttcgataaactaataaagctataatgacaagcaatttgaaatggagggagtagttatacgctgcattttccaagcatgcaaacaatatttcaatgttgagaaattttacggttcaagtagtaccggaggcatcacattacactataaatgtaatgcgagggtcatcggttcaaatccgatagtcggcttttttctctatcaatattccatgaacaaaaatacctctttttctctgaattaaatggagaagccaggatctattatgtcgttctaccctacaattttgctagatacaaaacaataaaataaataatatatatacaaaaattcagatgttgatgaaattccatttttttgtggtacttttagtagattttactctgtgttggctcaatccgaaggaaattatgcggaagctttgcaaaattattatgaagctacgcgactagaaattgatccctatgatcgaagttatatactctataacataggccttatacacacaaacaatggagagcacacaaaggctttggaatattatttccgggcactagaacgaaaccccttcttaccacaagcttttaataatatggccgtgatctgtcattacgtgcgactatctccactatagaaagaaaaataagaaaggatcaaattttctaatatttactagaaaaggggtgctttctacatagggatcgtcaaaacaacgattttacccttatcagctgtaggaagaaaggacacttcacgagaatcaaaataggaagaaagaaagtatggcctatactactctatggatagagttctcaaacggactttcccaaacacaaaatacctccttgtattcgtactctcaaatgagagtggaagaaattcgactttcatataatatcttaatagaattccatgtaatgatcaatgtattttttggattctatattattcgcatgtctagaatcctaccaagagaataccccccatttttatgtaattgaagtaggattgacgaataagaaataaacataatactgtttattagtgtcgcataaaacccgaa

SEQ ID NO: 5130 - DNA, 2000 bp, Oryza sativa
gacctaacaaatgatgaaatcgcggaacgcacgtcgcagcggcttcactggctcactgctaccagtattcacacctagttgaattcggctataaatacacaagaaccttgcggttgcggagtagaagcaagaattcgatcgagaatcaccatgatgacaagtagaatgttttcggcaatgcagatgctgatcatggtggtggtggcattggccgggctagctgccggagcgcgcgccggcgacatcgcgatctactggggccagaacggcaacgagggcacgctggcgcagacgtgcgcgaccggtaattacaggttcgtcatcgtggccttcctgcctgtgttcggcaagggccagacgccggtgctgaacctggccggccactgcgacccggcgtcgaacggctgcaccggcgtgggcgccgacatcaagtcgtgccagagcctcggcatcaaggtcatgttctcgatcggcggcggcgtcggcaactacggcctgtcctcccgcgacgacgccaagcaggtcgcggcgtacctgtggaacaactacctcggcggcacgtcgccgtcaaggccgctcggcgacgccgtcatggacggcatcgacttcgacatcgagagcggcgggggcatgtactgggacgacttggccaggtacctcaaggcgtactcgcggcaggggagcagcaagaagccggtgtacctgacggcggcgccacagtgccccttcccggacgcgtcgctcggcgtcgcgctcagcaccggcctgttcgactacgtgtgggtgcagttctacaacaacccgccgtgccagtacagctcgtccaacggcgtgggcaacctggcgagcgcktggaagcagtggacgtcgatcccggcgggacgggtgttcctcggcctgccggcggcggcggaggccgccggcagcgggttcgtggagacgagcgacctggtgtcgaaggtgctccccgtggtgaagaagtctcccaagtacggagggatcatgctgtggtcgcggtactatgacgggctcacggggtacagcgacaaggtgaagtccagcgtttgagctagccagggtaagctcgtgtcaggtcggcgttcgcgtagaatcacacgtgccgcgcgttccctgcaagatggagtagtttctacacatttcagaacaaagcaaacatgtacaataagatggccggcttgtatactcatttagaagcagaaaaaattgtgagaaatttacgtgtttggtgtgttctacagttcgagatgtgtcgattctattttcgcatgtggcatttgtggctgcttgctagacgatacctctctcgtgtcttttctgtatacagtggagcgaggttcactgaacagggatgcataccaacacgcgccaccgcctaaaaaatcatggccatggtcaaacgagaaaaaaaacgaagacagagcacaggattacgacaattacgtaccactattagttcgtttctcagggcatctagaacggccatatgtagacttcagtggtcacttctacaccctcagcttccggcccttggccctccgaggggacgcgacgagacgccagagtgccagacggcgggatgagttaccgtctggcacttatcccccgcggctcgccgctcgcgcgcacgacatcgacactattatatatacggccatcgatcccaagttcccgaagtattctgatcatgcggctatcctagtactctcgagcaccttcttctctctagtctctaccgatggccgtttcccccggacagcagccacgttctatgtagtatccaccacggcgaggttgctactggtgcagctcaaaccgagccgatcgagggacacacgactattaataccgactgcgcgtgtgttctgctcaagccgtggacagcgtttgatcgatcttctgcttaactgctttctacttttttggtagccatccgttatctcgacacagctccgaaaggttcggcgagatcgatggcaacc

SEQ ID NO: 5131 - DNA, 2000 bp, Oryza sativa
ttttctattcctgtgtttttcctatgcgtttcaaaggggccctaaaagttttttttttctggaacgactcacataagacggtgcgaagttatattgatagagcagaagaaaaattataagattacaaacctagaaggtcgtaaccaggaaaaagaaaaaaaaagtttaccattamacccatacatcgacagtgccaacacatagaacaaggagaaggctagcattggaccggtcgtcgctaagcgtgaccggtaccgctaggtcaacaaagaaacacggccgagatcacccaaaacccaacccttacaatcaacacaaagcccttatctatccaagtctttaagagtaagggagagagggtgagagagaataatagaacacctctcccccctaggccctccaacgtggccaacttgtagagactaggatgccgctacaagaggatgaaatctagagggagcttgcaccaattggtttggggttttggctaggggatacctaaacgacatctctaaggagagaagcaacggaaaacactgccgccgccgtccgtcaaggtcccaaagagaactaagactttgcttttgcccggcatccacacatgagggatgagacggcacggcaatgcccttaggaggggaatgacgctttgagcgtcatcattgccggcccagctgaggccgggttgggttttcacccgccactcgccccgatgctccaccacagtccaacctctgccgacatgtgggtccactgcaccatcgccccctgccggctagccttcgtgcgttttagaccgcactgcatccatcggcagccttcctctaaaagttattacttcctccgtctcaaagaaataaaaatactagggatatctagattcatgcttagaatttaagtttttttaattatatttttaatcttagtatcaaggtgtctaggctgtgtttagttccacgctaaaattagaagtttgaagaaattggaacgatataacaaaaaaatttgacatttgtacgtgtaggaaagttcgatgtgacggaaaagttgaaagtttgaagaaaaaaaagttgaaatttaaatagggcctagtatcaaacgcgtagccactgatttctaacgtgctgtcgtttgcaatgacgtcgcaggacgtaagcacgcgtgcggcccaacgttcgcgtcgctttctttcgatgcaacaatccccttttgttgacttaccagaattcgccttattctgtttatgtttggtctgtttgtagtgtttgagaatcctacgtatttcgaactttatgttttaagagctaaacatttcactttatccttggcgggcacatgataaatttaaccacaaaatactacagtaacatgcaattcgaaagatatagagtgttcctttaaaatcatactcctacttatctcaacttggttgttttaaattttataaatacctggcattgtcaaccgcgtcagtattgaaacgtaaaatactagtagtagtatacagagtaactacaaacaagttgtttatttactcaaagcactccgggaatccacacgcactagaacaagcaatggaaatcggaaccataaacaaatagggtcatgtttgaattcagaatcaaacgtacacaccaaaacacaccatcgcgttgattggcaccgtcctcggcaccaaactcctgctacctcgatgtcttgatcagaaccacaggagtacgcgaactaaaaaacggccacatgcaatgaatctgttcccacgggaacaaatggaaaccttttttctaacgacaagttgtgatgacggagagggtgacaacagcagttgggaacacttggcgtctcggcgaccaccaacacctataagtagaggcaggcaccaacaaaaatggaagtagagcaacaaagaacagagcagagcagagcagcagcagcaagaaacagagagagaagcagagcaatttcgatcgagaagaaccaaagctactcctaagccaaag

SEQ ID NO: 5132 - DNA, 2000 bp, Oryza sativa
tctggcatcagttaagatcgattcagattatcaaaacacagaaattaatcatgccatcccggtcgtcttaatccagaaaaatcatacagaggaagaattcagcagagatctgaagatccttttctttttcttttaattcttgagatgggatctgaataatccttaatgcagacatgaatgatgagagtaatctcaatgagatgtcgtaatccatttgtttttctgcttggtttgcattggtgcgagccatgtacggctccagaaaaggcattgacaaagattacctcgaagtctgaaattaaacacataaacacgcgagagcatgcgagttcgtggagcccctttcgagctagtttatctgatcctttcccgagatgaggatcccaacaaccgaacgagaggccaagaacagcaacgatggcagcatcagccgtatcgactacaaaatcaaatggtcataatgtataattttgtgtatgatggattgatagggatgcttgcttgctgcccactagcagatgatttgcacaaactgtcatgtgcagatagatatataagaaaaaaaattgagctaagaaaatcccgaggttttctgtagctatgactatataaaatgttgtttcattaaaacagcgataatttgtgatgaatgtacgtttgcataattgatctttaattggtaaagaattaatataaaaatggacttgtccgtacgtatttaattactgagcaatacttattcttttaaaaacatgtaatcttggacatagatcttgtcaaacttttaagatttccgagtttcgagatatcgttattaactattcagttgtgaaaaatgctttctgtgatacaaggccgtgacaatatatgatctgttatcatatcgccgcaaaatctccctgaccggaacttgaaagctcagcatattcataccaaggattcaaaattgaacggcaggtatggtattttatgtaatgacaaacttgtaccccatcggtttcgaaacatagtaaattagaatcggatgggacatatcccaatattataaatctggagataaggcattcatttgtttttagattactatattttagagcgaagggaatacaaaataaatggcgtaggtgcacagcccctttaataaaaaaaaagcacggaaagactgaatggcataccccagtgcaattatatcatattttagtaaatatcaatacatttattttcaacttttacaaatcagaatgcatttgtttctccactgttataaactctaatataatgatggcttaatatactgaattgttttgaaataaatagtatgtaaaaggtggatttattttggaacagaaggaaggagtactgccactattatatacaggagaaatctctgtagacactacactccattacagtacacagttgcaacagttctccagtacttcctcctgctgacactgctcttcagtcttcgctgtgcatcatttgcagatcgtctgttccatctatcgaagacacgtaccatatgactgcagaataaaaacattatctactgggcatggaggaacccgtttttgctgaccatttcgccttcagaaaaatcagcacaattattatatatttaaactagagctcatgtgatttttctttttcaagctgaaaaaatcgtgtgaagcttcgtccatccctaaataaattaaaaaatttcttgtgttttttttatggtgctttcggatgatcttctcaaccaacgtgccacattttcgcaggagggagaaattcttttttttttgtcaacggtcaacactaaccaccagcaactgaaactctaatttcgtcaaaagatgaggtcctttttgcaaaagagagtagtagccaccagaagtataaattttcgtatgcttttcctgccatttctgccgcgccatctctctctcttgcgccttctccgactcggactccgacgagcagaagccggcggcgaggtctccggcgagggcgar

SEQ ID NO: 5133 - DNA, 1737 bp, Oryza sativa
  misc_feature (1)...(1737): n = A,T,C or G
targatanagwnaaagatnataataartaktacwctaascagcagataantttataatngaggagcaagatcatacgcagcagtatatgtwtattctctasgrgragaggrgagagaatatatttttatatatggggggggkngaaacaccctcycaggggrggagagycnyacnasngngrgrynannaacggnraaatatttwnknkwtwgtgyaacaagagaaamtttgtarnganaaagagaacgracmmcctaaaawttgnaaacccccgaaaaggrggggktttttcycawaaccccggaaawttattttcaaaccyttyttgntaaggsskycccaaaggcaatttcccagcatatcactcgwacccaagtactccagagaacaatgtcaaaayttagctgttttgctgtttagcttagtgccaggaggacgccaaaagtctttccatcagctccatttgtttcgccgcatatatggggcatagttcttgacagacagtgattggcacgttgttcatcagtaggtacataccaacagaaaccttccaaaccatgccaatacattcttcgtatatattcctggctattcggtaggtcagttctgaatgagtgagtgataatggcatctgtttctgccataaaataaacgaaatctgcgacgcaaatgcaacgttgtgatgatcacttaaattagtaccacccagatgcacatggtgttttaccacgactgacctcttgacctctgagatttattgattagattataacgtaatcgttgttaactgcaaaagctgcacttgccactgttcctttcttgactttcagagttcacagcatagttcagaattcagaaacgaagtacaagcggttaattaagtactcactaattaacaatggagctgtacgcactagtagtaattcttttcgagcaatgaaagctgtctgatgggcgctggctatcaatgtatgtcactgtgttgtcatttggcagccaatgtgagttgtaaagaggtagtatagcgtcttttcgagagcaaaacgccgtggcacgatcggtgctacaggccaagtcaggcggttcgtcatgatgaatccaactcaccaaaaataattctggtgcagttttatttcagtcctctgctcttgcatccaaagagctagacttccctgaacaaattggcatcgattttaattaccaaacggtaacggaatgaatgctgtgactaaattagctggactgctggagtagactctgacctgcatagaactaactactataattagttcgagattccataaaaatcaaagaagctaatcagttcgtcctctcggcgcagcctgcacataattgaactgctaattttattctagtcggaagcacatttaggtagacctgccttccatagtcttgtgtggcgcaatcattatcgaacatggctcctgtccccaacaccatcatctaaaaaatggcttttttactctcaacgtcgagtccatatatacggccttgagctagcgcggtggtggtagactggtagtggcagtagtgcaaatccacagctcagcattttgcctcccatggcgtcctccaccgccattgcccttgctctcctcggcattgtgcttcttcttcccggcaatgccttcgtcgtggtcgcctaaccacgcggcggcggcggcggggactacaggatgcagttcttggggcagcagaacgcggcgagggcggcg

SEQ ID NO: 5134 - DNA, 2000 bp, Oryza sativa
actgagctaagtcacacaataaacgaacctctgatgggacaactcctgtatgattggaagatgtatatgagtaacaatggcatatgatcagaataatgaaaaagttgcaaactgacctagatttggcccacttttaagacagagctcatgcactctgacacgttcttttgggacaccagagaggccctggagaagaacctcaagagcatcaacatgctgcataacaagaagatcaaccaaaagttacactgatgtcaaagcaatgaaaactaaaaaaggttaaatggtgttctaagcacaagacattgacatgtgtatataaattaatccctttattgtaaaattacaaaccatataagtgatatgattcctccaattgtatataaaatagaaccatatcaacatattgaaaagagaatcaaaaaaagtctgcaagtggcagaagtagtgccctcagagtggagaaacatggttgaccatatagtggtcagcatgatcaactgtatactttttttttattatcctgaagggaagtgttgatatgctgacaagaggaagctataagagactaacaaaaggtcatatagagacaatggatcgacgacaaagtcttaatgctggcatgaattattattctctattccctgatgtgtttcgttcaagaaaaaagaaattctctatggacataaagttccaatactacttcatgctatatggagtgaaaaaataactttgttcctaagtaggactattgagatgtaatttgacattggggctatgcagttgatagatttgctacctgggatagcttaagtgttacctttcaaaaggttttatcacaattacatttacagaggtctgttttcaggcaattgacacctccaacaacaaaaatgctatcttaaatcaagtgatagaaagttcatttagtaaacgtcgaaattctacattccaactcctttggataaggttactacaaagcgaaaggccaaataaccttatgccaaaaattaaataaaattcagaattctagatacaacatacaagtaaggagcgcaaatgtcagatcagcaaacttgactagtaccgatttcccagaaaggcctaccatcatacaaaaatcaagaatccatgaagaacatcacatctaccatcactccggcttatgttacgggccatgtatgattttccgggtaaaagttcaaattggtcatgttttacagcataaacagacaaatcagtttcatatgaacaaaaatgcatcgttgcatagctacagatcactcattctcggaagaaactaccgttcacttcaacaaccgctcacacagtcaccactcatacaagtctactggcgaagtgagaaagaagaacaataacctgggtctcgatgatcccctgcaccacgcactccatcaaccccaccgcttctcgctaccacaatccctgcaagagagacaaaccctgaaaccacgctgcggaatttcgtcgaacagctacctcgcagcaacaaaaattcacccccacctttaacctaacagcaataatccgcggcgcggcgggggctgaggcgtcgggaagtgagccgatccgaggcgcaagagctccccccacctcgcaaaccccgcgtccccgaacactcccctctccgccactgaccgctcgccgtcctccgccgcctcctcctcctgcagcgatggagacgagaagaaagaattccgagaaaccgaggggggtaaagtgataaaatgcctcacccccgcgcgaagggtcgcggcgtttttgcatctaggcccctggaagaatctgaaatttcagtcatacccttcctctgacttctcctcttcctcttcctcccccacgcgctcgtctcgtcttcctctcgaattcccattttcttccacctcctcctcgtctcgaggtctcagatccaatggccgcgacggcgacggcgacgaccaccgcgtagagcgcgtgagagtctgcgtggacggctaact

SEQ ID NO: 5135 - DNA, 2000 bp, Oryza sativa
gttccaacagcaactcatctgttcagttcaacagtttgacagaggatcttcatgaggttgagctctgatatgctgcgactgctcagtatgacccatgattttatagaaacaacctgggtaaaataccttgatcctctcagcaaaccccctagaggagggagggagggagggagggaaaaagagaggaaatgttttacagtaaatgaagggaatgccacaagtgaaatggatatctcctgtcttgcacaaagttgtgggatggggaagtaaagcaaggtgtgcccgccctgtactcgtacaaacagttgtttttttgggagattttgtaggtattgttggttattatgggtttagagaaggggataaagagtcggatgtccttttttacatgtgagaagcagagagcatgtggacaccattgtacagataatccaccccagcccagccccagccctgcccccatattataattcattgaagacgcagagaattgggaattcatccgccccacatccttttttgtcattgtattattatcattttttttcttcataattttggagaaggatagaagagagggagaggtcaagatgtgtctggatattctagtgtaagaaagaagaaagcttttgactgcgtagagtgttgttatacttactgtaatgttcctataccatgatgatgataatattattctttggagtcgaccgatggatcaatcaatactggagtaagtagcatcctttttgttttgtttcccagcatgcgtgatgaaagaggtcaatatcatgtggtggtttggtttgatgtgattcatctggtagtttaatttgtgctgtgtgttggtaaccaaaggctctctctaaaaccggagaggaagaatagatcactatttccttcattccaaagaaaatctataacagaaattgagggcaaagaatctggataattgttttaagtttttttaattggttattctaagatacttcctccgtcccaatatattgcaacctaggatagaatatgatgcccaggttcatataggttcatagtattaggatgggtcaatcccatcttagttgcaatatattctaggttgagtttttaggatgtagggagtaggctactagagtagagagattggtaggaatcaccaaaagttgagggcatttttttatttattttcactaaaatatttaaaaaataatcttttgtttcaaaaatttatagatctggatgcctcatgccatttgggagtgtaaacgggctttaaaaaaacatcaaacattctgttagagaatgatgtggcatataactgttggttactcctttcccgccctcccagagggtttttttttataggaggaggacgcttgtaaatctgcttgataagatagaaaaatctaggccacccttataccagtattttgggggttttttttataggaggaggacacttgtaaatctgcttgataagatagaaaaatctagaccacccttataccagtattttgcgggtagcctttcctcagtaaaaataataatatattttcaaagggcaaaagggctccgtctgacatgaacaccctcttttttaggctgctattagacggagccaacagtcatctgccagataaaaaaaaaagtcctctcaaagtgcatgaggcgtctagatctgtaaatttacaaaacgaatttttaaaatattaaatgaaagaaattaaaaattagaaaaaaaatggtgaggtgaggaggtaggcaagtcaagtcgaaaaacatgatgatgacgactgctaattcggcccaacaagtagtcccctcccctccctcgacgagagaagacaagacaagtcgcgacctgacgacccgaccttcctcttctctcccgctgccctccgccgccgacccgcaggggatcgtggggacgatcgatcgaggaggagagacccaaaccctagccacccaggcgccactcccattgcccccttcgccagccagcc

SEQ ID NO: 5136 - DNA, 2000 bp, Oryza sativa
agagagcgactgcgggcgagcgcggcagcgggcggcggcgagcggcttgctccgctcaccgctccgccagctggcttcgcctgcttcatcctcgcaactacctcaccgccggccatgccattctcctacgttgctatggcctctagctctgcgtcctcttctcgcaagccggttcccatcgccacagccagcgcccatcgattagttccattgccggcagcggcggcggtcgtggcggcacctacgccctcgccgtcaaacctagcacggtctccgagaccccttctcgtacttctccggggaagatacctatctcaccgcctccgatctggtggccgcttccgtcatctcctcccacctctccgttgtgggggatggcgccgacctctccaaggtcgggatcttcctaaactccacggcgcggcaccgctctgtaaatggcatatgggctctgtaatttttttattccttctttgctgactaggcggatgccatgtcagcaaaaccacccatatataatgctatgggacctatgctatgggacctattttgtacggctttgaacatttgagaggtgaagatttctggtatttgagattagggacctcggactgactcaacgtgaagttgagggacaataatgaacttatcctatcttactataaagttataacccactaattctaaagctcaacatgcaaagatgtcacatcataatacattaacaatatatcacatcatcatccattaacaattattacatttaaacatcatacaagcatgttatcttatctataattttataatttattaaattttagagtttaaaaatgtaaacatgttaaatcatcactccaaataattcacataatatttcaatatatatcttcatcatttatgataatatcatatatacctatatggtacatcctcacttagttagtgttatttctctcttctcccattaaatcatatcacatcaattatttttagccttaaatgattaatctatggtccaaactatctcactccctttattctcttataatacttcaatatcttacttttacatttgaatcgtctatatactatttaaatttaaattatcataaaccatatcaacttatgtaagtatatgttgttagccatcttacatattatttttacttattgttatcatactgaaatcccgcagcaacgcgccgggtttcacctagttccgtagatgattggtcactaaaaaaaattaggaaatgccttttttttttcttcaagaagtaaacgttcttgtactagttagatgcttagtttgagttgattttttcagttatacagactcataagaaagtacgtgaagatcccttctaatcatcagactaattctatgtcacgaaaattacttatagcagtaagaatccaagaccagttcatcaactggtaaatactggagcagttggaggcctgaagaaggtgcaaggcaaaacacctgacaagccaaatgttgcacgcttttgaaattatctaatgcgtgtgtgcagagtataatactaaaaggtttactgtttgtactaataataatacaataaactaacaattcagcgatttctggccgacgagttgctctctcgagtaatcacctctatctggtcacgatcaagaaattagaccccttctgtcacatcagcagatcagctcaagtgctcaaccactacacaagtacacgatcaagtaggcaagtagtacgcgttggcgttggagggagtccacacatcattgcacgaaaaagcggcgtctgcaactaccgtagccggaacatgtcaaacctcgttcgagccctggtatataaatacacccggcgacgccatgtccgctccacgaacaacgcaacaccaagcttagctaatctcacagtcaccgagctgaggtagctggcgagatagatatagctagcacagagagccaaaatttcctagcgagatcactttaattcgccggcgtgc

SEQ ID NO: 5137 - DNA, 1382 bp, Oryza sativa
aaaaattctacaagagcatacggtatggggaatcaggtccaacaattgttttctcctctcgcctccctctagctcttgtgtacgttgtgtgttgtcattgtgtgtctgtcttacggacagtggtactcaagagagcatctagtactctcgtgtcgttgtgttggtatgtggtcttcctcctcgtgtctgtcgctctgctctcccctcttcctattctatgatatggcatggctctattattgattgctctacggatggcatggatggaggttggtctcttcttcttcttcttcttcttcctctttcctctcccgcgtgcccgacccgaacaagggaagaagagaagaggagagtagtggcaaactaggctagtactcctgctgctcgccttgttgtttgcgttattgtttgtttgcgtgcggcggcaaggcaacgcgaaaaaagatttgtttttttctattaatattattttggagggccaggggcggttctcgtctcttgtttgcttgcagtgcgggggaagaaggagatgaagcccctggccagggttccccgcctctctctctcttctccaactagttaagctaagctaatgtccatttccatctccatgtccttgcttctttcctttggaatcgctgccttacgctcaccggagaagcaacttgcattttcagcaagcaaccatttctttcatataagcaaaccccaatccaatccaatcccaaccccaaccacctctgctctgcttcctttccctccctgttactactgcattttgccattaatcttctctctccctttccacctcctgcaacctcttcatttctttgctgctgctgcttcaggtgarctgagtcgtcctttcctcccctcatgccaaaatttctagaggcttcagcttaatcgtcacatctttttcttacacaagttttattatgagatcaccaccacctcttcttgcctcaccacctgctggtttctcttttttttttcgaataagagggcaggagggctgcctctttttcattaataaagaaggagctggtttctcatttttaccctgcctttttttttccttctcttttggctcgattcagtttatcctctgctggtttaagagaaatatattttctccttgttggaatgggccatctttttgtacatgtgtagttgctctcctctaatccctaacccttgaggggcacacatcttctctctttcttttgggtgtcctgttgctaatctctcctgtccttgtgcaggaagttgatgaaaggggccaaaagtttgagagattgaggcggtgaagaaaccacaaaaacaggaatcccaaagtgacccaaggcaggaaaaaaaaaagggctcttccattgcaccta

SEQ ID NO: 5138 - DNA, 213 bp, Oryza sativa
catcgacacctccacggggccgccccggcaaacccgccgtgcacggcgagaacgccttccttaaccgcgttgttaagcccatctacggcgtcawtcgggccsaagtccaattcaaccggaaagggaacggggcccaaaagcgcctggcgaaactatgacgacatcaacgagtacttctggcgccgcgacgtgttcgaccgcctcggctggccc

SEQ ID NO: 5139 - DNA, 2000 bp, Oryza sativa
tccatacaagaatctaatacgagattaattaaaattcaggaaaaaaatcggaattagaaaaaagaaaagaaaagaagcgttcaagtaggaatacaatttaaaattaactgaaattcggaattaaatataagcaatattaaaataagagtacatataagaacccaatagtagattaattaaaattcggaataaaaagtaaaataaaatctaaaattaggcaaattaaaaagagagtcaaagtaggaatagaatttagatacaaccgaaattgaaaataaaaagtaaaaatatcaaaagaacacaatacgaaaaataaaataaatactgaaattagaaaaagaaaaataagattttaactaggaatacaatttataaataactaaaattggtgataaaaaaataaagactattgaaaaaaaaagaccatctaaaacacatgacgagattaattaacaaggctatacataagcagtgtggtggcggttggcgggacttctaaacacgtaacggttaaaaggaaggacgacaggtaggtcgtgaagcaatcgattaaggcggttggcgggacttctagaaagtaaaaaaaaaactacaataataatcatatttaatttttaaaatctcaattacaataaaaaaagaggcagcgatcgggtcgtataggagtacaatggcagagccgccgatggatggtgggttttttagaaagtaaaaaatgaattccaatgttagttatgttcgatttttacaatcccattgacaataaagagtatagtgacaatgtttgatgggatttctaaaaattataaaaaaatgaaacccaatgagacaataaaccataatgataatcatgtttgattctaaaatctcaatgacaataaagaagagcggcagcgagcgagccgtagaggagtacagtgacaaagtcgctgacgttttggtgcaacttctagaatgtaaaaaaataaacataaactataattatgttcgacttttaaaatagcaatgacaataaagagaagatgcagtggacggtcgtagaggagtataatggcagtgtttgacggaacttctagaaattataaagaagaagcccaacatgacaataaacttatagtttttagatccaatttttaaaggttccaaggagaataaatagaaacggtggtagatcgagcaagaaaataaagaataatataacagaagtaaggagtatcaactggtgtgacttttaaaaaactgtaaaattggaaacacaaggatgataaggtttggcctttcaaaatcttgagacaacgagataactatttaataaattttaagtaaaatcatattaaaaaatatataagtttatatgggtgctagccgcgcaattgcgcgggccacccaactagttgtaataatactaaggtataaacagaccttggtataaaattcacggtattaaatgttttaagtgcaaaataccccgttttaaaagttcaaagtatgttttaagacaagataaatagtcaaatgatgtaaagtagttttatcccatcattttctaagatcactctagtatgattcactctccttttagatggagttgaaacattttgattggactttaactgtaagaggggtgaagctaaagatatagcctaattatttagatacgagtatgtctacatacataactaaaacataactaaaagttagatacgagtatgtctatatacataataaaagttagtatatatatctgaaaacgtataaggtgtaaaataaaacatattttatgttcacgttcataattaaaagttactatattatgaaaatgatatatggtgtgaaactgtgaaatgagacatattttcgtgtttagttttagtctggcggcaaaccgccgtgccggctcagtcgctgtaaacgcctataaaacctccaccatatcacacagcagctcacttgtctcgcttcctcctccgactcgcctcttcccaccaactccttccccg

SEQ ID NO: 5140 - DNA, 2000 bp, Oryza sativa
ttaatggaagtggtctcagttaatatccgtggtcactagtagtgggcccataacgaggtccaaccacgaccacgaccagccaaaaccaggaagaccacgtgaaatcccatggccgcccttctggtcagaggctggttggctccatgaacccctcaaccaagatatgcgcgaagggcgtaagatgcacctgggagtctagtcatcccatattaaatgggtgtctatcgcaagtcattctattaaagtagttgatccagcgtgcccataccaggtatcatgtctaacgcagttcgagacgtgaaataacagaagacgtccgagagcagcaagcccggcaatatgacaaaagatgaagtagactggatagagtaagcacatgacacatgcaaagggtggcattgttcatgcatttttcccatgtatcatatgtatatatataaggataaaagactttccgtgggattagagagaccagggtaaaacacatgacacatttacacaacccatgtgcttggttgtaacatcttctcattccccacaatacaatccaacatgagtatagctgttaatccacaggaagaaccagattatttgcgagactagagtggtcacagctcttcaaccccccacagccccactaccaaaaccccagttcatcaccaaataattctgccaactacaaaccatcgaacaaatggtaaatcataaaaacacatttctaatgtggcacacaattatcattcccagcaggtaaaaccaacctggagcattgatcatttagagcgccccttatgatcaggaaaggtatttgctagctccatctgtcattacacggtggattttcaaaaccatttacttcattcccattttgcacgtatagacagttaatcaagatcatttactctccccttcccattttaagtgcaatcgtaagtttccacgcctaactttaatcatccgtcttatttaatttttttttataattattaatttttattattataagatgaaaaaacatgaacattactttatacgtgacttatgcttttaatttttttaaaatttatttttaaataagacgaacggttaaaattgtgcacgaaaaattatacctgtacttaaaatgggacgaagtgagtacttcattctctcttttttttttacacgtaagacggtaaaataatcccaattttactggagaatcagcagagcggaggacagcagcgcagcaccgaacggtgcactgcatcagcgactacggcaacagcttttgtctcgtcctctttgccctcctcttcgacttcgagagaaaacccaaaaaaaaaaaaagaagcgttttttcgagaaaaaggaagcgtttttttctttaatctcacaggagctcgcggattttggctgccgcgtgtataaatgctcccggacgcctccttccctcctcctcctcctcgccgtgctcctcacaccgcaccacaccacgtctcctcctccattgctgcgccgcgccggcgacgacgcgacgacggtcacgacgcgctgagaggtcaggccggcgtgcctttgtctgttccgccgtcgtctcttgctctgttcttgggctgcccgtgatctctctctctctctctctctgttcttctctctgaattctttgtgattggttttgtgtctcctctgcctctccctgtgctccgaacaatctcctgaaaattaatctcagcgctagctgttgctgttaatctcgctgctgctgttgttgttgtttttttttcttttttggcttcagttcacgggctgttttctggtgtcctgttcctctttctcttcttcttcttcttcttccctttgccgctcttcggtgtactttgtttctccccccaagaaaaaaaaacaaaaaaaagtttgtttcgttcttgtatttgtctccattactgccgcttctgaattcaattttgtttttgttttatgttggtcgatcgtgcaggtttgttggtggtggcggcgag

SEQ ID NO: 5141 - DNA, 2000 bp, Oryza sativa
gcttagccgttatttgcgggtgctgcacgtgtgatcttgctgggcatgtgatctgctcatagcagatactcaggctggcaaagagccaaatctgaaaaaccctgtagcatagcatcaatttgctagtcctaactactgtttgtttaagtttttaggtgagtcttaatatcaacttgtgctattttaaagtatcaatcaataaccttacaagtgtttaatgtaaaacttcttactcacatgaaggagttgataatatttgtatgtagaaacttaatttgcatatataatagtaataacaaaaaaaaagaagaagaaacattttcatggctcataatcccttggggctctagaagcctagacagctattcacatgttttcatctgagtagagtttacttgagaaaattttattgaacacccaaaatttctaaactaactgagtgctcccttaaatctatctagagtcaaatgggggaggagcctgtggccatgtgctggagcatctgatccgcatctcaagtatcgctaaacaaagtgttcttttttggaaccactaaacaagtgtgttcttggttcttgcacactgattcgggaccttagattaacagcttcctggcgtgaattccgtgtacttatttgttataattttgacccatcctgattaattgtttagctaagttttttttacccttttgaggatgggtaacaaattgctgtcacagaatcttgtttagcattatagacagataaaaatagcaactagttatcactcttatcagctgggtactgctgtcactgatcactggtgactgcatctaactctactagtttactgtaagcaaatagtggatctttcttttataacaaagatattattatatcaaacaggtgtttccaggatgttgctttagttcatctacttcatcaaagagtgcgtgctcgaaccttctatgaaaatgcttcaaaagttcagcatctttcaggtattttctgtaccataactatatccagttttatctacttctatgtagtatagtgttattatctttttccatagttgcaatccaaggtctctactagtatagtttcattaataggactagttatgcagaattctttatttccaagttgattaatgattaattacatcgcagacatgccattttattaccggcagccgacattaccatcttgtaacaatttgaccggtgacctcgtggcaagcaaacttaactaccacatgagagacaccggcttcaaattgaagcgagctgcaagtcaaagtgaacttggaattggagcctatggccaaagtaagagttcccaactttttctttctattaaccagaattaattaattagccattaatctctcctagattaatgttaaagtcaaggccttgtcgcagtttgttcagatgcaggcaggccctcaactggcccatttgccatgttaccaacttcactctcaactattatttcccgccaaatttcatcatttatacaaatatttccgaaatgctcctgtgatactgacaagtgggccaggatcaactcaatatccgaatttaacaaaacccaacatgcattattaacataaaacaaacaattaaccctgacgaaattttctgttagaaaaaacaagattcgttcgtacacgtagcacttgatcgtcactttcgtcagcacgttttccgatgcagtagcacatcccgacgacgtacggctatatatacagcttcagcttcctcgcacccttccactcccaatcaaattcagagtttagcaaagcctagtgctgcaattagcaggtaggtttgcactttgcagtaatctctagctaattagtactagtaatttatcttacattgactgtaaatataatgatgctttggcttcttcttcttgcatggtttatgtcactagtattgatgaaatgatcgttgcatcgtttttcagatggagttgctacgcttgctagctgttgccgccgtggccgcg

SEQ ID NO: 5142 - DNA, 2000 bp, Oryza sativa
gatgcaagtgggactggcaagcgaattttttwaagctcgtttatcctatttctagttwattttttcttcatatactatcacgtgtatcatgtgagaaatgaactagaaaacgggttacatacatagttacctgctctgctctgcatctgctgtggatgtgtggtctcacctgtgcccgtgccccggtatgcaggatgcaggggcagcatgcatgtacagtacaaatatgatatgagagatccaagggaattgaagggaccagcagagcagcagcagtggcgcacccagggaactttgaaaagtttgtttgggtaaaatctaactacattatcatcaaaaaagaaaaaagatctaactacattggataattgttacggtatatggatatcattttatgtatcgacggttgcttgagtacaattaaattgggtgtcctttttctcattggtttaaacttttaggttgaattggcttgatacatttttaattcagcatgatatcagaacggataatcgaggcatctaatacatactatgtcgcttagataccatgtgacttaacatgtactgaccagtttaacccaatgaataaaaactaaagttgagggatgagcagtaagagcgataattcacttgtttcaactggttactatatgtcttgataagtttaggtaaatctaactacattaggttgttgttacggtaaatggatatcatataccgaagagcgacgacgattgacaaatgagggctttcttttgtacacagaaattattaatctatagtattttcatatatgagtcggttcaattttgactagtcctgcgacctcatatttaatgggcaagatgggattgtggctggtccacgtgactatgagagttttcatgggccagaatgggatttctgcggacgtgtactggcccacgctttgtaacaggcatgggctctcacacacgagcagatagatgaggcgactttttttttttaaaaaaaaaaagactggctgggggccccacctcccaaccaayctaagggstaccaaatttcacatggcaagatccccgatgactgaattatcacactacgtatggggactattaatagagcgactcttagtctwatcttactaattawttaaaaaaagtcaaattggttgctagtttgatctcatcaggtaaactcaacttcgaaggtttcccctctcttgctgaggtacaacgaacagcagatggcacgaatttgatgatgctccacaaagaccacatgatatgtattttgtccgtgtctctcatcagctgtggtgcccttgaaatgaataaattttcatataagccttctttgcactagtttgtagaaaagataaaatgaccactgtaaataggggaaatctgaagaaagtccccttcctagatatggagcaatcactaaaacacatggaaaacatataagacatgtttaatagtatagatagcttctatctataatatatttccatgtcatcaggagctaatgttgtagataactcatacgacgtgatggctataggctgtcttcaattagagcatttaaacatttaatgcttgcatagatggtaatgatctccatctttgtgaccattttgatagtcactaacatgagtatacagttttcagtaatccaacatgactatacagttttcaataatcctaaaaaaatcagaaacgatcatatagggacgccacgtcaataagaaactataccccttccacgaaatcgatgttcggtcgatcgaagttaatctattctctctccaacaccccaacacggggatgacacgtcatacaccatgggcccacaagtcagtggctcaccaggaacccaaccacctctcatcacttcttctcccctccccctgactagtgacgagaagcaaggtgagatccatcgcatccggcattccatcagaattggcgaaaccctagcagcagattgccccgccatgctctgagcccgccgacg

SEQ ID NO: 5143 - DNA, 2000 bp, Oryza sativa
gattataccccttattcatactcattagtttttcgattcctttcatatacacattagataagtcaaagtcacaattatattttcgttgctcaacaattatttttagaaagtcaatacaacgattgaattttccgataatccgagtattttattttgaacagaacatgtccggcgcctgtattgtgaactgcaaggagcaaaggttgtgcatccagcttttcaaaaatttcaaggtggagacaaagaattcgaggaggctatgtgtgaaaaacattctcatcttgcaaatgatcaggttttgtgccgtaacgattatcatgtcctgagcctagctaggtgggcatgacgaggatttcatgtatgtggatactgtagcctctgaatgccctccttttgcagatgattactgagatggagtttactaattgcactttgcaaatattaattgatgcaacatttccttgagtatataacagccaagctagcatgaactccttgagtgtataacgtcaatgttaattagcatgtattatagttcaaaggttttttctactgaagatatcctatcttagtataaagttatcccccactaactccttaagcttaacatgcaaagatgctacaccatcatccactaacaagatgccacatcatcatacactaattaacaagatgccacatcatcatccactaacaatcatcacatttaaatatcatgcaaacatgctatatctttatagtttttataatttaagagcttttcaaatacaaacatgttaaattatcatccagcataattcatataatgtttcaatgcatatatttattatgttttatgatattctatggtccaaattatatttctcattttttcctctaattcagttggttttagcctttagatgattaatctacggtccaaactatctccctacttttcttcttccataaagtcataccaccttactttttacgtttgaatcatcattttacatactatttaaatttatattatcataaaccacattaatttacttaatctgatgttatctaactatcttacacttttttttattgttatcgtactaaattcctgcagcaatacgcggggtttcacatagtaacacaaacacttgtgtcttttctgccttttcctaattacgagatcagcaatttcaccattttggctgtgtttgtgctcaagatgccaaatttcaccatacaaatcaggcatttaccatattaccatccatggtacctccaaagcatgcatctttttttttaacaaaaatataaacaatgtacatgtacattaggaaaaaaaaacttgtgattgcaggttggcaaatctatcacataagttaaatgccctggtcttcaaaatctcccccatacagatcatggcatctgtaatttcaaaaattctgaacatattgattactattattgcagtccaaaatgaaatcatatgaagaaatcagatgatcataggcaagacgaaacggtggctcgtcagtcgtcaagctgtacgattaaactaatagagtgatgtgtatttcactttcatccctttagcatatacctaatgaagattctctaaaagccagcagatagatagcctggtaaccacagtatctgcccatgttgcttctcttttatatatatattgtccatcataggaagtgatgaatacaccgcatctgcataaaaaccacgtcaggattcactataaacccatatatgttgtgccaataaagtgcaaaacaactgacaaggcacgcagtaatcctgcaaaactgtgtgtgtctgattagtggagacactaacaataatacttgtatcttcttcagaaaccattcaatctcaagcacacctggatggcatattctctcttcaattttttttttcagtcttaaagaactctacttaagcagctgaacagatttcaagaaatacagactagcttgagttatcacagtgcagtgtagtagtgatcagcc

SEQ ID NO: 5144 - DNA, 367 bp, Oryza sativa
aaaaagagaagaaaacggaaacggttgggtggtgtggacccttttccgtcccaatttacacttccgtacctttctctctgacaggtgggccctgataagcagcggccgtgcgtccgcagttacgtcttgtttcgtttaccttctccgactcctgacgcggcctcaacaagaagaccagaagcttcctccaactccggccgccaccgacccccctcgacacccgactccctccataaatttccccccctcccgcggccgccgggagatcatcgccgacgacaaccagagcagaggagaggggaggggaacccaagcaagcaatcagcgtggaatcggatcgggtacgaggaggaggaggaggaggggg

SEQ ID NO: 5145 - DNA, 2000 bp, Oryza sativa
gctgctcggcttcctgcgcgcgacgggcgcgccgttcatggtgaacgcgtacccgttctacggcgggctcaccaacgacacccttcgactacgtgctgttccgggtgaacgacggcgtcacgggacaacgccaccggcctgctctacgccaacatgctcgacgcgcagctcgacgccgtccactccgcgatgcggcggctcgggttcggcgacgtcgacgtcgtggtgtccgggaccgggtggccgtccgccggcgagtactgggattcggcgcgccggcgccgacttcgccagggactacaacaagaacgccatccgccacctcggctccggcgtgggcacgccgctcatgccgaaccgcaccttcgagctctccatcttctccctgtttgacgagaacctcaagcccggcccggtgtccgagcgcaactttggcctctaccacgccgacatgacgccggtctacgacgccggcatcctcaacgccccgcaggagatcgtcgggacgaaggtcacgccggcgccggcgccggcgctggcgccggcggaggatgggcggcggcggtggtgcgtgccgaagccggcggcggacgaggtggcgctccaggtgaacatcgacttcgtgtgcggacaaggtggcatcgactgtggcgcgatccgggcggggggttcgtgctacgatcccaacaacgtgcaggcgcacgcagcattcgcgatgaatctttactttcaatccaacggccagcatgagtttgactgtgacttcggccagaccggcgttatcacaaccgtcgatcctagtaagtactatcccaagacgttttgacctttttcctaaaatttataaaaaaatctagcaatatctacgacatcaaattagttttattaagtctaacattgaatatatctcgataatatgtttatttttattgaaaaactattttttttataaacatgatcaaacttaaaaatgtttgactagaagaaatgtcaaagtgacttataatataaaatggatggagtatattaatttatcttctacttaataacaataatagtgtagtttcattaattaagtttaaatgtccttttttttatttattactagtggtacatgatttttttttctcttgacaggttataagagctgcaaatttacatgaagcaagaggtggctatttggataatacttggctaaaaatggacttatgatgaaattattataggctatggttaacttgcgttgaattttgtggagtgaggtcgtctgttcgtgctgccgatccaaacatacaaaaaagctatggatccataaatgctaataggattttgcaaagatatttgttcatgttgaaccaaacaaaagttaaaaataaacaggttatatatctgtatcaataaatatatggaagctcaagatgtttcatctaccagctgaatgactgtgcactgcaacggaaaattgaataagagaaccacgccatacactctaaagtttcaaaaattaaaataaaactaccgtcgttataatttcttagggtcacattatatttgccatcatttccacctcacttcaaaagactttttttctatttgatgtaaggttgggaaagtaacaaaaatccatctacctcaatgttttaggattcaccactcatcaccatctttaaggtttacgttgaaaattaaaaaaaacaccaaaatatattcactcgtgtgtgatctcaagtggaagtgattagtgatccagttcttttggcagatatttgttggatctttctaatttcaaccatgacgagagcccatgattaggcgtccaattaccaaattctaagcccacaattgggaatatttttaccaaaatttctataaacgaaaagcgcaaggggccctcgacaaaatatcacccaagtcctcttctctcttctcttctccgccgccgcctccatccgcggcgcatcccatctcgccccggcgactcgtcggcgtcggcgtcggcc

SEQ ID NO: 5146 - DNA, 2000 bp, Oryza sativa
caccgggcacgtcgtccccctctgcagccacaggccgatgcattccgcgtggtaaaacgtgcccaaacggccgcagccgccggcacggctgtcccccgccgtccgcgaccgcgaccgcgagcctccccttgcagatcgcgcagagcgccacgtcgtcgccccttgcctccgtggcggcggcgacgtcgatgatgacgacctcctccttgttcagcaacccttggcgctccccgttgggatcgccggtggcgacctcgaaccgccggccgattaagcatcgcacggtccaggagatggcacagatcgcggcgatgagcgcgacgacggcgaggaatatctcgaggcctgacagatcaaccatcggcgagagttcgttttcgtagctaggtacgtgttgctggctcgatcgtcttggcgagtggtggaaccctgcacgcacgcgtacgtattaacgtataccagtacgtgctccggctccaggtacgtttgttactcctacttgtttcctatactgatttgtatttcgaaaaggtttgtttttttcccagatattactgcggagataattaaacagttcgtatcagaggagaaaatcgttgtggctgatctccacgtctttgttactcccacaaaaatatgaacaaattatggctcgcatggatgctagtagtatttctgcttgctttttgctcatggaaattattaaaggactaggcaactgggcatttaaggagtggcaactgacaagtatgggctaactcaaaggcgcagacataatcaattggaagagtgcttaaccacgagcatcagttagttttacactgaggcattggggacatggcattacttatctccaatcgtgtggtgttcatcagaaagaaactttggttaaagctttgctcctagggggttgtttattgtgcaaacacacaagtaggcctatttgatgggtgcaaaatattrtaagtgtatgwggatggkmagagcwratwattcsskccgagaaatctcagttatcattcaagattgaccctgaggaccactagatagcagtagaaacataaaatctgaacaacactgagcgccattcagcactgtactacctctcccaaattcaacttccaccaacccaaaaaattcttctttactgcatcgtgacacggcatgcaacaccgtcagcaaaaaacgaaaaacgtggcgataccctctgaatattcccgctttctatccccatggtaaagatctggaaatagaaggccagaagtcagatctgcagttacagtctttacagagcctaaaattaactaaaattaaatggcatagccgcatgggcagttacagtctttgcattgagtcagagataaatgagagattagggtttacctagccccgcttcctatggtcggccaagtccttagcatctggggattacaaaagaaaactgccccgagtgagtggctcccactcgccttcctcgatccacccttttttgttgttcgaatccattggagcccacgaggtctttgcctcccattctcccaaaaccacttggattctcgaagattcagagcagggacctcaccttcgctgcagcttttttctttcaggcttttggcttcttggatccgtgcaggcgcgagaattcaatggcggttattggagcttcttggggtggtcactgaaggtacactggttagtgattactgagtactcatgactgtgcgagaatatacggtgaagttgtttgtttgtttgcaatttttgatgtttttcttcttcttggcaatcggctaaaacccaaaaccttcagaagaaaggcagagactttatcgtgttcttggctttgatccggttggaatcaatctcttcgaagacccgcaaactctcgccttggaatccgcgcatgttttacttcctgtctcaaccatcttgaatcgttcttggagcctgatgctgctctgcctcgcctttgcagtagaccagtagtacgcagtcttgcg

SEQ ID NO: 5147 - DNA, 2000 bp, Oryza sativa
tacatgtttgaccattcgtcttattcaaaatatttacgtaattataatttattttgttatgagttgttttattactcatagtaatttaagtgttatttatatcttatacatttgcataaaatttttgaataagacgaatggtcaaacatgtgagaaaaagtcaacggcgtcatctattaaaaaacggacggagtacctgttatgttgctatccctaggaacatcgaccaacaacgctggtcctgctcatacagacaaaaagaaatcacaaaagatgagaaaaacgacgttaattgaataattgacgagctagctatagtgtagttgatgagtgtgggctaattaggaaggaaggaagcgtaccgttgaggatggcgaggtcgagcgtgtcgacgtcgaagccagcgtggtagtagtggtcgaagacgtggcccggcgcgtcgacgtgcgtgccggagtgcgccgtgaggcggagctcggagaagttggcgatgtcggagccgttgcgcatcgaccgcaccagccgcaggaacccgccgccggtgccgtccgccgactcccactccggcatctcctcccggtagtagtggctgatgtccacgatccgcccgccgtcgaactcctctcgcctctctgccaccgctaccgccgccacgtcgcagctgctgccatcgccctccgcgtagcccgggtgcgccggctccgccgtaacgccggtgagcagcaggaggaggaacaacggcgtgggtgccatggagatggagtgtgtgtattaattctgcttcccaactttgatcgagctgcagataattaattaggattactccacgtactactagttaaagacacgtacgccatcggatcggatggaaacaaaagtttgcaattgattgattgattgattgatgttgagacgataccaaagtctacaatttttcagcatcattgcttacgatcgtactgccatcctttttcttcggggggaaaacataaataatttggttgcatagttgcattcccgacttcttattgactttttttttagctgctcgtaataataactagtgcctacccgcgtgttatagcaaataatttagaaatattttaaacaaaactcgaataaaactgtgttacctaacaaacaatgttttgagcaccaatcacacaccaataacgccaacgtacagatccagaaaaaggctagcaccagatcggcgccactaaaccaacaatggaacacatccgataccacccaaaaccgacccttacaaccgacataaaaccatgctccatccaaatctttgggattgaaggagagagggtgagagagaagatggaaccgctctctcccctaggccctctgacgtagccaacttgcggaagctaggacgccaacaaaagatgaaagaatatagatctagcgggcgggcttgcaccaaatgcttggaaagttttggcaaggggggaggggtgcctagacaaagtctcgaaagagaggagcaacggatatatcgctgtcgccgtttgtcaagacctcaaagaggaagtcgatttggtactatactataggagggaggggtctaatttaaaattctaatcatcatcgtggatgactatgtcagtacccgaactgagttattttcactttggattttgggtaaactataattagtgatctatatatgcatctcacgtagatggttcaagtttaaggtccagcagtgtattttatttttgtaaaaaaaaagaaaagagaaaaaaaaccatgagatgagacaccgcgaaccgagactgccagatggccccacccgcagccgcaagagcaatacaagctccaaatgaagagggtaacccctccctcctccctcggcctatagtgttgggtttgggtgttggtttttccccaaatcaaaaaccctcccgtcccatcccctccttgtgtagttgtgttgtttgcggcgaaaccctaggattgtctccggcggcggcggcggaaggatc

SEQ ID NO: 5148 - DNA, 2000 bp, Oryza sativa
tttaagatctaatctatagctaaactccttatcgattcccaccatctctgccaaacaagagattgggactaaaaagcaaatttccatgttaatctcaccaacaattccctcatctaaactcccaatcctcttccctaaagttgccaaacaagatagtctataatgttaaaaatagagtcaacctgttcctaacagcattttgaactgaaataaacttgcaataatagccataatggggcaataggggagggggggttacctctggtcagcagcagcggcggtgtcgaagggttcagttccgccgagggcgtgctggtaggccctagcctggtcgacggggcagaccttggggtcggtggagcggaggtcgttggaggtgacctcgagggtctggtcggagtcggtggcgcgggcggcgaggtggaactcgacggagcagtactcgcaggagccgtcgccgtcgcaggcgtcgcagtcgcgggagaagcgcatggccatggcggcggcggaggtgagggggatgaggccgaggcggtgggcgatgaactcgtcgttgaggacggaggagttgacctcgatctcgacgaggtcgatggcgacggtggggacctcggcgatcatgacgcggcggagggcgttggccatgctggcgtcggtgtcgcggagctcgaacttggcgtagtcgtccttcagctcgcggatccgcacccgcgggaaccgctggtacgacacgccgcctgccgcccgctccatgatccttccgccgccgccgccggagacaatcctagggtttcgccgcaaacaacacaactacacaaggaggggatgggacgggagggtttttgatttggggaaaaaccaacacccaaacccaacactataggccgagggaggagggaggggttaccctcttcatttggagcttgtattgctcttgcggctgcgggtggggccatctggcagtctcggttcgcggtgtctcatctcatggttttttttctcttttctttttttttacaaaaataaaatacactgctggaccttaaacttgaaccatctacgtgagatgcatatatagatcactaattatagtttacccaaaatccaaagtgaaaataactcagttcgggtactgacatagtcatccacgatgatgattagaattttaaattagacccctccctcctatagtatagtaccaaatcgacttcctctttgaggtcttgacaaacggcgacagcgatatatccgttgctcctctctttcgagactttgtctaggcacccctccccccttgccaaaactttccaagcatttggtgcaagcccgcccgctagatctatattctttcatcttttgttggcgtcctagcttccgcaagttggctacgtcagagggcctaggggagagagcggttccatcttctctctcaccctctctccttcaatcccaaagatttggatggagcatggttttatgtcggttgtaagggtcggttttgggtggtatcggatgtgttccattgttggtttagtggcgccgatctggtgctagcctttttctggatctgtacgttggcgttattggtgtgtgattggtgctcaaaacattgtttgttaggtaacacagttttattcgagttttgtttaaaatatttctaaattatttgctataacacgcgggtaggcactagttattattacgagcagctaaaaaaaaagtcaataagaagtcgggaatgcaactatgcaaccaaattatttatgttttccccccgaagaaaaaggatggcagtacgatcgtaagcaatgatgctgaaaaattgtagactttggtatcgtctcaacatcaatcaatcaatcaatcaattgcaaacttttgtttccatccgatccgatggcgtacgtgtctttaactagtagtacgtggagtaatcctaattaattatctgcagctcgatcaaagttgggaagcagaattaatacacacactccatctcc

SEQ ID NO: 5149 - DNA, 2000 bp, Oryza sativa
acaacacaacttgaaattgagctaataaaaacaagaataaaatggatatgttttctagattatatcatgcttacatgttattttgggaaaatggtgtgttatttttctggttggctggagtgtaatcactattacagctttaatttgacactaaacaaattaattagttgcaactgaggtgtcttaattgatcccatctgtacaaacataataatgcctatgaatttaccaaattctcctataggttgtcaaataggttgggtccttccgtgtctgtccgagtacgcatgtgcagctcacagctcaggaaaaacatgatctatttggctgtggatcgtgctggcatggcccgtctagccacgccatgtttgggttgctaccacccaacatgctaacatgacaagtgcatgtagcgagccagcacgacatggtccaggaatagcacacaatttgctccatgcggcatgatgacgaccgatgactcgagcaactgccatctgascaggagccagaaggaaagaagaacggaagaatcaaggaagccaggggctcaagggcagaggaagcgatggaggacgctcgtcgatgtaggtatgcacggtagcgttgtagtgtagccaaccgctcaccctattcatgaggacaaccactaagcattttggtcattgtggactcaccggctcaagacgaaggaagtaggaagtgaagggctacgacgctgcttgatgaggaggatgtggaatgtgctatcagtgagcggaggacctcactaaagcttcactaaagtttgtgcagcaggatgcaacatactattcgcattttttttcttggtatataacaaatttgggctaactggcctctgcacagcccacgtagccaaatcttgccaggccaacatgacatgacccgatatctcactgggtcgtgcatgggttccaacctcagcacgtaggccgacacggcacggcctatgcccaaacatacctattatttatctatcatcttaaccttatacgaaaaagagaaataaaaatccaccatctcaaaggtccaacctagggggctttatttggaaaactagataaatacctcgtcgtattgctgcgggaaattaaatatgtacaaataatatgcaacatgattattaaaactaaaataatttgatacttatgaattttgagcctaaaataattgagattgcatgatattatgagagaagaaagaagagacaaattgaaccatagatctatcatccaaaggttagaaataattagagtgatgtggcttaatgagataagagataaatagcattaaagtaaggataaactatataactatataggatatgaataggacaggattagaatagcagtgctagatattataaggtaaaatttgctacaggacaccgaaagattgcagtctttgctatgagacacccgaagatcgtgtatttgctcgtggacattgtaaaaaagtggtaattagttgctggacactcctcccattattttattatttctggttgaaatgaagagagaaagagttatgtaagtactaaaatggcccctgtacagtgttcttccctcacttcacttmcwwatttyccccytycttcttscttcttkcacactggagcatgaarggcgacggcagccggcccgagccgggactggtcagcmacggcggggcggccggcggcggtgcatcgcccacggtgccgccggcgamgtctccgcgtcggcgcggtgcgcggcggcggcggcrggstcgatttctycgcgtcgcgttcccagcctcccacgccacccgcctcgttgacctcgttacctcgccgtggcccgcccatgtcatcgcgtycaagcacgcggcggcctcgtcgcgtgctccgccgcgagctgcccgaacagcacgtcatcggcgtcatcgaggaaagtcgcgcaccgcgtctgtgaggcactggcaacgtcgtcgaggccgtcggccacgtgcgctccgtc

SEQ ID NO: 5150 - DNA, 2000 bp, Oryza sativa
caagaacagttaggtttcaccagctgtggagaggtgatactgtaagcgattaacaatcagacgggtcgagcagacagacagaacagattgttctgaaatccacatgtcacacgccagcacgaatgacaaacgctagtgcgagtagaatattgcgagggggaaaagtgatcgctactggcgaggagcttcctagccggctctgcatcctgacagcaaaatggggattgttcttttgttcctgtgcagcatcaccatggataaccaaaatagtgtaccccaccaccaccactactctcatgctgcatggagcagaaaatgcttcaccaaacacacatggaaaacaatggttttttcctttactttttttttcttcttctgatggagttaaaccatcgctgtagccctgcatctagctggcctgaactcccccgttaacgtcgcaatccagaagtcatcagtcagtctgtactggacagatcccaatggcacctccaacgaaaatcagtttaaaaaaaggcggctcgaattgatggcatagcgtcacaaaggaagcaggcgaaccgagtataaacatgcagtctttcagatataggctgtgtttagggcctgtttggtacagctctaactcctaaatattgctctaggagttgagtctagagtggagttgtggggctgcctaaacccagctccacaactctagtacattttgtgagagagctccacttaactccactcacagttttggtggagctgaaactgtttgtctgacctccacctccaagctggagctgtgccaaacaggcccttagatccaaacttctaacttttttcatcacatcaacctgccatacacacacaacttttcaatcatatcatatcaatttcaatccaaacttccaactttggaaggaactaaacacagccatatccccgttccaattatagaatcggtttgattttttttctagttaattttttaaaattcaatcaaatttatagaaaaatctaacgatatttttaacacaaaacagacataatatgacaaaaatattcaatgttacgtatgatgaaactaaatttgtgttgtagatattgctaatcttttcaataaacctgatcaaatttctttgaaaggtttgactaagaaaaaagtcaaagtaacttacatttgaaaacttgcatttactttggtttgatctgttcatctaactatttgcaaaaacatttccacatccaaaaaaagtgttactccctccgtctcatattattagtcattttaaattttttttctaatcattttttatgtttgattaaatatgtagaaaaatatagtaatttttttaacacaaaaccaatatttcatcaaagtatatttaatgttgaatttgatgaaaataatttgatgttatatatgctgctaatttttttctctaaacctaattaaagttaaaatagtttgattaagaaacaaaaattatactacctccatattttaatgtatgacgccattgactttttatttaacgtttgactattcgtcttattcaaaaaatttatataattattatttattttattgtgacttgattcgtcatcaaatgttcattgatcatgacataaattttttcatatttacacaaaaattttgaataaaacgaatggtcaaatattggtcgaaaaatcaacggcgtcgtacgttaaaaatggtgagagtaatatatatgaaacggagggatactttcactagagctaccgcgccacccgctcacaacggcacagtgtcacgcgcgcgcgccagtccgggtgcgccacccaagtcaaccaccgcccgctctctctcccccttcaaaacgcccccacccaaagccaccgcacctcgccaccaccgccccaagaatagcacccgcgtttcatgcgctgatcgaccgatcgacccaccagctaagccacccgcagccgcggggcgagccaagcccaccgccgcagccgcagccacagcc

SEQ ID NO: 5151 - DNA, 2000 bp, Oryza sativa
caggcacccttttccttattttcgccttgctaaccatggagagggactaggggaaggaggagccgcaatgttggggcatttggaggaagacgttgttggcggcgaggactgcgggccccactgtgacatcgtcgttcatgtggagctccgcgcaggaggaggccgatggcggtgcgaggtggagggagacacagacgtctcgggcaaaggagtgttggagagggaggaggcagcgatttgtggtggccatgtccatcgccgtcgtcacccttgtcgccatcgtcacggaactatcgttggtctttgatgtcgtggaggggaggaggaaggagaaatggaaaaaatgaagaaggaagaaggggaaagagggcagtttggtccaatttttttttatgtaaatgtatccaaagggtaagtagtggcatattttgaatatgtgtaaaattataatggcacggttccaaataggtgaatagtagtggcatattttgaaaccaatatatttttttggcatggatctaattaacccttaaaacaatcatactctgtaaaattccaatcgcattgtgcttcctctcaccagccgatacgttatcaaccagacaaccacctccttaatctggatgaaatattttttttctgaccacacaccaatgggaaactattttcattctcctaaggggatgttttctcatttgctttaaaaaccatgtagacggttatggaaaattctataaaaataatgaaaatattcacacatcatatctatacagcttcataaataaaatctttggttcaaactcaatcacacgtcaaagatatagaaaagacaaattcagcgtatgaataatagcgtaccattcacatctaaatttgtcaattttgggcctgttcactttggtgccattttcaaccttaccaaattttagtaaagttgtcaaaaaagtggctacatttagtttgctgccaaattttggtaactatataagaaatcctgccaaataccaaaattttgtcatttgccaaaatttagtaaggttttttttgacagcaaagtgaacaggccctttgtttctagatgtgtaagtcgaatttgaacttgatttctagtggacatatagatatcacaatactcaacattgttatatttttttaatatttatttataactatttatattgaatttggttggaaaaaaaagtatatagaggaaacatctagaatccacccccacacaccaacagctaatcaggggtctcgtctctgatcctaggccgtcaccacgatctgggcgccccaccccaaaaaaatgccctgggtcccctgccgctaactacccggcgatggcccccccgccgttggctgcgtcgcgccgtcatcactcatcatcagtgcgctcctcagctctccccctcctctcctctcctctcctctcctctcctccggtttttcgttcaagtgtaccggggtgccgcacacacgtcgctgtcccgatcaacacaccaccccgttcaccacaccgctcggcgcaacgctcacctgcgtcgaagccgcggctttcttttatttctaccgttcggttcggtcagatcaacgagcgcgaacggttctgtgtgtggaacacgtgtgcgcttgtctcccccgtcttttgttctgttctcggttactccactgttactagttgctactcctgcctgtgccgctcgggctactcgtcttctcgtctcgtcctctcgccacgcgagggatcgagccctatatattgcgcgcttcccccactcgcgcataaaggtagaagagaagagagagggagggagagagaaaagatatagtagtagtagtctctcatcatcaagaaatagtttctcttttcacatcgcgagtgtcgtgtgttcgagtattcggattgacctgtagcgtaggggatttctatggcgtcgttggagttgctggggaggaggatgtcgtcgtgctcgtggggagggggatcggcggcggcg

SEQ ID NO: 5152 - DNA, 2000 bp, Oryza sativa
ccggcctcccaggggaaagtaagcagtcacatgaatgcctttcgctttgcagaactccatcagtttcttctgctgccagactggatttaactcaacctgaacagtttccccaggcatcaaacactgattgcaacattcatatgtatggaacacttctcaagtgcaatcttttacaaatgagatttcactaaatcagtttgagcttcttggttatttcaatataccaaataataatatacaaaggaagattgctttcaccactgattgcacagttgatcaacactaacctgattcactgctggtggaatttttgcgaaggcaagtagttcttgcaatttttttgtagtgaaattgctaacaccaatcatttttgcaaggccaagctggtgacattcctccattgcttgccatacgcctctcaaatccattggcatgatatcctctcttttcattgggtagtgaggtttagtgggcttcacgctcattggccagtggaccaagtacatatcaacatattccatttgaaggttcctgaatatgacaagacaagaatcatatttagcatcaagtgaccaaattcagaaacttaatctgcttttacattttaccttttaaaggtaccaattaggtgattaatgaaagcaacattgttttccttcattgaactttcaaatgttttaaaattagttcccaaagcataagaaatatcctccagtgcgtgtgcgtctggcagataaaactgtgaataatgtcagtcttgcaccagcgttacaaacttcaattccaaaaaagtaccaatgttacatatgttcacctatgaataaaatgtcattgttaaaaaagaattgaacgaaacatgtatctacacagttgtagtggtggacttcaactactgaagagttggttctcaatgtaataatcaacttttagattcatttcttctgcacatttcttacatatgttcttagttgccgtaataaaatgaacatctaaaagtggtaagctgcatgccagttagcatgatgcaagtctctgtttaaagaaccaaatattttaccacgatgactactagagtatggtgtattgacatggtaaaaggacaacaagagaaagraaactgaagraagaacccaagcctcttgtttccttactgcaagctctccctgagggargggagcacgaggtccsggttggmactgcgtgcaccacaccttggtggtcacgaacacctcctcgcggcacgcgatgaccccgcgccgcgccgccccggccacggcctcgccgacgacccgctcggagccgtacaccgatgcggtgtcgatgtggcggtacccgacctccagcgcggcgagcagggcgcccctgaagctctcctcccccacggaccggagcgacgccgttccgagccccaccgccggcaccgcgcgccctccgccgccgagcggccccgccgggaaccccggggtcctcgagcaccgcccgctgctccccggcgamgccatgggctcccctgctgctaatactctgcgtcactgccgcttgatttgccagtgcggtggatgctacggataaactgggccgccgccgccgcatctgggctaaattttctcttacatcttgggcttttatatgggccggtggctttggtgagcgagagagagcgagagtcgtgtggcaccccgcccgtgccgagtccgagatgccgagagccgtggcacgtcacccggcgagatgtaggagcggatggcgtggccgcggacgcgcgcgcacgcagcgctcgctctcctctccctcctcctcgcgcccaagaagcgtggcgcccccaccacgtcgcgcgcatgccccgtctcctcctataaaatacacgggacgccgcgcgctctgccgcgtcgtcgtcccctctcctagctagcggctatcaaacccccacaccactgctcgatcgatcgtcgcagccggagtaactaaggcagagatcagatcaggcgaattaggagcat

SEQ ID NO: 5153 - DNA, 2000 bp, Oryza sativa
acatcgacaagctgcttgcagtagcaaccatcctccctgccgtcaaccaggttaattaactaattgctcttcattcgcttgggctggataattagttgatctcttattagtatttgttactcataaaccgcatatattcccggcctgtgcatggatctgcaggtggagatgaatccgacctggcagcagaggacagtgagggaatactgtgacgctaagggcattcgtgtgacggcctactcgccgctgggagggcagaattggggaggcagcgccaattatgtgatggaatcctcggtgctcacggagatcgccagggccagaggcaagagcatcgcacaggtaggcttgtatcgtgtgtgtgcgccggacgatcatatcataatttgagcgagggggatgacaagtgggcccatgtactttttccatttatttagctggctggattgccatgttgacgctaagggtgtgcaatttcaggtcaaaaatgstytaaaacgatttggggggggggggagtgtggcgttatccggtattaatagtcaaaagtgaaagatgtctggttttcgggtttggtgggataattcgtattcactcaatagttcaaagggtaattcagacttttccctatataatattatgatagcaatttaaagacaaatctacatatgccattttttcaactaattatttaaggaattaatgatagttatagtttaaaattttaatcaaaatttatcctaaatatttgtaaatatttatgaccaaagagtgtagaatatgattatctgctttatatagtactccctccgtttcagattataagccattttgattttggtcaaagtcaaactacttcaagtttaatcaaatttatagaaaaaaaagtagtaacatttttaaatattattatattttgtatataaacttagtcaaactaaggttaaaacaacttataatctaaaatggggagtactacctagctggtttatgtaattcattgtaccatttcaaatgtagggatactgtctattgctgaaaaatgaaaggatcttacttctctaaaaataaaaactcttaggaattgcttctttttcttccatcctccttcaggtatcattgagatggatctatgagcaaggagtgacccccattgccaagagctacaggaaggagaggcttaaagaaaaccttgagattttcgactgggagctgaccgatgaggaccggctcaagatcagccagatcccacagagaaagagggttacggctgcaagcttgttctctccagatggggagttcacatcggttgatctcccggacatcgaaattgtggaggaataggtgttgaagatgcccgctcctgctgctgctgaacaactgtgcctggagaacttaaatatggtacactttttcattttttatgtttacggaaacattcagtaaggatttgtgtcggaacaacagttttctatggcatgcgatttaattcattttcaatgattggttatcaaatgaataattatttcagttatgcacaattgggcttaaaatattcgtctcacaatttacacgcaaactgtattgtgtaattgttttttttacatttaatatttcatgaatatctccaaacattcgttgtgatgggtttaaaatttttgctttggaactgaccaaggccaaacttgacttttattcgaatcacgcgtaactcctgacatccgcggaccgcggtaacgcctgacgtctgcgtttggtgcttcttttgtggagcaaccagcagagcagacacacaacccgtgtcagcatagtcgcacacaaacgcgatttcttctcctctcagcagtatataatcaagaccggcatacagccatacagtacctcgcactcgaagacgtatgcacgtgaaaccgtttcttcgcctgtatagcggccggcaccgtgcacacgcgcgcgccttcctcgatcgatcggtcggccgcgagctagcccggccggcc

SEQ ID NO: 5154 - DNA, 2000 bp, Oryza sativa
agtagtttcatggtatgatgataatttttttgtatcatttggatgattaatctctaacggttttatacacttttatgtaagtgtatatatagttcagcgggtcaatgcatgtcgctcgattcaaggagaagaaccaccattttctcttgtgcgtgttctttcttgccttaagtggctgtataaatcgcacaaattaggacttgtatggatcacaaaaattagaacctatatatggaattatggctcatacattgtacacccacatcttagttctgaccataggctcttagatgagttttctaacattagtagtttttttccctagaatcttcagctcctcaaacaagtttagattttcacaaagattataagaatatgcaactaaaaatctagaaaataaaccactcaatctgtttggaaatataagtatttatagggttcatattttctaccacaatataaatattcatgcatttatttccattatccacatcattttgatgattctgaagccaatcaggtgctttgaaagatttaatctaagcaattcaaaattcaaaattagcactgaactgactaaaaataatctttaaacctaacataagttgttctaacaatataaaaatacttatattttaaagagggagtagaagtgtagaacgtagaagctagaaaatgcagttttttatagattattactaaggtcatgtttgacatagttgaatttggattttgtattttagattttaatggtttaaaatttatagtgcatcttacaaatagaaacaaaatgattcattcaaatattataaataaatcatagatccaaatccataaatttataaagctaaaaatacaaagctctaataaaccttaaatataaaactatcctaaacaccccctctaactactcacgagctgcttgtcggaatcttgaaaatccttgaaacaaaaaaaagccactcctccgtttcatattataagttgttgtaaactttttcataaccaaatttatggaaaaaaatagcaacatctttaacaccaaactagtttttattaaaactgaaatttaatatattttgacagtttatttgttttgtgttgaaatgttgctatattttctataaatttaatcaaacttgaagaagtttaactaaggaaaaaaatcaaaataaattataatataaaacagagggagtaacttataactatatatctagacatagactttgttcagataatagttactccctccgttttaaaatataagagattttgaagggatgtgacacatctagagctagaatatgtcacaaacctttaaaatttcttataggacggagggagttcgagttagcttaggtattgtttagttgggaaaaaaatttggggttggttgtcacatcagatatacggatacacatttgaagtaataaagtaataataaaacaaatttcactagaaaaccgcgaaatgaatttattaaacctaattaatcatcattagcaaatgtttactgtagcatcacattgtcaaatcatggtgcaattagtcttataagattcgtctcgcaatttatatgcaaactgtgtaattggtttttttatctatatttaatactttatatatgtgtgtaaacattcgatgtgatgagtgaaaaaaatttatttcgagaagtaaacagcccctttattttgagacggagcgaatagagcacaagtcctcgcggagggtagtagcggagttcaccgttacatcgtgccaagctgaccctgcgaccacaaaagcaggccaaaagcagtggactcgccaccccaccatcaccacccaacccaacccaacctcctctcctatcgtcatccgctcttcttcccctcttccccactcgcaccaaccccaacccccccaaccgccgccgccgccgccgacgacccaccggtcgccgcgtcgccggagtcgcgtactggagaggggggcggagagcaccagccgccccatgc

SEQ ID NO: 5155 - DNA, 2000 bp, Oryza sativa
atgtccccttatccaagtagacctagccacaaatgtccccttatccaagtagaactaggaagacaaatatggatacgatccaagtcgaactaggaagacaaatatggatacgatccgacagatgtccccttgtccaagtaaaactagaaagacaaatatagatacgatctgagtagtcattgtagtttccatgtagaactttgcatcgggataccttctgtatccgaggcttaatttcatgtaagactcggtatatggtgggtctcgtcaaacttaacctaggactattgggtatgccttatccaaacactgacaatgtgatccaaacttcatgcaagtttcatacaaatttcagaaccatgcttgaatttatagaaaatttggacaagataatagaattgaacactaagcgtagctcgtattttaagttcaaacttaactctatttgtgctaagtgccaaattaagttagaatcatggagttggagctagtgattgattaaaattactagggtgagacattttttttcatatttcagaccaaaataagaagatgaaaactcttcattttaacctataaactccatttatccttttcttttctataagttcgattttgagtgctaaagctgatgggggtgaaccagagcaacaagagaaaataaaagtttgtacagtgagataactgctactcccgtgtcaaaatatagctatttctagcatagtgtcttgtcccaaaatgaagttatttttccacctacatcttcttctcaaccaatcacaaccattattcttcacctactttctcttttcaaccaatcacatactttcttcaatcattttcacatactttattaatactcgtgccatccttaaaaatgtttatattttgggacggaggaactagtactcctactttatatacttatatatattttgtactaacaagatctaagaggacttcgttttttaaaatgagctttgtaactctttaagctttgccatatacaagtatatttctcaaccctctctacctttacgagatttactttcgatcccatcgaccaaattatcttgtgacacgcaatccatcttattggggagcatatgtctgtagccaacattgctctgccatcagaagtactccagtgcaagaccacaacacctcttttagtagtgctttcattcgtgtaaaggtactattaagctattatacttgtgctttacagaatctttagttttgtaccacttccatcctaaaacataatacactttaactacaaatctgcataactatgtttatattttgagggaaatggagtaataattttgtttgaaattatataatcctaaaatataaaccttggaatatataattttactataatgttagtataatcaaatctatagttttacaatagagcctcgtaaacgtgtggagaaacgccaggggtcttccggctatcttcacaaggtagtgggccaaacgacctgtgtttgaagcctcacattttctaattatttgatattagaccatttcctaatattcgcgtctttttttttcataaacgtgcaattctgtgacaaaatcttgccaaattcacttaggtatatatttattagtacttcttttttaaaattttctggattttataaggaaggagcttaaaaatccgcgtagagccgtagagggagtcctctttctttcgctaagaaatttcctagttttctcgcagctatttctctttcaagttcagccgcgtttttccccctttttttaaaaaagagaaagcatatctatttctctgacacgtggggccgcgctttgacctataaatatcctctcccatactcccctctccccacagttgaaaaactttcaaaaagcttcagcttcaggcttgcagaatccgccttgatcataaacaaattcgattcgaaatcgcgcatccaaactctgcgacgaacgttttcgccgcggcgagagagaagtcgagggag

SEQ ID NO: 5156 - DNA, 2000 bp, Oryza sativa
taaacccgatcaggaatgatgccaacaacttgattagcatcctcaattcttcggcgaggccacaggccttcaagtgaatctgcacaagagctcggtcgtgtccatcaaatgcgcagagcagaacctgtctgaggtgttggaaaatttcaatggacagcggggcaattttcccataacatatttgggattgccgctcaccccaggccgcatcaagagaatacacctgcaaccggtgatggacaagttgcaatcaaggttagtgggatggaaagggaagttaatccagcaatcagggcggaagacgctagtcacgtctgttctcagctccataccaacctacttccttaccgccttaaagccgcctaaacagttcctcacagacatggacaagattaggaagaaattcctctgggccggcgatcaagagattagcggggggaagtgcaaagtgaattggaaaaagtatgctccccaataaagatgggaggactaggcgtgttggaccttgataaattcgcgagagctttgagactccgttggctatggtttgagtgggagtgccctgacaaaccttgggttgggacaacaccccactacgatgagttagatgagcaaatcttcgtggccgcaacaaaggtaacaatcggtaatgggcagaaggcaaaattttggacatccaactggattggacaccagccgctgaaatacctagcgccagcgcttttcaaccactctaaaggaaagcaacgcttagttcaggatgcgttaaccaatgacaaatggattgaggatattaggcatgagctgtccatgccactgatccgagaattcttcgcagtgttccgccttatctgggataatgagacaaacctggaggaaggagttgaagacaccatcacctggagatggacaaataccggtaaatacacagcaaaatcggcttagcccaattcgccggtagagaagactcaagggccgccaccttgatttggaagacatgggcgccatccaaatgcaaaaactttgcatggcttgtcctgcaaaacaggatatggacatccgaccgcttgcaactccgacaatggcccaataactacttttgccaactctgctacaggaacttggaaacggcgcaacatttattcaagaattgtccattcacgcgagaaatttgggacaaaataatggctaggatgaaccacaaccaacccttcccggtgcacaatccggacgagagcctagttgactggtgggaatcaagaacaaagcaacaaagcaaatgtcaaagtaaggggatgcagtcactgcacatgctcttgagttgggaaatctggtgcgagaggaacagacgagtttycmaagataaaagaacttcaaatccctcaactaacggcaagaataatggacgaaatacatacatggtcggcatgtggggcaaaaaatcttgcgagaatagcgccttaacctctcatcctttgttgtaattttcctttttttctgctctcctccccctgtctttccccttgtcaccattggtggcatttgtacagtgcttatcttctgaaatataaaaccagctaagctggctaaggtttcaaaaaaaaaaaaggaacaktaaaagctaccatcctactcatyttgaggggttaccttttaggaagcatggtcctttgtggtactctttgctggcatatcatatatcttaagcaatattgtctgctagttattagagcaattttcttttttgatactctcaaaaataataaatttattccagattttttttttgcaaaactaaaattccccaatattattattattttttctttttgataaacaacatcttgttaaatttccattccctcatctatagccatctctctctctctctctctcacacacacacacacacacacacaacacaaagttctcactctcaaatactcgcgatgcgcctcgccttcctcgcttgatgagctaaggagatcgagttgaggaca

SEQ ID NO: 5157 - DNA, 1355 bp, Oryza sativa
  misc_feature (1)...(1355): n = A,T,C or G
gagrtwttttcccccccccccccsggggtttyccytnraaagggggggtawamaagaartcwtatycynctctygggggrraawccycccccccnggkgwtkggggggsatkccycytcytaaaaggggggggggsccccccnagaraatamyccamyccccccattattggammccsntttttycngggggwtsgtttwancssgsaattttttngggcccccmcgggggaamcnnktttttykggggagmmcytgnaaaagggrwwrggggtttttmaaactttnscygttataacgttyctgtggsctttttaaggggycctwkgcccctttaaggaaccaaggttggtccmaatkttgtscgaaaattggggattgymasgcatctgttgaaggggmcttgattggagttggagggacagagaatctgcacagtttcgctgggttatctttgtaaacagaaagaggatgtttcagagatttcagtatggtgtagcctttgccaatctgactccacaatgggtcatttgggatcagtaaggtcctttggggaaagcaccagtggtgtatgatggatggtgtatgactccaaccattaaaatatttaaccttggtttctatagatattacatacatgtaaacatgctttcaataaaaaaaaaatagcaagtttaaggtgtgcgtctgctgtgtaatggaaaaaaagttttttcttgcgggtwaaaaaatggttatttgggatcagtaattgagaaaatgagctgtttagatactccataggaatttgcaggattttaaaaggagagatgactgaaacatggcggcttgcttccaatcaaataattaaggcaaaccaacagtgttcctaaaatctccatattcaaacaagtgctcaaagaccctatttagaggaggttaagattctgagaaacagtttgtgagaagcttctagtttattttctagattctacatctacagcttctcagaatctgagtgaaaatccttactgtttgggaagcttctagcagtaacagcttataagtgaaaatctttactgtttaggaagcttctagcagtagcagctaataggagaatttccagcagcagaacctccgcaaacaggcccaaagcctcaaactattcaccatcgtccggaatgacgccttcagtcatacaggctttacagctccactcttcgaatacgtaaagtggcaaatacgccttcgatcggaaaaaggaatcaaacaagctcatcgtctccactctccacacatcatcgccttcgcttctcctctctccgccccacactgtcggaagtcggaagcaaagcggcggcaccgcgcgagagaggc

SEQ ID NO: 5158 - DNA, 2000 bp, Oryza sativa
tgcatctggtgatacaaaaccaaattcatggaccttgctggacttcggttagtcttctatactctacagtcatacgtaaaatggttagatttttcgatgcgcaaatctgcggctgacctattacccttttcactcttaacaggcgatgttgttgtccatatatttcttccgcaacagcgagcattctacaacttggaagagttctatggcaacgcaacctccattgaactcccttttgagaagcagttgcagtgactgctgttttcatcttctcctggagaaattgcaggtttccacaaaaaccgagcagcattgcgccatggattctccacgtcttcctgctcatatgtgacgaactgctcggagctatagatttgcatggtctaactcgccaatgtcacctggtgactgctcgccaagttcagaagtgaggcaccatgatgccaacattctccttatctgttgttagactacgtgaatcattgtattaactatcacattagagacgataattattggtgccaagaggagtagaggccaagatgtaacacattgtgccagttcagatttcagacgcgaggatgcagtgtgcaagttcaacttaggcatcctttggaatgaaggaatttcaagggatctttgtagtatttggactaaattctatcaaaatccagtaaaattactccgcggtaaaattacttggtcgaatcctgaaaaaatctacgcgttagatacgtgccatttgccggtgtaatgttgttatctgttgctatctgaaatctgataagagttctgacgggttgcaaaacttgcaatgttcagagtgttctctgaattcttatatctgaatttctgaagactcaactgccacgggagggatggcgcagccggagaccttgtcgctggccgggcggcgggtggcgttcacgacgccgcagaccgacgccggcggcggcggctacggcggccggctccacgccatcctgcggcagcgcggcgcgcggccggtcccggtgcccaccatcgccatccgcgcgcacgacccggacatcctccgccccttcgtcgcgccgggcggcctcgacgccttcgcggcgctcgccttcacctcgcgctcsggcatctccgccttctcccgcgccctcctcccgtcctcctcctcccccgcgcggcggccgcggcaccccgtctccgacgccgccaccgcgctacccttcaccgtcgccgccctcggcagcgacgccgacctcctcgacgcggcgttcctctccaggctctgcggcgacgcgggcgggagggtgtcggtcctcgtccccgacgtccccaccccggccggcctcgtggaggcgctggggagcgggtccggcaggcgcgtgctctgccccgtgcccgacgtcgtcggcctacgcgagccgccggtcgtgccgggcttcctcgccgggctggaggcggccgggtgggtcgccgtgcgcgcgccggcgtacgtcacgtgctgggcggggccgcgctgcgcggaggctctggtggacgccgcggcgcccgacgccgtcgtgttcacctccaccgccgaggtggagggcctgctcaaggggctggamgccgcggggtkgarctggccgcggctgcgcgcgcgctggccccgcatggtcgtcgccgcgcatggccccgttaccgccgacggcgtcaggaggctgggcatcgaggtcgacgtcgtcggcgccaggttcagcagcttccatggtgttctcgacgccctcgccgcgaaactcgaatcagattgaagcactaccattgttcgtcccaaatccgaatcaattttagatttctaaaccgaatcttgttgcgagttcttctcctacccatccgcgtctcggggcttggaatcgaatcctcgccaagttcggatcaacgaactgccctcataagcccgcgtcccctccttcctcgcgtcgacgccgcaccgcaccgcatctccgctcgccgccgccgacgacgacgag

SEQ ID NO: 5159 - DNA, 2000 bp, Oryza sativa
ccaatgtggggccccggtgtcagtgcacaaagtgggtgagaagtagaggtaacaaggcctgcgggtgtggataacgcaaaaacattcgtcggcccgaggttcgcggtggctttgcctaccgcaaaatactgaaaccacgccgctaatcccaagccggtagcggattaaaactcctacgccgtacacacagcaaatgacagatgggtcccacacgtgttctcccattgccctcgaggtgacaatgcttgtgtgactgatgtatatactccactgtgtattgtaggcaggcagctgtagcgacgctgttgtaaacagagggcgcacgacggcacgaagccccggccggccgccggcgatcgaacggtcgccgtgctttccgcggccggacccgcttccaatggccccttctcgcttttcgcggccggacatgcttgccgtacaccggcaggcttatccacttctcgcttttcgcttcgcgccaagcttccattttgcttttctcaaatgtattcacgttccaaccgttcgaatcacgtataaactgaatttaatcaactgatataaacaactacatataaacatgttcttctttaaatgatactatatgattgcatatctctagttatctatgagttataatacctccgtctcaggtacagccgtgaaaatccgtgtccaacgtttgtttatgattttttaaaaaaaatagtcacacataaagtactattcatattttatcatctaataacaataaaaatagtaattataaaattttttcacaaaagacgaacagtcaaatgttgaagatgaatattgcaaaactacacttattttgggacggagggagtacaactgagttgtacctatagcagtattcatatttgatttattgttaaattttatcacgccacactttcgattatcatagttttgttagctatatgtgtttggttagctatcagatgtatttggtattatctaaaaaaacagatgtatttggtttatcacactacacttttggctattgtagtttgttagatatgtgtttgatttatggtcactattatagctggtactttgtagggagccattggtttgcttattcgcggaataagtgaaatggcatatttgcaaataaaaagaaatttatgaataaaatttttatatacgtgttcttagcgatttaaaagcaaatattgaaaaataaatttcgatgaaaaataatcttaaaatcaacttcaaatttaaagttgaaaattcaaattttggttgataagtataagtataaacgaaaatatgaggtctgaagtatttttttttaaacttatctaacttaaggcggtcatttagctgtgataaagtgtagtgtagtaaccggttactccagagcagccaaatttccacagtagcagagcaggctggcagcaaagctgttttctgaagctgccgtttttccgttccccactgtgcattcatttaccactgtattaatccctcccctgtaattaattaattaaacaccttgttgagaattggatattgatcccaagcaaaaaagatcaccactccagctcactgcattcacagcattggaatacactgctcgatccctccgttcgtttgaccgcccaatgcacagccctgtgcgcaactgttctgttctgtactgtaccagccagcacaacggaaacggaagagagctgtcagtccaagcctccaaagccaaaaccaacgcgaagcgaagcagcagagcgccaccgccatttccaccaccgcgtctgagagcttgagcgctgctgcgcctgcgagcagggagcccacctctcctcctccctgacctcacctcccatcgattgcgatgatggagattcctccacgcgcgcctgcctagctcttcgtctccccataaacccttttcccaaaacccctcaagccaccatcctctgtttgaaatcttgagcaagtttttttgtgaatctttgggaggaaaatcgattggg

SEQ ID NO: 5160 - DNA, 2000 bp, Oryza sativa
tcattcattcttgttcaatgttcatcatcggctgagcttagttccaaacttttttttttaaactttcaacttttccatcacatggaaactttcctacacacaaacttctaactttttgatcacatcgattcaatttcaaccaaactttcaattttaacgtgaactaaacacacccatcgtcttggctgttcttgttcttgacaggggctgggcattctgaaggcggcgctgcgctctgacacggtgctctccgacgtcttcctcgccaagaagaagtgaaacaaccagtgctttttatcgatgccgcatggacgttcttcgatttgcttgctgcccatttcgccttattttgctccatgtctgcttcagaattcagtgtgtctgcctcgcatcaatgtttagttgctctgtattagtactggacatgatctatctatctactaatattatattggctttattacctaatcgcccaagtactccattttgctggctgtgttcaacttttctgtatcacttttaagatatccatcttcatgctatcttttaccctttccgtttcatattataaattattttattatttttttagtggtttgatcaataacaatggaattccctccgtttacatatttaagcattcttacgcataaaatttgtacacgaatgtaaaatatttctaaagtatccccacccagggttcactttctcgttttcggcctttgtattgagcagtgctgatatgatgaaatttctgaagcttagaacaaaatttagtaatttgaacaaattttaccaaaattcatgaaaaattttcaaaaaaaattgaaaattttggctaaaataatatcgtatcggaggcaccacgtacatgctagcacgggcgatttagtgataatgatgagcgtcatactcttctcaaagatgctggtacatgtgaatggtgtgttaagtagtttttagaaaaaaaaaagattactgcaactgagatcctgcgagtgttgttcaaattatacaatattgtcgcaaaacttggtcatagaaattattttcataatgcttcttaatagcatttttctataaaatatatcaatatactactctgtaaaaaaaactaatcctaaatatgaatttaaaatatttttgaacggaggatatatcttcgtaggtagaattaaatataataaaatataataagttttagagttgaatacggtttttaagaaagaaggtagaattaaataggaataagttgtgattggcagggtttacattacttttcgatcggtttagaattaaagaaggtagaattaaataggaataattttcgatcggttttcgataaattttgactgaattttgaccaaatctaccgtttaaccttcgaaattccaatcgaaacttaattatgagctgtgtcaaagcgttgaaatttcgcggaattcgaccggtttttgtcggaattgtgaaccttggtgtttggttaagaagcgaaggtatttgggaaatataaatattggatggttgtgattggttgataaggaaaaattgttatttatggggacaaatcaaaagtgctgttatattttactcccttagtactataaaagactaacctagcagtactatgaatctggacatatctctattatatctaaattcgttggagtagaacggagtgagcactatcttatcttattggcatgtgtagagtggagtaatctgaacgcttccctgtgtttgtggttactgccttactggttagtggttacagaccggccgtacgctttggtcgcacgccttcaccggatagagagagagaggagtcagcgcacgcgccgagtcccagcggaggtagctgccacgtggggcccacgcgcctcgacgcattcactccgcctccgcctccgcctccgcctccgccatcgatcgcctcctctcctctcccctcgccgcgccgcgaaatccgattcgcctgctaggctaggctaggctagggc

SEQ ID NO: 5161 - DNA, 2000 bp, Oryza sativa
accagctgattactaggattagtactccctgtttgttaatcaaacgtctccatgctgcataagcaggaaacaagttcagaacaaatgtcaagttgcatcacatcgtcgtcattgacactatttgcctcttaaaaataaactattgtcgattaaagcacttcgtttccacggttttgacctgtacagtgatgggcctcatcttctagtctgaagtctgaacaaactgaatacaatattctgaatttctgatagtctgaacaaagtgtgatcactgcctgaagaaaatcagaagtgaaacmaaaaaaaaaaaaactacagaaaagcaagttgtcatccacatggagagcccccaaaagatggagatgccaaagtgatactggtccatagccacacaatcatactagcattatctcctcatcattcatcatctcactcaaattcagtagtagcatgcactgaagcaagtcaatgattctggttcttcttaaagaaaataataaaaaaaaacattggatagaaggtcacaacaaccaaatccttttacttgatggttccaataatccacatgtccctacactcacaaaagactctcccggttcttctaccgttctacgccaccaaatggtcactgcagcaggttcaggacaaagcaacctgtttctgtagtcattcacgtgttcctcttctccagtactagtagctgctaattgccaaagcagccacatggattgacatagcttctcattggagaagaagatccaagaagaaggccaaagcggctaagctttggccaaagcagccttctcttcttctctagtgggaaagtgagataagaagcagccatcagaagagcactcccttgttttttgaccaaaactttgctgctcactgtcctagctggagagaatccagcgatacacgcatgtcttcttcttcagctcggtcttggttgccgacctcatttgcagatttctgcacatgaggcatctctctctcgaagtatcgtgttttgatttgggcaggtatgagcaaaggtccctcatttcttcctcttttctaaatccttgaggagagcagtgtgatttaaggtttcagatgccttgaatccgctgtgatttgtctgaatttttgttagttaattgatgcccaatttgttggctgagattgcccctggacaccaactagggagctattgctttaattgatgcccatttgctggctgaggttgcctctgaacaccagctgttgctttagtttgttaggggaaatgttgctttagtgtctgaaatgtttagtcttggcctcttggggtaaattaatatttcagcttaaaattaagatttcagctattgcaatttgcaaggagatatattctttgataaatatatatcttggcatttctgctagataatgctgacgcgtgcctcttctaagaaacttgcagtgttctgcaaactgagagtctgagataagctgataactcatctagtaattgttgttctgaagcaaagggaaatactttctttactgttcataagctctcagtaacttaatctgaggaagcaggtttaaccaaccactgacatcttattaattgctagtgctagagatttgcaaagtttcagataacaaaagtgagcaattgatactaccctcctccactaaagctactttttataccagtttattctgtatctaaaatatctgaacttcagttgactggattcgatttagtaacgagctcaggtagctttctgaaccaacctaactcctgtatttctactctgaatttctgatggattacaactattcctaattattcattggtcgtagtagtcagatggattacaactattcctaattattcattggtcgtagtagtctttcgtcagaagatatatatctgtacataacccaatatcttcctcatcagagacagtcgttgcaaactttgcaggtagccagccactgtgagagtgtgagctgaggtgagcatcgcc

SEQ ID NO: 5162 - DNA, 2000 bp, Oryza sativa
  misc_feature (1)...(2000): n = A,T,C or G
ctcatcaccgtcgactcgctggtcgactgggcggtgccgccgcggccgacgtacctgtggacgctccccatgttccacgccaatggctggagcttcccatgggggatggccgtggtgggcggcaccaacgtctgcctccgccgcgtcgacgccgccgaggtgttcgacacaatcgcgcgccgcggcgtcaaccacctgtgcggcgcgcccgtcgtgctcaacatgctggcgaacgcgcccgagggcgtgcggaagccgctcccggggaaggtgcggatcctcacggccggcgcgccgccgccggccgccgtgctgtaccgcacggaggcgatcggcttcgaggtcagccacgggtacgggctgacggagaccgcgggtctggtgctctcgtgcgcgtggaagggcgagtgggacaagctcccggcctccgagcgcgcgcggctcaaggcgaggcagggcgtgcgcacgccggggatggccgaggtggacgtcgtggacggcgagaccggccgcagcgtgccccgcgacgggtcgaccatgggcgagatcgtgctccgcggcggctgcatcacgctgggctacctcaacgacgaggcggcgacgaaggcggcgatccgggacaacgggtggttctacaccggcgacgtcggggtgatgcacccggacgggtacgtggagatccgggaccggtccaaggacgtgatcatcagcggcggggagaacatcagcagcgtggaggtggagtccgtgctgtacggccacccggcggtgaacgaggcggcggtggtggcgcggccggacgagttctggggggagacgccgtgcgcgttcgtcagcctcaagcagggcggcggcgcggtgacggcggcggacgtggtcgcgtggagccgggagcgcatgccgcggtacatggtcccaaagacggtgatcttccgcgacgagttaccgaagacgtccaccgggaagatccagaagtacgtgctccggaatatcgccaaggagatggggcccaccacgggcaccaacaccaaacgcaacagtaaaatgtagcggcatctagccagcagatgtggcacttgctttttagcgtcgtcgtcgtcttcttcactcggacagagtcacagagcagaaatgtctggtgcaggcagaggctgatgcattccgcattgtcatggcatggcatgtttctgtcgatatatcagcaccaccagccatggcctgtttgattgggggaaggggggggggggtttttarawccmccgataaattttttttaaggcatgtacgaagtattaaatattagacganannnactaattacacagtttgtgtataaattgcgagacgaatcttttaaaccaaattgttccatgatttaacaatgtggtgttacagtaaatatttgctaatgatatattaattaggcttaataaattcatctcgcagtttacatgtggattatgtaatttattttgttattagactacgtttaatactttaaatatgtgtcagtatatctgatgtgacacgctaaaaattttcacccatttttgccagggtaattttttggttgccatgtgattttgcactacgtacgtgtccgtgtgacgatgtttcgtgaaattttgggcatttggtcgtcaaattccgggctcgtatctatcatcaagcggttgatttgccaaatttaaccgcgagctagtgctacgttgacgggaagacgatcaagagacgggggtgacactcgccgatagaagcggatcccgacggaaaagcccctatccctgccacgtggcactagcaaactgaacccaagtgaaactcatcagtgaccccacatgtcatcccctcgtagcggacaaccagtactactgacatgtggggcccagacgacaactcttaactccccggaaacacgcgcgccttcgccttcgcctccacacctcgcaaccgcgatcgatcgagagagagagcgagagcgagagctcaattcgcgggcc

SEQ ID NO: 5163 - DNA, 2000 bp, Oryza sativa
  misc_feature (1)...(2000): n = A,T,C or G
gtcactatcacgtacttcctccgtttcatactataagactttctagcattgcccacatttatatatatgttaatgaatctagacatatatatgtttttagattcgttaacatctatataaatgtggacaatgttagaaagtcttataatatgaaacggagggagtatgaaacatcgagtttcagtggattgaaacatatgtttttctttcattagaatataatcatgtgatacgttgttttaaagatttaattacaacgaataggggtgattggatcgtagatcagataagtagcttaggacaaaaatcattttgaagatcgctaaatgcatgcatgcaaggagtgaagagagagtagggacaagtagttaaatgaattttgtaaaacacagtgaagcacacattgaaacatgttagtgtcacatagaaaacattgagttttaacggtttgaaacatatatatatttcttttattagaatataatcatgcgaaatcttgtcgtaaagatttaattacataaatacaatagtgtaatcgtatcgtaaatcggataagtagtttaggagaaaatttatctaaagtgagaagaggaagaggaataaactagctagtactcgtctcgcatgtatacggtagtagcagaggccctgccgaccctgagtattctcctagtactttggctcaccttgttctctcacaaaacttgttaagagtaaggcctgtttggttggctacctgagtaacatgtctgagaaaaatacgcgcctgtgtgggaggaaaaaatatgatgatgttgcctgggcaggcatgtatgagtttttgttgtttggttggagcctgagcctcaataaaatagatcctataatactacactaaataaggtctgcaaagctctgactcttgcaggaaatagcatatactacttgctaataatgtcctgagcctctccctggacgtcaggcctcctttttgggtcgcctgatccaggctaatgaaggtgcctgctcactcaggtcagggaggagttaaagtagtcagggtagcaaccaaacaaccaatattttttcttcggcatgtctcaggccaggcaggttcacctncagggcagcgaccaaacagcccctaagtgccatagmctgattacagatttacagccggctttcattactctatctcttacttactnctctttttcaacttagcacaaatcatatctaaggtggcaactaatataccctcaacatattgtgtacatgttggattagactatatactaatatagagtacaaacatagatatgcttatctcacgaatgcagnatcaaatcgatctatacacagaatcacgtagatcgtagtgtaatttttttttatcaatgtgtaacttgaatttgaacttctacatggagctaggggatttgaaacacaacatttcttgtctattatttagaatttttcatagaactatttggctcgcaagcaagatattaaatcgggatttagaagttgttttctgaaattaaaaaaaagacactattaataactattaaggataccgacgaattaattgaatattatgaacttaaaagacaaatttaattaaaacagtttcctaagacattcacaatttttttttgaaaattaaatcatccggaaacgtgcttattttttattccgtttcattctagggttcgaagagcacaccgtacgaacggcatgagtgaatgattcccggcctcttcatttcgcttatgcatatacttattaactaaaatttgaattttcaatattaaatttggagatgattttaaggttttttattaaaatttattttttagtctttgcttttagatcgataagaacacatatataaaagttttattcacaaattacttttcgtttaccaatataccgagcgaaacgatggctccgcaaagctctacaaatatggggaggcactcacgccagaagcaaggcaaattaaacaaaacgcatcatca

SEQ ID NO: 5164 - DNA, 2000 bp, Oryza sativa
cagtgtggtggccaatatgtcatatgtggcttttgtatagaccaagtttaatggcttttgtgctatggctatgtgacagttcatcatgacactatatcttgctgtgcaatggaattgaatttgcccttttgatatgtgattatgacatgtgattgtacaaattatgcacagatgctgccaaaatttctgccaattctatctatatttgagttaccagttaaatttacagctaaaatgctgccaattaaattgggcatttttgtcaaataaagcaaatacacatacaaattcaacacatctctcaatatcatttcatgattcattcttcaaacaagtcaatttcagacaaccacattacatcaaccagattcacattacataggtaccaacatactctttggttgcttgcctacttgctaatgacaactaccaatatcaacagcaacaacaaagcttgcacaactgccaggtacactaacattcgtcccagtgctgcacatcccttcaatggtaagccctcaatccccatcgacgacagtgcttcaacattgaactgctcatatcctgtctgatatcccagacctacatggccatcggccaaaaattgctcatattgaccttcccacataaaaaatctgcaagcgtatggtgtctgcaaaaaattttaattcattggatcagcagaccgaacaacaaaaaaatcgaattcaactgattctaaagcatatactcacattctcaagattagggcacttcacaaaattcttgtttggattcttcggggtcctcgaggtccgagccaccagctgggtcccgcacaatggacatttgcccaagaacaactcaccggtgcggcgacgtactgccaaagaagaagcagagccatccatctttaccgccgcagccacctaagccgagtaggtcttcgtcgccgctgatgtcgccgccgtcgctaaagcctcccccgccacctcccccgccaccgccgctgccgccgccgcaagctagggttagggattggggatttttttctcggtggtgtgtggcgacgaaagagatcaaccccgtttcgactcgaccgagtcagctatagatggcgacaagggtaatctgggcattttgacaaaaaaagagaccactttcaaccgggaaatgataaaataatggcgctagtgtcctacagcaaattacacagtttttgtagtgtcctggggcagctccacgttttcgcggtgtccctcagtcaattacacgttttttgtgtgtcctgtagcaaattttgccttggtttttttaggagatgcagcccgttatgtctgggacggaactggattgtgaacatcccatttcagccgcaggtccgtttgtgaaattgttttaagaaatatacgttctccctccgttttatattataaatcatttaacttttttttctagtcaaattttattaagtttgattaaatttatagaaaaaattagcactatctaaaatttcaaattagtttcattaaattgaacatcaaatatattttttaaaggaacatcgaatatattttgataatatgtttgttatgtattgaaaatactattatatttttttataaacttgattaaatgacttataatacgaaacggatagagtatatcttttcaagaaaagaaaaaaggacaagacttgaccgatgagtgacgactgtgcttgcgacatggatgatggatcggatcaactgatcagccgtcttgggatcgagagatctggatgacaacacacacgttcccatcaagctagctgctggctccgacctccagcgccaggtacatcggtaatactgtacaagtcagtcaactgcacgctcccaagttccatccaatccacgctccaattgctgttgctgctatagctacatataacccaattgcccgaccaaatataaccgagccaacgactacacctcgggagggtacacggcgatcgagtagctcgagaacgagacgtggca

SEQ ID NO: 5165 - DNA, 1645 bp, Oryza sativa
tatatatatatatatatattgatgacaattaattaaggattaattaatactattcgatatcacaaggattatgtacccggctgtgcataggcgcgcgggaagcagcattcctcgatccttcctcctgtgaattgatttaactagaagtttatctagttattattatcaatatatattaactgcatttgtaggtacatgaacaatgaattgatatcgtgcagggacagtcgagacagacttggtcatatatggatatcgcgcaggaggttgtatttaggagtagcggtagcaggcatcatcagtgatgcatgcattgcacctgcctcctctcatcctgaggttaactaacttttgtttctcctgctgccttcctggaagcaacatataaagtcacatattttttggatcagctactactttatgtgtgaacatatataaacacaattatccctctcctttctttaagaaattaattaatatagaagctggattattcagacatatcggttgcgcaatgcacattaattttttttttttttcaaataaatagctaggagtatatatgtacgatatgtatatacgctaatatgattgtttgttgtggtaattaaaagctagatatgctctctccgttttaaaatatagcaatctagaatcggatgatagtatactaactacaaatttgaataggggtttaattagattcgtagttttagaatacgtccaatccaattctaaattgttatatcccaagattgagggagtattaattagcaaagatgaaccattgctaataatggacatcctccctcccctattggataattattataagagattgaagggtccaaaatttataggtaatgatacaagtaatgatgtttattgaccccctgaaccttgaatctattttaggaaatacagaagttatcatagggcttgttgttttgaaaataatggaagattgcaatatagtttttttgggttttcaaacggtatggtattgtaaaaagcttttttatgtacgaaactatttttaaatctatttgttttactttattaccgaaaataatttgtatcctgaaaatcattgatgagaaaaagaaaccatcactgactactccagagaagaagaagtttgaggtgggtgcagaggatgaaggacgtaagggtggattgtcgtatgtcgccgccctacgtcagcgaagagtggggtgggtcccacactcacgtgcccctggcttccttccttccttccttccatgcttgcttgcctgccttatctgcgtcttgaattgcatccatcccctcccaaccccaaggcctctagtactgcctctgcctggatggctggaggtgggtcccaccgtagactagtcaatccatccatccatccgcccacagtagaagtgagtactagcattgtttattatttatttttggaaagatagcatcgcgccgcgcctataaaaagcgcgcgatgccacatgaccgcattcaaagtttcggctcctctgtttcctttcctactacagtagagtagctccatttccatttgagttttgatttttgaggatatatgatgcagccaccgtacacgtacagcaacagctaccaccatatccatagcagcttgccgccggag

SEQ ID NO: 5166 - DNA, 2000 bp, Oryza sativa
acgatttttatgttttccctaacaaatttatttggtgtttttaaaatttcacatcatctaccacccttcttgaatttcctggatcctttggggctgtaattttcagatataccaaatgttttgacctagcaacgacaagatacagtggaggagcaaaaaaacaaagtagcctgtgcaaagcatgcacaaagaasamacaatagaaaggtmttttttgggtggcadaaaaacggttaaggtttcaacagttgaaagtaaaaaaaaaaaaagaaaacacacacacaacgcggaatgtgaaaggtatgggcattctctagaaggaaggagcgttcaacgtgtttgtcagttgacaccgtctcaatatgcgggctttattcccaggggtcccagctgtcatccagcaaggggccgtttagttcccaaaaagtttttccaaaaaacattacatcgaatatttggacacatgtatgagtattaaatataaataaaaagaaaaactaattgcacagttacgggggaaatagcgagacgaatcttttgagcctaattagcccgtgattagccataagtgctacagtaacccacatgtgctaatgacggcttaattaggctcaaaagattcgtctcgcggtttcccggcgagttctgaaattagttttttcattcgtgtccgaaaaccccttccaacatccgatcaaacgtccgatgtgacacccaaaattttcttttccccaactaaacacagcaaggtttaaccatgcaccacttagcaatacaattattacaatctattaaaagcacattaacataacatacaacaaagtaaataaataaaataataggaacccctacactaacatgttacaagtcagctgtaaacacatgtgaaaaagagaagagaagagaagagaagagaagagaaggaaaacaatctatatattggtagccagttgtagcacagactctaatactgtacagactctaataacacgtgagtgtataagaggtgagaccatatattaatggtgtaatatatgattatagctaacttagctattagatcagctataaatgaattggagctaatagttggttatattattaaacttactctcatatgctttccctttctcagctccagctcattcgctattcgaagaaaaaaaaaactaccaccaaaatacgcaaaaaataataccagtactagatctcgactaatcccgcgtcacgaacttgctaatcagtcaataaacctaatcaggagacaccaaaccaccgaaaaaaaaaggagagaaataataatattcgcgcatccatcacgaccccaactcgtcctcaatcgcggccacccgccgacccagcgacgacagcgcagggaagaagggaggacgcgacgcgacacgagcgcgagaggaaagcggaggagatcgaggagaaactccatttccccccccctsgccttctccgatttccctcgcgtggaatccccttggactcctccccctcccgccgccgcgcgagccgggcacggcgagcggcgccgccctgcccccgccgatctgctctgccttctcctcaggttcgccgtcttgttggattcgcctttttttgcgttcgtttcgggcgccgtcagatccccgcgccgtgtttggtgagcgtgagctaacggaatggcacggccagatctcgtgggggggatccgaggcggtcggcggatgctagatctggggcggggagctgtacgatcgccgccgcgttagatctggtcccgttgctcgcgccggattccgctgcttttgttgttcaaattgttttggtttcgagctttacctttgcgggctattgggttggatgctccgtgatgcttcgaagctacgggagaatgttagtgatgatgcttttttggatcttatggacgaattttatacaggggcttgcaccgaggaggaggaggaggagagagctgagcagaacaagctagattctcaaggaagggcgcc

SEQ ID NO: 5167 - DNA, 2000 bp, Oryza sativa
cacaacacaaatagctacaataatacaattcactcttgatcatatatattgatatgtgcatgtcataattaattgtttgattatgagatacagtcagtcaatagacaatctattgtactagtagttggctttagccctggactattagcccacagcgggctatactattagccttgctgttactgtttcgcctgtacaatccaaatcaccagtactgttgctcctcattttcatgacaacaccaatggcacatgctttcttctggttaatgcatgcaaattgtaattagcatcttaagctctcaaatatggagtagactattcttttacgagtagtaccagcaaagttgcagttgacctcatcagtgctcaaggacagactcacrgacwtcacagcagggcaagcaaaagtgaccgccmaaaccacaatagattactcctactactgatactccatgcatttgctctcattccctcccttatataaagtcacagcctgcttttctatgactattggctcacttattcttttttttctccccttcatctcttctctctctctggcccttgcttttttgctcctggtttgggacttccggacttgggatactattttgggacatgttttaaggttcagctctataaaggtgtcattctgcttccctggactggatgtatcaaacattcgtttaacacctgcaagggcaatacaaacttaaaccacaggtttttttcctttatgattttttagataaattaaaagcatcatttgtacttcatccgtcccataaaaaaccaatttagtaatgaatgtgacacatcctaatataataaattcggacatatgtctgttcagatycattatactaagatatgtcatattcagttttatattcgtttgtttagaccaaggaagtaagtaactagtatacccaacmaatgacattggaatgaactagtggtaagaatacactacagcaactcgccaattatatcagtaaatgcttgtgcccatcaacggcgacacgaggaaatcagtgacgagaaaaaaaagcaccagcaattaaacaggaaaggcaaaaaaaaacaaaagaaattgacacactcctctttttttcccctttaatcatcgggagaataaaaagaaggaaacaaaacggaacacacccgaaaataagttgagaggcagaggaggcagacagcagcagataggcagacaaagcaagccagagatctagctccgcttgtcggaaagaagtagtagagcctctctcacaaaaaaaaargaaataaagaaataaaaaatcgagcaagaaaaatcacaagaaactcttctttctctttttttttggcttaattacagttttttgtgtgttttttcccttacacatactgtgccagtggccagtgtamagcgccaccacccacaggccacaggccamagcttggcaggtttgggctttkaaccgagctgagctgaggtctccacttacttcttcactgctcgccatcatctccttctttccaagcccttcttcttycttttttccccctcgccataggcgccctgtgctttgctcgctcgctgcttttctctttcttaaaaggctgctccctcactcacaactccctctctctctctctctctctctctctctctctctctcctcacctcttcgtgttcttcttctctctctcttgtactcatcatcatcactcttcagcttgcttggttggttggtggagcttgggagtttaggtcaaatagccatcgatwcacactcctctttcctttcccccctacattccttyctwtacatcgtctctttcttgatttcccaatctactaagctcctamtagctctgtgctctgstgcttcctcccatatatgggggcggttgccagcgacccacctacctacaagtagcttaagctcaagctcagctcagatcggagaggggtggtagaggtagtagcagtagttgagagagagagtgagg

SEQ ID NO: 5168 - DNA, 2000 bp, Oryza sativa
gacgcgggagaaagggagggccgcggcagcggcgcccgccggcacgccgccatgtcctccccccgcgggccgccgtctcgtccgtcccacccaaacctgtcgatssatckcrtgtgatcgtcgatgcaagcaggctgtgcaggtagttgtacatcaaattgtagtagcaacgccaacactgccatggccatcgccgtcgccsgagaagaagccatcgtcttcgagcggcagcaggaacgggtcgtcgagcagctcgcgccgtcggggcgaggcaccgttcaatgaattgcctcatcaccgggtcgctcaccctgtacaacgcagcaggcttgatcccctgatcataaacaagcattttcttgatcaaatcgtgtccaagaattcacgagaaattctgcaagaatcgaatagatggtgatcactgatcagatcgtacggagatgactcgcttgtagatttggatggggttggagcactcgctgtaggggtaatcgagggtgaccatctcgaggacgcacatgccgaaggagtagacgtcggcgagctcgtcgtaggactcctcgtacacctcgggagccatgaactccggcgtgcctacgcagcgagtgtggtcgccgccgccgccggcggcgagaggcggaacgcagcgaggccgagtcgccgatcttgacctccctctggttgccgttgacgaagatgttgtcgcacttgaggtcgcggtggatggtgggcggcgagtgtgcgtggaggtaggcgagcccgtcgaggatctgtgcgcaccagcgcgcaccgccgccacgctcacccgccggtgcttctccctgtactgacggagcgtgccggagacgaagagctcgatgacgaagttgagggcgccgcgtggcgcgtcgacccagtaggccagtaggcgtcgaggcacctcgactccgccgccattgcgcggctgccctgcttcgtgctcccgccccgccgcggaggtagtgcggcggcggcagcggcggcggagtgcgcggtgtgcctgcgcgccgtcgaggaaggggagacggtgcgcgcgctcgcctgcggacgacgtgccccctgtgccgcgccgacgtgccggtgccggcgaggccgacgagctcgacgacggtgaaggggaagcagcaggaaaccgcggacggcgccttcctcctcatacaccctcgccgccagcctctcccgcgccgtcgcagccggaggagccgccccctacccgccaccgccgccgccggagaggccacccccgccgccaacgccgacgacgaggcccgcgcctcctccctcgcgctcggagccgccgccgacgacaaggccgagcggcgcggagtcgtcggcgccgcctctccgccaccgctctctcccgccgacgccgcaccggtctcgcccgccgacgcggcgcctccgcagcggtgctcgccttgtcgcccagtcgcccagagaagataagagaagagtgagagagaggagaaaaggagaggggagagggtgatgacgtgcccagctaacacgtggggtccacgtgggtcccacgctgagaccaaaaccgggtcaaacccaccgaaggatctcgggtgaccggttttgtatagttaagggaccccgtatatctggttttacggttgggggagggacgattttgtaatttaatgacaagttgagggaccttcggtgtactttttccgttttccaacggtcctaatggcccacatatgagatcttggatgggcccgatttgaaatcccacggagaaagtcaggccggcccaaacggcccacgaatccccccagctttagccgagctgacctcctcctccttcccttatccagatcaacccgagccaaacccaaacgccatctccaccgtcgccttgcctcgcctccacctccacctccactaccaccaccgtctccggcgatggaggccgccgaccccaggtgattcggcggccggtctcctccccgccaccgccgccgccgccgcca

SEQ ID NO: 5169 - DNA, 295 bp, Oryza sativa
  misc_feature (1)...(295): n = A,T,C or G
aaggggknnaagggggggggtttattcaattatgaaattttactcccctatgtactaattgagctttgctgattcagcagtgctcatctacgtggacaccacaaatcaatagaaccttttcccatttggacgcaaaaccaacctaaggccatgcaaatcatcatgtctccattcatcgtactgatgcaaacttgtttccactctgctttgcctcgaatatctcggcaggtagacgtcaggtatcttcagttctgcacgcctatttaaccgccgaattctgcaaccaacgccggca

SEQ ID NO: 5170 - DNA, 878 bp, Oryza sativa
ttttttttccgcttccgtttctttgccgattaattgttcgctacgtgtgcatggttcatgtttgccttttatggcctttattaaaattagtttattaaattttctcaactawttgtttgttacgagaactagcaagctgagccgaggcgagccatatatagtgaggccagttttcgttcaaaattgaatagtttagtttaaaaaatttatcaactagagtactttcgaatcgagccagtgataacacgtatttactaatagtgcttattttattcattaatgataattataatacgaattatacgaatagtgtttagggactggttggttcatttgcttattttgtgtgccaaacagcatatatcaccaatttagcaagctatagtttttcgacactcgacaaaaagctcgccacacttatggccaaaataaatcagcttgcaaattgagtctataagcaaatctaaaaacgctacaattgcagttataagccaaacgttttgccagaagaaccggagctgcctactttagacgtgataaagtttggcaataaactaaaacagtcccctagtctgcgtaccattctttgtttactaacaaaagcgtgctactttacccaccagttatataatttgttcactttgatccgattcctattttgcaacatgtacgggtgatatatatttcatatacacatcatcaggcacctataattaagctgcatgggtcttctctgttgtagtgagcacactttggtcataattttaaggactgtagcactgaaaaatagatttatttgaattttttaaacaacttgcacatataatttttttatgaaaatatataattttacagtttgaaaagtgtgctaatgaaaa

SEQ ID NO: 5171 - DNA, 2000 bp, Oryza sativa
aatcccatccccgtgcgcaaaatcctataaaaaattcggaccaccaaccatgctgaattttcgtcaggcgtgcctagctagtgtgaaaaaaaccgcaagcgtttccccgcaattcaaagctcgttatcccctgccaagctgaactcttacgagaaaaaaacaaactaacaataaagaaaaattagggcttataaaattttccatgctgccacgtcaaatgtttagacagatgcatgaagtattaaatatagacaaaaaccaatttcacaattcgtcaggaaattgcgagacgaatttttggcctaattacgccatgatgtgacaatttggtgctaaataaacatttgctaatgatggattaattaggcttaataaattcgtctagttgttttctggtggaatctgtaatttattttgttattagactacgtttaatactttaaatatgtgttcgtatatctgatgtgatatgtaggggtaaattttttttttgccaactaagcatgcccttaatccagcaaccggcaaaatccagaattaaccggaggttcaaatctccagtcgtgttcggccgatcgagcagtcgaccgcgacgccccccaaaacgcatgcagcagcagcggcagcggcagcggcagcagatcggtcgaccacctgctgcagcgcagcgaatcccaaatccctattattatctcccacccgcgtataaactgcatccaaaacctcccacaagtccgatctcggacgctccccgccgccggatcgtgaacgaacggcccagatcgtaccgtggctggctgctaccaccaccatcatcatccatcgccgctagctgcagcagcagccagccagccaaccgccccgcgcaacagaacaagagagggatcaaagaacgtgaccccccgtgagggaggaagcagagagagagagaggaggattgaagcattcaaccaccgtggggtgatggagaattggagagacgatgaccaatgttgccgagatgagtaggcatgtgaagtgaggcgagagagagagccaagcagatgtgcagcgattaccgggcgctgtccgcgacccaaccaccaccatccatccatacacccggagagccatatgccattttttttgccatgtgtcgctgcgacgtaggccccgctttgtcagggtcaaaccgcacctaccacccgtctcccaggaaaaaacggaaagaaggaaaaaaaagttatttacgttttcgcggacgccgccagcaacagaaaggaagggaggagagatgagcgcggcggggggtggggcccatgggccaaggcgggccgccgcgagggcggcgggggggctataaaagcggctcgacgcccacccgcaaaccctcgcatttcccatctcatctctcgctcgctcgctcgctcgccgctacgcctcacgattccgacgactccgacgccggtagggtcataacaccctcctagacgccggcgacgacgagggtggttgggttgtggatagcggctgcgacgacgagggcgctctcctgaccgccggcgtggggtgccccagctccaccaccggcgacgactcctcctccgccgcgagcgctcccccagcctgcttcttttgcggggtagccggggctccggcctcggcggcttcaaagcccccttcctcacaacaggatccaaaatcccgtcctagagttcttctacctccccttccaaaacttcctcttttggcatccttgattcaatttcccttccctttctttctttctttctttctttctttcgatttcttcttcttgctttagatttcttatccttcttcttgttgctaatctcgatcgatccatctatccatccaaacaacctcattcttttttcctttgatttgattcttcgctgctaacgccaccgaaacagacaacagatttacagcaaaagaaaaaaaaagaaggaaggctaacctttttctgtggattttagcgttctccggtttgtgacgag

SEQ ID NO: 5172 - DNA, 2000 bp, Oryza sativa
ttggagattttgttttcgccttgccactaaagattgataatagtatttcatttgttttttatcatgtgcaacacaatgacaaaaaaagtgtggttctatttggcttagtgacaaaaaccaaaatatcaacaacaaaaaaaaaggagaggaggcgccgtttttttccatgtgtgaggggatcagagaggagaagaatctgtctcgtggtgtctgcctacctgaccaggcagccggagacggggtgatgagtggtcaaagtggtctctacactgaagacgaccggtgggtctcccctgcttcgcatgctttgtgttcgagttcgaccaaaccacttcaattgccggttgcattctgaatgtctgatgcgctgccgtctgcgaacgcccatcgtgtcggtttcagttttcatctccccttttttgacacccagcagcaaagctaagcttagctagatcgcatactgcttggagctgcagatactgctgctgccttttttgtgttcatgctgccttgctgtcgaattccaatgcacgcacgtgtcagctacctagctgtttgatcgctttcctgcgtgcgtgcaatggactcaaagatgtccacagaagcttggatgctgctgatcttgcgtatatgtgtacgtagctaggctcccatgcacacatacttcaagccggagcaaataagacagtccaaatcgtgccagaaaaaaagtggttgcaatgcatatgtctgaccatatatgttgccatcagggagatgctgttagatctgagaaactggcttggctggtgagagtcatacgcatcttcaattcccaaatgaacgagctgattggaacacccggtctgaggatgccaagtggggcaagtgatccccatatttatcatgtgatagcagctgctccagtcggtctcttatagctctgagaagcaaaaacaactcactggtgatccatgtccatacgattgagctaaccgaaacgttgatcgaatccaattttattcagcaccagcggatccattgcaagatcatgcaaaaggagaaaagtagatatgtttatcagctccagcagcatatgaacaaggtgctagtatgcagatgccccctgtgcgtttagacgcagacagacgctcgcttgccatgtgaaatttgcgagcgcaaacccgaccctgattatccaacggcagcttcggagaagactgatgtatcaccttaccaacgcaatttgcagaccaggcgacaggttccaggcgactccttcgcccgagactgacaacagtgcagccaagtcaacatctcacaatttaatgagaaaatatcgagtcgaataatacacctctgcaactggaaacaaaaccaatattcctctgaaattgccatggcactgcgtggagaatatatctcatgttctgaaatctgaaggtcttgtgtgtttgttccgatttgctgctcaatctgtccattcacatttggcagactggggctaacaacacacgacatggtggtacgctacctgaccggccatgctttttaagattggaagcctgaaacgagaagaccaggactcccaaaaaaaagaacctttgcaagcactaggagatgtctgcatccaaatgtgcaagcaaaggaagcaaccagtcttcttacggattctcccgaacagtgctaggattggttgaccataccacttacgacgatggagccccccctgaggctgagcctgcgtggccggccggcctttaaatctccctccctctcctccctccttctccaccctccccttacctaccttggtggcctcctctcgctctcgctctccttctcttcctgcacctgttgcacccccaacaactctcactcactgccagtgtcaagcaagattatacagcttggtctcatctcttaattccaagcttgtttcaccgacctgccaaactcgattgatccacagatagatagtacttctggttgggatcttgagcttatatagaccaggaagc

SEQ ID NO: 5173 - DNA, 2000 bp, Oryza sativa
cgcgacacgccgctggtggtttacgcgggacargaactacaccgcgcacgacatgccggcgttcctcgcggcggcggggctaccggagttcgaggtgacgctgtacgagacgagggagctgcccatggcgatgaacttcagagctcctgttgtgccgacgacgtgcatcaacggcatcggcgtgcccacggcggagaagctggtgtactgggacggcaacttcggcgaggcccccgaaatcgtgtacggcgacggcgatgggcttgtcaattcggcgagcatattggccctcgacacggtgatcggcgatgatccgatgcagcagtactacaagtccatcaagatcgccggcatgtatcacgccggcgttatctccgacggtgtcgccttggagcgtttgatcagtgagattcttcgggagagttttgtgcaagattccaagaaggtggattatcgtcgagttgctcaactctaagttgatcactttttctattctctttaactcatcgtttagatcaacatgtatgcgctacttgtaatgtattcacttggttccacattataaaatgttttcgtatcacttacacacgtataaataaatctgaaaacgtatataaaacacctatatgaatccatgtataaactataaacctaattcaaaccaacatattacaatacgaaatacagtaagtaactgtttaatcctaacttttctactcatatatttgtaactaaaataaaatgcttcctccgttccatattataagtcactttaatatatttgtaagtcaaaaaaaaattttaagtgtaactaagcttataaaaaatatagtaatatttcaaacacaaaataaatatattattaaaatatattaaatattacatttacatgcatcatcctcctatatatttacgtctttatctatcagtattgtttgtctcgggactccagtcggtctgacttttctcactacaagcatttttcctcgtacggtctgtcttgtgactccaagcttcgagttgctcaactctaatttaccagcactaggatttctatcagttgatcacttcattctcttcaactcatcgtttagaacatcaacacgtgcatggttccattatagttgtttcatcattacctttttttttaataaataacgcagttgacttttagacatgcttaattattcatcttattcaaaaattaagtaattataattcattttgatatgattttttatcattaaaaaatcggtggcgctaatacgcatagaatgcagtttgagcgccgcacaacgctccctccatccagttttctctttttttaccaccccacctttactcagtatcccaccattcctctagattttttctgttatctcattttagtaaaatatttaccatatggtttttctttccgagttttctgcttttcgagtgtctctcgacgtttcaaaagtaacaaatttactctactaagttttccatttgctcccaacatcccacctttgcaccttcaaaaataacaaatttactcgcatgaatgtcccatcaaaagtaacaaatttacttgcatgaatgcccctacaccattcctagatggccgtaataaaattactaccagcttacaacgctagtaattcttttaccagtaataaatattgtttagacttcgtagtatgtgagtagggttgtaaacggatggagaagagagagaagaagtaccacgatagataaacaggtactatagatagctttatatgttatctaccactcaggtaatagacgaatatcctattattgtccgtacagttacaaccattctattcttgtttatggactacaactttcttcgtacacacatgcacctccacaaatctctcttggcctaaaattatgcagcaccccttcacaccccattcctcatagccatctcctctcctcttgaccccatttcggtgcttaaccaaactcaccataatatcagttcatccacaaca

SEQ ID NO: 5174 - DNA, 2000 bp, Oryza sativa
acctatgcctaccggattgagatcaaatacagttggtactaaaaaggactgtaagtaatcaaccgttcatattttgatttaacgattcacattcattgctacaaaatgtataaaatatatatttttgctacagtcacacaatgatccaggcccttactttctctatcatgtgccgccgaagcaactggctttttttttaagaactcccgaacaactgcttaagttgcaattatagggtctgtctggtagagttttaacttctctatcatgtgccgccgaagcaactgggctttttttttaagaactcccgaacaactgcttaagttgcaattatagggtctgtctggtagagttttaacttcaggagttagatatagagtggagttgtggagctgcctaaatctagctccacctctccagttcattttgtgaaaaagcttcattcaactccgctcctattttacgtggagctagaactatttggctaagttccaatttcaagggagagctggaactgaagctgaagctataccaaacaggctcatgcttgcaactgcactggatcgtgatgcatggctgccaacctcctgtgaaagcgtgttgctactcctcacttgtgaaaaagactgtaccactcaaattctggcacacgcacttccgcctgaaagcctgttttaccggtcgaccatgaaactgccggttagtcatgcagttgcgactcctgtgatttttcagtcatcagggactcaagaagcaccaaacccgggtattgcctgctccactacgaaccaacattatctatccaaattcccagtagaccagaatgaagagaagtgctctgcatgtgaccaaggcactaccaagtaggagtaccaactacctaagtatgcatgctcagttgctcatcgttcaggacccacccaatccatgtcaaaccactcgtccaatgttcggcaatgcaccactacatatacatatgcagaccggccatccactgtacacgaattgcaggacaggactgacccggcggataatccgggcggttagaccagtaatctcaagagagccacgctgcgataagcaacgcgaagtcgtcagccttgcgatacaccagcatcagtgtgcaggctcgcagcatgtcggcgaaggagaagagaattttggggagacgcagggtgcaaacagtggcagggacgggagaagaaaacttgggtattttgctggcacatcagtcgtgtcgcgctcacggccatagatcccttacgccaccgatgaaaatagcggtagataaaggtctccgtcagggagacgaacagttagcgtaacagttgtgtgacacaactttgggactttgagcatccttttcatttcatgtaaaaggtactacttctaaaaggaatcgattgagaaactgtaaaggcactgaaagaaccatatgcaaactttagtagagttcattttcagatttcaaatttcagacaccaatttgacaggttatgagaattatatcatcaggaaaaaaaagttttaggattgggattagttcctagtaccagaactatactaagcttgagcctcaagcttgccggcgccgatacgctaaaccgtacgactacaaaaaagacgtgccattctccaatcatccatcgtccatcaacgcaataatacgttcgcatctgacgcgcgcagaaagcccaccttcgttggcgccgcaccaaaacgagactcgcaaagtcgcatcgcgtcgcgtcgcgtttcgcttcgcttcggttcggtgggaracgggacccccccccccccccaacccaacacgaacgaagaattccaattgcacagggcaaccgcatcatatggtcatcgtcatgggttgggctcgcaccgcaccgccgccgccgccgccgacgcgccaactggtggtgctaccacgccttatttagccacaccgtccccttcccgctcggtgccaacgcgcgcgcgcgcggcgaagcgaagcgaagcat

SEQ ID NO: 5175 - DNA, 2000 bp, Oryza sativa
acttcttctcgtcacactacgatatgcacgaaccacatgtcatagtttgagtacagtaactggagtaattcacaagaaaaatttacttatattcactttattcttttcgtcagaacgtgcggtagagtgaaacccacatcattggcatgagccacgtatcataaagtttgacagtaacttcacaaccgtaattaacccggtcaacaagatccatcattcatacagttggctctcttgattgtatcagattaattagctcggcctgatgatcagatccgtcctagatcaatgcaaaatagtccccgcttggaccaagcccaagttcataaagctttatactagctactccatccgtcccataatataaaagattttaagtttttacttgtaacgtttgaccactcgtcttattcaaattattttaaaattattatttatcttatttgtgacttactttattatctacaatactttaagcacaacttttcgttttttatatttgaaaaaaatttgaataagatgagtggtcaaacattgtaaataaaaactcaaaattccttatattgtgggatggagggattatatatctagcttccttccaggaaccaagaaatgttcagttctaaacgaagggctgacgaatcgtcacgaggtcaaccagtcaacagcaaatggtccttggtgtcctctttcgacctgtggtccataaccatgtgtacaattattcagaagtggtagtataccgttggcaacgtcctctagtttcacatttttcagggtgttttacttttctgaacttccgatcaacgtggagtttaattagcagtcagtcagcgcctgaagatagattgcaggctgcacgtgggggcgtagctacgtagccgcgtcagggtcaacgacactactttaatacatatacgtacgtatgtacgtacgtccagttctactatttgtctacccaagatgattggagccacacgtcggtcagttcgtcacccacacgctacagtcgaccaagctgttcagatacgcactctatatatcgtagtaaaacactaatgaatcgattgatctcgtctcaccagttaattaactttagtgtaatactatatactcctaccgtttttaatacatgacaccgttaactttcgaacacatgtttaatcatttatcttattaaaaaattttatttaaatgtataagatagtataaattacactttaagtactttaagtgataaaacaactcataacaaaataaattataattatataattttttttaatataacgattaattaaatgtgagaaaaatcaactctgtttatctattaaaaaaacgaaggtggcatgtgtcgcttttcatagcggccgtaaagaaggaaatggatacgccccgtgaagccgggcactgtcgtgtcgcagtctctctcccatccctcgtctatattggagtactccagtatattttgccggccgagcagtaaactagtactactagtaaaatagtgggcgcacaagactacagcagggaagccaagcaccaacggccgcacggcccgcaccgcgcgcaccagctagtagaaaacaccgttttcctacgtaattccgagccaaaaccacgtaacaatcgcccgcccacgtcccgtgtccccccatcccttcgccattggccggcacgcgctttgacgcagccgccgcagccgcgcgggtaacaataaaaacgcccccgtgcaccgcctgcctggcgaaaaaccggatcaacgcgagcaagcgctcacctcaccacctcaccctgcagcgacagaaagagtctgtagtagcgtacgatcgcggctagctatcgagctccagcgagaggcgtacgtgagtgcgtgcgtacgtgcgggagggargaggaggggaaatrgcagggggaaggaggggggaagggcgttgccggagacgccgacgtgggcggtggccgtggtctgcgccgtcatcgtgctcgtctccgtcgcc

SEQ ID NO: 5176 - DNA, 2000 bp, Oryza sativa
gtacatacattacttttccctcagatcaataatattcattcaattatttagttgcgtaaaatgagaaaagtatcagtgtatcactagatcgtgcccggccttgtgtttgcctatttacgtaggggtagctattatttctaaaaagacaaataaccaaacgagttaaaaaagctaacggtgttatgtattgtatttaggccgagttcagaaattctaccttccggcacaaaaaaggtgttattcattaacacttgattaattaaatattagtcttaaaaacttaaaaaatagattaatactcccttcgtttcagattataagatgtgttgactttggtcaattttgactaaaattatagacaaatatagtaatatttataatactaaattagtttcatcaaatcaataattgaatatattttcataataaatttgttttgggttgaaaatgtcactacgttttcctacaaacttggttaaactaaaataagtttaactttgaccaaagtcaaaacgtcttataaccttaaactaaatggagggagtatgattttataaaacaacttttctatagaaaacttttatggtttaaaaggcatggaaaaagaggaagatgaggtgaaaaagaaggcgaagagcacatccctgatggtgagttggaaaaaaggccaagaacacagatttaaaaccggaggctaagttttgttttgtttttcgcaattgcgcgtatgcggtattgctaagctacagtagttgcggacgagtcaagaaccaccatgccgaccgatcgtgctggccttggcatcatatcatcatatgcctacaaatgctatgctacaatttcttcttattcttccattacaattttcttatactagaaaaaaaaatcaagtagcatatgtgctttggagtgtgcatagctagctgcagatagcacacatgtgtatgggtaggtatacactatcagctgtagtaacaaccgctgacatgtggaatcgggtccacctactagccactgctactgcaaatacagtaccgcagaggattcatgtccatgcactatacaccgctgcttgaatgctgccatggttccagctcaatagctcatcaccattgcataattaatccaaatcaatcaagctaagctacgtctccttcctgtcgctctcgcattgcagagatcagtcagatgcaaaaatcgatcgatcgatcacgctatcgtctcgtctcgtcgtctatcgatctcccagagttttctttagcgttatcgcgacaatgagatcacattaactaattgattaactaattacttcatccatttcatatccatttcataatataagtcattataatatttttcatatttattttaatatttttgatatttatattaaggttaatgaattagaaatgcgagggtagtaattaattaccgcgtgcttgcgatcggcctcgatcatcggagatattttgattcttttttctcgttttcttcgaaacaatgggagatatttctcttcccccctaactccactacgctcaacgcgccgcctctgcggtgtcagctgctgggccccacgcgtcagtgaggcccgccctggcgcgctcgcccgtataaatagcggcgctgcctcaaagaggagccgagagggagagagagagatcccgagctcccgacccgagcgacacgctcgcgctccttgccaatcttgggcctcccgagttttgctgccattgccgctcgctgctgctctcgagtgcgcgcgtgcgtgcgtgcgtgttgcgccggggggaaatggggatagtgagagccgcggaggatgtggagggcgcggtggtggccggagccgcgggcggcggcggcggaggcggaggcggcgaggtgacggcgccgctgctcctccgggcagcacaagcaggggcggggcagatgaggagaagatccagaatgatgcgggcggcgatggcgggggtcggcgcggaggaggaggaggagggtcc

SEQ ID NO: 5177 - DNA, 2000 bp, Oryza sativa
cggattccacagctgcatgtaaaaatagtttttcacatgtggtttatgaccctaagacaaaaaaagaaacgcgaatattagagaaggaagcacactaccttgtgaaactagccgaaaaatccatgggcgtttctcttatgaccctaagacggctttaaccatcttcataatggtttttctttttgaccgcttgagataaataaagccaagaacatgcaaaaataattttagtagcgatgtttttctcacttttattaagtttattcgtaaaccttatggtaaaaaatatttaatttattcttacaatcaagtaaatagttcacagcaataatatgatgaataatggcaatatgagattgacacctccccgctatgaattattcatgcggggggctaggaatcatactgacgaaacgtgctcaactcccagagcacaaaatccagtgaataacagaaggtcaagcacttcaagtactgctaaactttttcttcaaacttttaacttttccatcacatcaaaactttcctacacacataaactttcaacttttccatcacatcgttccaatttcaacttccaatttcagcgtgaacttaaacacagcctaaagtgctatatatggatgatgtacagaagttgtgcacatatcttatattgcttggcaagatttgctccggtctaacaaaaagtatttcgaggtaccgatatctcaagataccgaatcgttttcaatcgttggagttaaaaacaattttaaagagtgaggtaccgatatcgtaagatatttttttttctcaccagagcaaatctcattgctcggcatacttgctgccactggcttctgcctttgccacaaaggcactgcttcgcaataatggcaaagataggaaaagctatatggtgaattggtgattggtgagtggtgactcgtgcattaatatggaggtaatacgcatctgtggcatatatgtctcgcatttgtggcatatatgcctcatatgttgtgttccctgatagttcacatggagcacagagctatagtctagtgccttttagcccacatatataatgtttacatgatcactaaaataaaacgacaagatacttgttagtaaaagttaaacaagttggaagctgactagtctgacaggtgtgcaccagggatttcaattttgatttaattcctgttgcaacgcatgggtattctactagtagtataaaatttgaatcctataaatttttatgtcttggaacaaagatagtactagattatcatgaacacgtgttttaaactgcttagatgatgtcatttttttaaaaaaaactttctaaagtttttttaaatcaaataagtctattttttaagttggtaacagtaacatatattactaatcaaggactaattagtaagcttgtcagacacacagctatttggctgatcagccatctcaaaagcggccttaaargaaaacattaggttggagcccactcgctagctagtaaatacatatactccgttttataatgtaattaaggtgttttaattttgttctaaactaaattcctctaacttgggactaaatttatataagaatagttaaaacaaagatcactagtatggccatctctagcattgcaacaccatcaagacctagggtgagaagtataatatatgtacgactgtcatttgtcacacatagtagacatgccgtggatgtttggcaattcatagcaaaagatcttacatcaccgtcgaaacattatgtaattaattgggttaattggatcatgctattataaatttgtgtattaaaaatgacattacaattcatctgttcatagccatgccaggctacaaacagatgaattgtaacaatatttttctgaaaaggcaaatttgcaatgacatgaatccaattaatcttaattaattactatttccttttggctactataaatgaaagaagaactgaatagtgatcgcccacagttgctcacc

SEQ ID NO: 5178 - DNA, 2000 bp, Oryza sativa
cctaaattgatgtatgtggactaggttaatttctttggacggagggagtatatatgtaattattttcaacttattccatggtgtgatattcgtcatagatagttagaagactgagtttacatatacatgatatgttctatacattattttaattaccaaacgatatgtacatgtcatggtgactacatatattagtaacaattaatgtgattatagttgaacaatatgtgaaggagccatgatggtagtacagtgcatcatatctcgttatctcccactaaatatctgctagtgacaaccactgtacaggaaacttgtttgctattccattgttccactttagttggtgtggctcaagccacaattaaagttggcatatacacttaattaaaaggcatacgtaatcatttataaattttattggcttgccataacacttgaacaagcttgctttgttacaaatatatcccttcttgaaaaatctatggtattttagcaagaaaagaaagcatatctatcactcattacaacattgttgtacctaammamywacayawwrtktttwtwtttktsatttcatagcattctctctcaaatacacgacagacataagtacccctattactattactatatcggtgcctggtccttatacaagttaatttcttagggaaaacacgttcattcagagaaccaatagatttatgttgtcgtgtatcatttgtttttcttatgttattttctttcccattggcatgcgagcacttctagtgtttagcgtactcatattcatgagggtcaagcaataatagcttyctcatctmwttctcatcgtcgaattgaccgtgacagacagagtattcgagataatcacaaacgatgagatgagaatattggggatttgcaaattaatcaggatacaattaataatataccagtcacatttagccatacgtgatatagaggtggatttgttatcgaagagaggtaaaaccattacttattatttgaaacgtaattgctaaaaaactgtcacgagtttttttggaaaaaaaaacttttagatataactatagtatagattgcaatgcaatagttatagtgaaaaaattatagttacattataactgcattataactacagtgtaagcacggtaactccaatgtaatttctatataagttagatataaagttacatatactattttaatacttatatataagttacattatattttatttatagtagaatttatatacaattatactataagttatggttaccgttatacttgtgacagttttttttaaagatatagtcccattttgaaattcttagaagagactgtgtgggcctagcaatttccccgcaacagccgcgatccatgcccgcgcggtgatttcctctgtcggtgcccgaccgccaacgcccgctgacacgtgggccccgcttgccctccagctcacctttcgtctacctcccgcctcacactcctcccctcacctcctctcctcgattaaattaacccccgaaatccaccaccaaacgctcgcgagattaatccgattttaatcctcgagatttgtttaatggcagggctaatctcgccccaggccttgtagaaagcgacacccaaaccaactcacctccattggtgaggtgccctgtccttttctctctcctcctcctcctccatagttaagctccccaccaccactactactagtagtagtagcgctgccacctcccgctccactcccgcgtcctctgctggaagccttcttctcctcgccgggaggattccaggtaatgcccgctccgccgccgccgccggtgactctgctctggtgtgtttcttgggtatcagttcttgatctggatgttgttcgattcgtttcttggcagcgcgggatgcggcggtgctgatcccggtgtgcacggatcttgggtgtgattcggtgagctgagagctggtttgctgctgctgcagcgtgcgcc

SEQ ID NO: 5179 - DNA, 2000 bp, Oryza sativa
atgtgattacataataagatttagataataaggacaatattttttcatcgaatagctagctagtccttgtcaagaaagaaaatccgttacacttgaccaaacatttttgaaactttcactaagcagttggaaatttttaattaggaaaaaaaattctcactacaaaccaaaccgttttgaaagcttctgtatgcaactggaagttttcaaataggaaaaaaaaaatcttacaaaaccataattaaatactctctctgtccaaaatttttcttttctgataacgaatctagacaacatctatttaggttcgtctctaaaagttgattttcttttgggacgaagggtatgtagtcaacaacaattttctcaattatggacgaaatgccattttcatgatattcattgctaggaacgtcactaatttgtatgcacaatttttaaaacgatatacggtaagtatttggattttgactctgatgctaaagatgcttatgcaatctgtttcctttacccctttattaatttctttgtaacgcctacagtgtactcttcgcttatggctcctacttcaccaactacaagtggactgaaaaggaaaacggaaaacaaaagttaattcctcagtaactctccaccaccacaaaataaataaaaactttgaactcccttccaaaaaaagttcaaaacaagaaagaaaatatagctcacatcatcaaaagcaatggttggtgatgtggagaaaaaattttctatagcaagagaaaaaaaaacacactaaaatccggaaaaacmaaatgagaaagtagtggaggtggagagatgtttggtgaggcgggcgtgggccccacccaacatggggttggtggccactggccacggccacggggggttggtggacgcgggggcttgggccccacctccccagcgtctgtccgtccggcgggtgagaaaagtttcgggcggggtcagcgacggttcactggctgtgtgtgcggtcctcacgtgctcaccccccggggagaaatacttttcgcacgcgaatcctacccgcacccacggtggggtgggccccactccactcccccgcgcgtcgtctcctacctcccgatccgcacccgacgcgcgctataaataggaggcgcgagcgcattccggaggccacccccgtgcagaatcacacacgccggactctccccttctctctgtctcgctccttcgttcgctcgctttatcccccccgaataaaggcgagaagccgcagcggcggacgaagaaggtgagctctctcgtctcgcctcgtcttcttcttgctcgtgagatcctcactcctctcggggatttttttttctctgttggggtttgggtttgggggtagatctgggttgggcgctcttcgatctgaggagcgcgaggtttggtggattggagatctggggactaggggttagtgattgtttgtttgtttcgtttttcggtcgcggaagtgggaggggaaagcggttggggggatattcttgcttttttkgtttaatctttgattgtgcgtgtatggagttctggattagcagaaaaaagggtccgatcttttttggtttatgggggagaacaggctaggctagatctagcgttggtggatccaattttaaattgcaaaattttgtcagtacttagctgtcggctgcagtagatctgaagaatggatctctgttttgtgattaattttctctgttttttttcctttttttgttctgtggtctactacaccaatagagaattcgaatttgctctcctctttctttcagcaagtaggagtaaaatcacttagtactagtatcattttaggtgcaaaaatcgactctttttctcttggatacaccagttcgtcctcatcttggctgcaacgaatgaatggattgatcatctttagaaactgtctgcacaaaatcgagtatttttttttctgatggcttgcaaccgatgcatgcagagggcagatagaa

SEQ ID NO: 5180 - DNA, 2000 bp, Oryza sativa
tgaaaatatcatgaaaaaaataccaatcttatcatattagagacataataactactaagtccaacaacagagttgaactagaaaagtttgtggactatcaaattcacaagtaaaggaataattttacatttattctgtactaaaattggtatagaattttcatgcaagtgtgttatgcttgttttatttatgaattgtataggttctcttgggcccaagaacgccaaaatgcagccttcttcccaggtatataattgatttacaagttagaaaccaacttctgttgataactatgcattttatagtgcaagtataataaatgtactgcatccttgaaggtactaatatcagatatattccattgatgttgcaggggatcaaatgatattctttgccctaaaatggattgtccccgttttgcttgcggtcaagctttgatgctttggggtcagatcaacattgttgtccgcagtagtggaatcttctcttgatgctaattcaccgagttccgtcaaagttcttggtatagcatgcttgtaaagattctttcttgagttcacaaatccatgatttatccctgttaaagttaagaaaaatcaaatatctcaatgttaaaattagaaatagttctaaatgtttctttaacacatacctctcaattttgatttgtcaaattttgtaaggcatggagacatttaagtatatttgaaagtgatcatttcttgtaagtttgtaacaagcagctatgattgtgtgaacaaatttcaaatacaaattcaatttaatggtaccacctttattaaaaaaaatacgagatattttgtgaaatcatgagtttaagtgagggaggttactacttaccacaccaattagatatagagttacatataccaagagtttacttggttagacaaaatgcatgcaataagaaaaatacttgtatccgttcactcgaataaatcatataagaagataccaagtggagttagataagaaatacttactccctccatcccagaatataagaagtaggtaaaattaaagatagatgttataattggttgggaaggaaatgttggtgaagaagttgttatattttgggataaattcttaatgctaaaagttgttatatttgggacggagggaatatcattttgtctattctatttagactcaacatgttaacatgctaattttgttgctaaacaagaatataaaatacctgattgaaattcataattctgaccagctaccaaacgatgggaaatttgtagtatgactaaaaagaaaacgaagtagctcaagattgtcttcatattctcgccttctttgtatacaaacttgtctttgtagatgtaaaagtgtaccttgtacatctaggctttatagcacagaggaattctcttacatagatactaaatttattaaacatttttaaataggaattaatactcatgttggattccttttttggtgtagcatttaatactactatatgatatggctatcttgatgatatatttatcaacaatattaaattcggcagtatttgtttttgcgtgaaagatagcatatcttgaagatatatgcgttgaatctcgttaaatatgcatctatatggtatcgatcttagaagatttgcatccacgtcatccatgatatggcctcaatgttttcacccattgttaagtgtaagtacctagagctatttcctaaatgcaatcctgacaaaataaattcaattcaaggtgtcaattgggagcggattaagacggcccattttgtttgggctggagaatctagctagcaccatgttactactcatgacggcccagtgggccactctttatccaagtattcggccttggcccagctaagctagcgcctattagggctcgcccccctgcccgtgcgcgccgccacttccaagttccaacctccgccctctcttctcttctcctctctccttctccccgagctgcccctcttctcttcctccg

SEQ ID NO: 5181 - DNA, 2000 bp, Oryza sativa
ggtgaaatattttttgtggaacaaaaaataaaacggattcccttaatagagtgtttccataatatgtgggtgatttgttgcaaaagaatatttaatttactgtaacatttaatccatacatagtgaaacattatgagtacactaggtgaaacatttttggtgtaacaaaaaaaatgaaatggatcctccttaatagagcgtttccgttatatcccggtaactgttgcaacatggtgcgctgtggtggggacgcgtgggggcgacacgtgggcggcgggcgagcgcggcccccgatttttctggcgcgcgtcgggtgcccgatccgtggtgttttccgatgcgactttgagcggtaacgtatagacattccctcttaataatgcggtattagcatgactaagagatcaaaaagacatttttaccgcaattcatgaagctatcttttcattatttaattttaaggttgccatttaatctttcgaacacttagcaaagacattaaatccttctaattaattgtcactaatttccaaaataaaacgagggtctacatgccttcaacggtgtttgtcccatttttttttaacttcaatggtgttttaccattactttattttttttattttccctatttttttaactaaagcttgcgttgtccttattatgttcaaggacttaacgatgtgaagattcatcttgtcctcatcttttgacagaatatgtgaaaattcatgtcacaatgttcgatgtggagatatcggaaaaaccattaagtataaaaagttaggggaaaatctgtaagggtattacatgtttttaatctttttaataccattaagattttagttaaaaaacaatataaaaaatataaaggttgtaagtaaaatcactgttataaaattatcagtattctattataaaatgttggagttccacacccttaagtcctcacagagggttgatgcatgcactttggatgcggcgaacgctctactacagtcacatatttttttttaacatctctttttaataaaagtataaagtttgcactctgattttcatttgagaacaaagtttctacgcatattacctctgtcccagaaaataacttactactgtttttttttaacggagggagtaaactttatttacataaatttgtttattctatacataaacagggaaagtttcagagtgggaaagtcaccaaggcttggtttggtttgaggcctaggcttgttcactttgatgcgaaaaaaaacttaccaaaatttggcattgctaaaattttagcatagttgccataccaaaattttggtaggattttttatatagttaccaaaatttggcagcaaactaaatgtagccactttttttcgcaactttaccaaaatttggtaaggttgaaaatgacatcaaagtgaacaggcccctaaattggccttaccaatatttggcaatttcaatagtgtttagtgtctatttggggcttgttcactttgatgaaaaaaaacttaccaaattttggcattaccaaaatttttgtcaggatttcttatatagttactaaaatttggcagcaaactaaatgtatctacttttttttagcaacgttaccaaaatttggtaaggttgaaaatggcatcaaagtaaacagacctttggtttgaaaccaaattttggcatgcttaagaaagtaggccatttcaatagttaacttattaggctattttggcttcaatctaaacgtaactttaccttaccaaaattagtcatgccaaaacttaccaaaatttagcattaaaaaaaatagtaaccaaacaacccccaaatccctgaacccgacccggacccaaacaaggctacaaacagccgaagtagagctttgggttcataactacagtaaactgaccaacgcaaaccgcatcgatcaactccttccccaagtcgaagcaaaatccctagcgatgtcgtcgccgccgcccgccgccgccgccgcg

SEQ ID NO: 5182 - DNA, 2000 bp, Oryza sativa
ggcgcgcgacaagggaaaaggggttcagtggggagctcaccgacgagagaacggtgtcggcggcgcggatggagtcgcggcgaggcggacgcgtcggcggggcggcgcggcaccgagagggcgcggccggggaagaagagatggagaggtgcgaggatggggcggcgcggagctccttgtcgactcctcgtgctcgctagctctccgacacgcacgacggcagaggagggcgagaacgacaacgaacggcgaggcggcagtggtgtgagggaggagaggaagcgggaggtatgggagggggtgtgggttttgtaggtggcgatgtcggtttgagagaaccgacattggggcggtcaaggagatgaggcaggtggcgcgagcggtcaagcggcacagaggtggtgacgccggcggtggtcggggaaaaggaaaaagaagggggaaaggggcttggtcccttgccataatgaggagagggagagtgaggaggaggaggagagggagagcagctgcttctcctactcttggacgggtgcggcgtggagtggcgggggctatggatgacgtcgacgatgacggcggcggtcggtttggaatggagcgggggcaaggcggcagcgcgtggcgtcggcggtgcaagggctgatggcggcggcaaccgagcggcgagcgcgtgcgcgggaagggcgaccggcgaattcaaacggcggcggcgggaatcggcgccgaggagaggagttcgacgagagagagagagagagagagagagagaaagaagacgagagagcgagcgctcgcgagggaggaaggagcggctgagggagagagatgggccgaggaaaaagaaaaaaaaacggcccacaataaccgagggaggtaaagtagacttttttcgaggaaattgattcgaagagaatttgaacttggaatttgacttagattttggaattgggatctcgatgagaggaaggagtagacggaggattcaagatggggttttggatattttggatctggggaagtatttggcgatgattcaaagagagggatagaatttcagagtttgatttggagacttgagtcggaagaggaatttcgagggggcaatttttgatggtgacgagagggatcaaggacggatttgaattgagatcttggcacaacttagactcgcacacaaagaacgaaaattttcgcaattaggatttttgctgaattagtttttaacgactcacgaaaagcggagcgttacagtttcggtccagttcccaagtcgcgcctgtgatgattggtccaagtcatggcttccgctttcccttttgtaatgcagttgtgagctcgggatctgtccgcagcccaacatgactgtagtcctactctgtaataaagagacctctgttgctgtgatattctgtcttcctgtgatatcagcactgttttatgggactggtatcgattaacaggttaatttagagcgtcacgggctagttccgttcggggctagttcggggcgtgacaatatgttagggtgtgacagttagttatggaactgctgtgagaaagtgagctacccatggaatcataagcacgataaatcttgaattgcttggtgatttaatttattagactattatccttttagaccttttgtttgtagctaattggaggtatgtatgaattacacacttctaaaaatacgatttctccagaaactttctatgttagtattgattagataacctttttataagctacttgtaattttatatctttaatatttaactaatccatgtatatattaatttatcggctaaccagctagctgtttcgaaccggtaggtgacaacaggcatcctgccctttcatcgtttttttgcatcggtaggtaacagctggttttatgtattactcgactttgtataaataggagagcatgcatgtttcatcaatcagttatcttgtagctagctacctgatcgaactcgggaaaattatttaag

SEQ ID NO: 5183 - DNA, 357 bp, Oryza sativa
aaacggaggaagtaaatgtttatagataactattaatatatatgaattggctattaaattgactataaatgatttagagccaatagtgggctaaacttgctcttagcgttaatttagttgggttggctgcgtagtgcggtggcggacacttggtccatcggtagtggagtactactggtggtgtggaaattggaaatcgatcagcaagctgctggagctagtgtcatggatgtgagaagaacgtgtgatgtaccgaactggataatgctacggacttgttgcatgcctaaatctctccatataaatagagagtgatcgtgactagagatacttgcagcagctgcaaaataagcgaag

SEQ ID NO: 5184 - DNA, 2000 bp, Oryza sativa
ctggccgcggcgagcatcaccggcgtcaaggcgtccacggcggtgaagctagacgtcgtcaccaacacgttcccgccctcggccggcgtgttcgcggcgccctacatgacggccgtggccaagctcctggcgagcaccggcgcgccgctgctcgccaacatytacccctacttcgcctacatcggcaacaagaaggacatcagcctaaactacgccacgttccaggccggcacgacggtgcccgaccccaacaccggcctggtctacaccaacctgttcgacgccatggtcgactccgtctacgccgcgctggacaaggccggcgcggcgggcgtcagcatcgtcgtgtcggagagcgggtggccgtcggccggcggggactcggccacgatcgacatcgcgcggacctacgtgcagaacctgattaagcatgcgaagaaggggacgccgaagcggcccggggtgatcgagacgtacgtgttcgccatgttcaacgagaaccagaagcccggggaagccacggagcaaaactttggagccttctaccctaacaagacagcagtctaccctatcaatttccagtgaaatcgttcatcatcagcgccagttgtcaaattcacgcgattgcttgcgctgtaatagcgtattgtattcggatgggaaactgtatttatatctcgagaggatgctctctcctttgtttaaaaaatatataaatagttataaagaaattctaaaaaaatgggatatattcatataacatacatgtatcagtacacaaaattttagacccaaactcaatttatacattaagatataaaaaatacaacttcaacatataaatagtagtgtggtggtgtgttattattcgggatattaactatttgtcattctcagttgtggcaactaacaatttaccacctggacctatatgtcatatacacatgaggtctcatatgtcattggcacatgtgtgacaaatagttaaacaacaaatctaagagtggcaaatagttaaatactctgtactattcatagctgaatttatctctttttttctcatcgtgtaggtcgaatttgaacttgctttttggtgcagtgatagatgtactgtacctacaattgttagtttttttaagatttttttatgactatttatattaaattcggaagaaaaaggtatacgagataatattctgtggagggattagaacccgtttctatattaggatacaaatgatttaatgatttcctatatataataatattttttcttttcaggtatttcccatatctgatctcaaaaacttaattagtgccaggtcatacagattccagataattccataggtttaattcgtggtacgtccatgctgaagaaattctatgagatgcgtgtgtatagtaactgatgtggatcaggtattcaggtgagttctcaaccgatggaaaggtagtgttgtgctgctaacctgacaaaagaacaatgaacacacgtcaggaagtcactccggtacaagccaccattccattcagttagcaccccaaacctgaaattccacgtactggtcaagaatatacgtaagaattcaatgcaaaatcggatatacggttggaaaaacaaactagtgtggtattagtagtgatcttccgcgactctgtgtactgctgatgagggaagaattccatgaagcggaagaatacatgctgtgtctaagtacgccaagaaaacagaggcgagtttccacgtttcgtggaattttttagctccaacaagccgctgtttctgtggaaaaaatgggaggaagatggctagttaggctgcaaatgcaacgtagcagctagctgtaagcacgcacttgggccgtggatgtgaggaaattaatgtgcctaactggctagacactgaaacttgtatataaaggggtgtgcattggcacatagcatgcataacattcaggttcaggagcagcagttgggagtagctagctgggacaaca

SEQ ID NO: 5185 - DNA, 2000 bp, Oryza sativa
aaatccagtttgtatagcaccaccacatatgatgcacatgttggtttgaccacacaatttactccgcaaaccaaccaattaattcaattaattaaacaaggtgtaataagaaggaaacaaccaaattattaaatatagttgaggatgaataaaacataagtcaaaaaggcaggatcatggagggggtgggatctctcaccgagaacagaagcgatcccttttcatcgcaacacgtttggattcaatggtccatacccatgacaccgctctctctgtctttgcttggtttatccatccatgaacagcagcagcaaaacgatgtcaaacccagcagtggcccaaggaaagaaaaggcggtgtgtgtgtgcgctgcaaagtgatcacacctttctctccttgcatcttttcctcattttcagtatcttattcttggccgtaattatgatgtactacttaaggagtatacccaagtactagtagtagagtactcattgtcttaagataaatcattcagtacgaaatactcctataaatctaaatataaattatgtgttagaaaagataaatttatttttgaacaacgagagttgaacaaactatctccatatcataatatatgagatacttgtatatggtacaataaatctggacatatcttctatccagatttgttgtagtttatattatactatttctgtcctaaaatatacttccttcattctaaaatataagcatttttagattttgatatagtcttcaagatactattttatccaaaaatataaaagcaagatgttttaaataaaaagagtttcatattataatagtttgtttaatactaataaatctactagtaacatcaatttacacgatagatcttgttttttttctattaatagttaaagttaaaaatatttgatttaacattacgttaaaatgcttatattttaggacggattaacaattttttgagtgcatggatatactccataccattcacttaaagatcgtttatattttgggagatggatcaagtacttttgcagtaaactagtactagatgcacttgcagtaaaaaattctgtaaaaagagttttttttttactgcggggttagaactggaagtagaagcatggtgcagggaggagaaaaggttgtgtttttaaagtgcatagagaaagggtgaaccgaggagaagagagagaaagcgagagagagagaggagctcagctcagctcacctccactcgtggggttaaaaccccgagaactgcacagcagcagcagcacacggcgcagcagcggcaaaggcggcagcagcagcagcagcaagaaccgagcaaagtcgcaagaagcgagcacacacactcctctctctctctccctctctagctactgttgttcttggagttgtagaggaggaggaggtggtggtggaggtggtggagatagggggaggatgctgatgctcctagtcctatcctagttcgtcgtcaactccggcggcggatctgcggtggagcggcggctggattgtcgagcggtgagggtgacacgcatctccggagctcgccgcaggcgggagggatctgaggcgcgtttcttaatttgccttctctttgagctagctgcaaaggcggcggcgtgcggcggcggcggcgtcttggcgcgcgcattctatccggcgagtcgacgacgacgacgaccttcgcgccggtgtagcggcgcccgtgatgtgaaggaattcgagctcgctcccttgggatcgaaaaggttgcgggttggagaggcaagaaggtttggccggtttggggaaggagagaaagcgatggtggtggtggtggtggtggtggctgggttgcttgctccatgacacgacagcgcgtttgggaacgcctcgtgatctcggtgcagaaaggattccttctctgctccatttcttgcactctccactttgcattctagatcggttgggggaagaagaagaagagaagaagaaga

SEQ ID NO: 5186 - DNA, 2000 bp, Oryza sativa
aaaatatcttttgtttgtttgagttaagaagctgaattgggctttggtttgaatatatatgcatagaactatcagatcatccatatgttctctgtctagtctcatcgaaggagtgaataatccgtttgaactttggggtagtatagctttccgccatggactccacacaaaagaaattcctttcttctgctgtgtttggagatgtagctgtccgaagccgctgaagaatattgcattattcttttggaaagtgatgtagtgaccacttgctggttctcatctcaaagaaacaatacttgcataaaacagaggagaccatgactcaaaagtttgcctcatatattggcttgtctagtctaggccatgaacaccatgcctgcctaacaattcaactttgttgtttaaatagcagttatattgggaaaaaaaacacatgttataacacgcgagaggagggatatattagctcaccaccatataaataacctataagtggtttgcaagtcatcataaaactttgaactttagagcttgcttatttgagacacggttatacaattttaaattttagagaataattttagcattaatataaggttttttttgtcctttttaattgtcatttggcattggctttagaccgccaaaaaaaggcacaaaagttttacactaaaattgcttcatccgtcaaccgagagagatgtgagagttgaagggatagcagggagaactcaccaatgactacgacaatgacttcctatgtgagcctctagatgtcgttggcatatgaactctggcaaagcatgtatcaccaggttaggttttcagggttggtcgatagaggggcaacaagggtggcttttgagtaaactctgaggtggctgaggaccaacgttagatggtggagatacgaggacgagcgatggcactgaaattgtagagatggaagagagcagtgaatgaggttggaaggaggggcaaagaatgcaatgtggttaggaggaatgcggcaatagttgctaagcagcgaggagagaatcgaagtgttgcgatggatggttacagagagtgagaagagttgactagtgttagggttatatgggatgtatgaatagagtaaatcttggcatttaaaaaagtgacttgcatctaaaatatctttagggtaagtgatcaatgtttttctttaccgcagcttgtttttagttggcttaatcatgtatctttgatttataaactgcacccaaaaaataccttccaaaacaacttttatggtgtgtttgaaactaatatatgttatcaacttctactcacttgtttttcacgcgtacactttaggaattgtttaacagtgtgttttttaaaagaaattcataggatagttgatttaaaaaatagctaatatttaattaatatgttaatgagctaatccgttttcgggaccgagcgcaccctaatctccacagagtgacagaggtgcaccgcaaccagtaagtatgagagcatcagcatgcaatttcaagctccagcaaagctgccgtcacggcgtgattctccgtgtctgctgctctgctccacgtattaacgcattgcaaggcacagagaaccctctacctcatttaaaaatctgaattgtgcttctccttttccccttttttttttttagaaaaagataggtccggatttctactcggaatccactaaaatggccattgagcaggagcgcaaacattttcggaatatacgaatccagcgttgcactggcccacccaaagtggggaccaccttactcacacaaatttctttcacagagaatcaccgaaatgcccctgcccataaaccctataaattgactgataagcaacggccatttcagctcagatcagctcaattcagagtgtgtgcctctcgatctagatctctgagttcttgccatctttaatttgaaaccgaaatcatcagctgcaatcttcgagattaattaggaagctaagatcgcc

SEQ ID NO: 5187 - DNA, 2000 bp, Oryza sativa
actgcacaacctcctctcgtgcgccaccaagcccacgtgagaacggcatgcctgctggtgcttttcacgtgaccttgtaatagtagtgatatgtttatgcaattaatgatccacatgaccatagtccatgcccaaacttgcactactaatccccattgcatgcagccaagtaattgccctgttttcttacacgaactgaagccaaaagcaccacgagtccacgatccgctctgccgatttcgatacatgagtttgctcctaactccgatccacgcctaccaaacagagtcctttacgatgtcgactccgaatccacatcttctccgagtcaagtttgatctgcgtcttcttctgcattgaactcaattttatcgtcttccttgctgcgtcatcgtctgcatcattaagcccatggcttcctgttcgtctgtaagccaacacgtgtattttgtgcatgtgtatagtacatactccatacgcactgtccgtgcctccgcacgcaccgcagtcgcagccctcgtgttcaccgtccacgaccccgtcgtcatcggccctacacgtccgccgcgccgcgccacgctcgccagtttcgcccttccatcagtggcctccctgccgccgcggatccgcattcgccgcgggcgtcgggcacgccgtacatggcgctacccctccaatctctcctgtcgccttcggccacgcccggccccgtcttccggtcacgttccgccatcgccggtctgatcgcgagcgaggtcatcgcctccgcaatgtcctcattgtcgccatcgatctcatcgccacggctgacgatctcctgtcgatgcgcgatccctgcctcgtgtttcctcctccacatgtcttcttgatccaatactgaaaccttcagctctgataccacttgttataaaagttagtcgatatagcggaacaacgactaaccttcccgatcgcttcaatcattgatcacccaagacatgccagatgacgacacaggaacacacgatatttgttaacgaggttcagccgaagcctacatccccggggctctgattatgggcgctcctccccaaccaatatagctcctagctgctacgagtccatggccacgccgacatcctctccctgcgtgtctacgctacattgtagtcgctatggttatattgtggtgcccccctctctatttaagagagatgccgggttacagaattcgactctaactccaccccctaacacctattacaattccaagtccaactgtaaccaaataggactagtatattcaacacctattctaacagatgcaaatgcacgagataagaagagaaacaaatagggtagcacatgttttaactcaactgacaatgagtactaggttttatgcggagtggagactttgttctccttcaagaatcctatacttcttaaatcaggaacataatccattattcagtcattaataaaactctctttaactagaaaaaaaaaagaagaccgttcaaacacaagaaactcttttaaacccttagggatgtcctctcatatgtcttaaaaaaccatataaatagctattaaaaattataaaataaattgacaacattcgtacaatatatataaatatcaattcataaaattttaagtccaaaactcaactcacacattttaagtacaaacccttcaaacactgctcttctgaagttgaagcttgggaagcaaagcccacaatgcccgcaaagcttatggtccagtcgaaagcccacagtgccggcccattaggctaagtaaggccttgggctccaggttggccagaatttgttggcctactacacgtgattccagcgttggaatcatcacgattctcgaggcggcggcgggtgccgaggtcacggactcccatggcggatcatgtctcactgttcagaacctcgcttctcgctttgacttcgtgaaccttgtgcagctccgagcttgttcgccgccgccgccgcgccgtgcgtgca

SEQ ID NO: 5188 - DNA, 2000 bp, Oryza sativa
cgagtggttcatgaatgccgactgatcttactcggtttctcaagaaacacaaagtgctttacacctcgcaaagaaagggaactaattacttaaaaactttatcttggatgacaatacacgtatgttgcacagaaaatgttggaatatctcctcaagtcgccatgtttttttacataaaaaaatctctccaagaagctgacttggctacttgacgttcgcttatttatttctcggaagtatgtacttatttttgaatcttatgatcagttttctcgcagttcacgcgtggcgtgtcatcgatgtacgttggacaactggtaaagagaaatcattttattattatctaaacaccgtttctcagttggttagatacatatccaagccacgtagcaaggctcttagtcagataattgcttcattcatgtataaaaaaatgctattacacatgattaagtcaatttaagccaaaatggccatgagccaagacagcagaagcatcatggagcaatataatctcaatctcacaagaaagcatctatagtttatcccctgcaatagtagtgaaagatatgatgtagtgcaatagatttgcaggcaagcttcttgatgacaatagtcatgtgacagtggattgatgtgctatctcataaaaacactatcatcgagctagctggataagtgaaaaggacctggattttaaaactgctcattgaattaccaccgtattaattttttagtcacaagtgtcatactttggacaaagatgtttacaaatgctaaacttctacagcttgatgcatgcggcctggatggattctacacaattgcaaccagtaattgttagcaagattttgtatgcttcaacatgtttctacaaagttgccttcacacctgtcagggtttaagcgatgttccgatgctctatacttgtattattatattaccggtattattagaggtaaaatagtaaattattaatacaatgattagaagttactttatcattcatgttctttttctgactaaatcaatatatgatcatccattgcgttggcatcactcatatttcatcgagaaagctcaaaaagagggaaaaaagtttagtcactgctaaatgaagattatatccctccacaccttttttttggacaataatgtccctccatatttgtactaccgttaattgggatgatagtgtaaatagatctgaacactttgatcaaacgagatcaatggttcagattaccttttactactagtagagaacactgcagtgagactctcgaggtttatgtcctaggaatggtatgcatggatatcaacttccttgggtgaatactagtgtgtctaactgtctatccattttcttgaaaaaggaaaagagcattttattcatcatatgttctatttgataaatctagactttcagttagtttattgacataaattaccgccataaatcagtaaaacacataattttcagttactttcctttggacataaaacagtgaacatcgctatttgtcggtctattcgtatgtgtgtgagcatgaagcaacttagtcccagaggctcacacttaattccttgtatgatcaacaagtaaacttagctaatcagctaatgcacaaaattcattccatgacgcaagaaccaacaaatcattcagcgttccttccatcaaggttaaaaaagaaaaagaaaaagaaaagaatcaagaagcatctgtatgcatgcatatggatcaagaatcagtcttaagagtggacaaaaatacacgcacgaatacaacaataacacacctctcagtgaatcatcaatgtcaactttctcattttcyttttctttccacagtgtgacaaaatcttgcacaccacacttgatcatcactttttttttcaacgaaaacttgttcgtcgcacttctcctgttaaccaccatataaatctccccaaaagtgaagtctttcaccacttatgcatgccaagaggtttaacaag

SEQ ID NO: 5189 - DNA, 2000 bp, Oryza sativa
cacccatacacacgctcacattcttttgtttatctctaattaattaacatgcgattctctattcttgctctagctctctgcatcgagtcagaagacaatgcctttttaattagcatgggcagttgagataagtacatggtgttaacaatatgggcttttcaggatttgtccaaataaaaaaagggcttccggtgacgtcatgctgatgtagtaatcgagctaccaattgttcacgtggagtttgtcgtcatatctttgatctagctagcacaactaccagcttctgacgagcaaactgagcatctctatcgattgatcgtgtacgtccttctctggatcgatcggctagctggtcccgattgaatcccgatcaatcatcaatcccaaatactaaatacatatatatgaacattgttttcactaaactaaatattgatagacaaaacattggcaccataattgctttgaacccgacctgtcacttgtccatcgtcgtcgaaaactatttaattaccttacttaattttacctctattttgatcttccaaggaataatctctaattgactttaattccactaattagtattctccggccttagctagctagctgaccggcaggtttagcattttagctatcttaagctgcagcaggtagtagcatatatatgccatccgtcacacgtaaatgggtgcgtaggctaacggctcagctcagccgtgatcccgcggacgtttccggcgtttcggcgcggcgcgtgagggcgagcccgagacgtacgacgttgagacggcccggcgtgtcgcgagcgtttacaagtaaaacccgtagtaaatactccatccgtttttttagtggataacattattaacgttttaatactattttcatctaaaataagtgctgtcatgagaatccgtgttcaatgtttaaccgtccatcttattttaaaaaaattactctctccatctatttttgatagtcatatttttaaatctgaaaattttatttttgataggcatatttcaatccaacaacctatcatcttaatgattttctcgaatttaatgcatgactcttcattcttccacacatgattggctacatgggctttgagaaatgtaaatattaatgaatcgcttgtttacgaggaatgactagtagcatgcttaaatgaatgataagtagaactacttatccttggtctgtgtatcaagatgaaatataactatcaaaagtagatggagggagtataaaaaaattaaaaaaagtcacacataaagaactattcatattttatcatctgctaacaataaaaatacaaatcataaaaaaaattaataagacgaacggtcaaacgttggatataaatagtgtaaaactgcacttattttgggaaggagggagtacatgtttaactattcgtcttatttaaaatatttatataaatttataaaatatacatcatggttaaaatattttgtatgataaaacaactcacaataaaataaattataattacgtaaattttttaaataaaaaagtaattagatgtgtgaaaaaaaacggaggtagtaataggcgttcgatcgagtcgtcgttacggcgtgcgtgacggcgcgcgcctcagctcacctaaccccgggtcgccgtcgcgggccacccggccacacgcggtgcgcgcgtccgatccatctcctctccgtttctctcagctactctcgcctgtacacacactcgcgggtagggagccggagcgagttggctttgttgtgttgagccctttcctgggcctataaattcggcatcacgcccaacgcatcccctccccagaagaatcccagctaccaaatcgaacctaccaactcattcccgatcgatcgatcttaaaaaaaaactaatcgtaacttttctctctctctcctatctttagaactagcaggtagcaactgcttcgagtgtagtctggtgaacgtacgatctttcgttcgttcatcaag

SEQ ID NO: 5190 - DNA, 2000 bp, Oryza sativa
gtggtattatcagcgactgcggaattttcgttttcgctattcccaagtgggttcttccggtcggatgggcgggcgggtgacgcgccacatcacccacagcaagtataatagaagtactttgtagtgaggataattctatcatacacttatacgaagagtgtgagctcttatgtaaaactagcttaatacatgttacaagacaaatatattaaaattaaagctaatcttataattaatttattacatatatatgttggttttaaaatatgcaaatagctggtagtgagctcttaaacttgctctcagccgcgttcgtcagcaactttgtttattcctctattctcctgcgaacgacacccagactgttcctattgaacaacaagctgacatttttgaacgaacagatagacataacaggcacatgcacgtgcttaattttgtttgctgtgtacgagtagtatctatagcatggatctaccaagcacgagcacatgaggtgggggtgcgaggtgcagctcacctggcatgggtgccggattgcttttgaccataaaatgataacaagctgcatgtgatctgatctgtgttttttctttatgctttacttactccgtgttctgcgtggattttgctggtcagtacgttcgcgctagtatatacttatatcgacaatcagttggttaatctaataatctctcggactttgtatccaaccgtctgaattttggacccttgtcgcacacattgtatttgtatattcagagtaagcatcgggcacctctcaaccataagtacgcggatagagaatagagtagagtacaaaactgatgaccaggtacacgtgatacgctactcctaactaagctaatctagtggccggtgttgtgcctttaaccactttgcacgtcaaaatcacagagactccatcactgatcagctaaaactgcactcaaagaccacatcacagtctctgtctcctcgccctacggcgccggcgagcgagccaaaccgagcgccacgccatcgatcggttttcagaagtaactcggtcccaattactccccgtgagcaacacgaattaaccacgtgatgtttaacgcgcgattaagcaaaggaattagcctgctcattaacaacaacttggttctggagtccatcctctcggtctttagctggcgttaccgcttgtagggatttctcgagagtgtagcgtggctttgccttttcctgctgtttgtagttgtgtttagccgctgtagtttattttttagtttcaatttttgttttgctttttctcccttcttttgacmtaggccagtctaactgattgtgttgtgtaacaaaactatctttattctaatgtatcgacgtgtaattcttttacgtgaaaaattgctgattaatagcggattcgcgtgagacgtgcccggtggggggccacgtggaagcggacgtggacgctggacccggtcctggctgcttccgcgttgctgctgcacacgtccgcgtacacgcgggaaaacgaacgttaagcagttagctccaatcctcccaaccattttaaccgacttctccttccacgctagctagctcaaaccaccacacgaggcggcctctgatctctatatttgtttagaaatattaggagagaagcaaaaaaaaaaatcggaggaggaggagcttagagagagaagtcaaagactctctccttctcgtcaccttcttcctccccaagccgcgctctcctcccctcttaaaccactagcgccgcctccgsgctctctcctgcctcctctcctcgcctctcctcaccctgtgggttggtcggcgtgtagctgcttgctttgctctcactgccggggctcgatctgcttgctctgcaggtgattcttgcgttcttgttgtctgtgtgtgtggagttctttctttttcttttatttttctggtttggattggttggtggttggtttggttcctaatttgggggcgtttgagtgagg

SEQ ID NO: 5191 - DNA, 2000 bp, Oryza sativa
ttacaaaaaaaaagagacatggttgattttacttcagatttaaaaactagtgaaaattacacagaaattagtacttgtattatatatatcagttcatcctcatcctgcattcactcaaagatcttcattgattttacaagaaaaaaaaagtagacatgttgattttacttcagatgtcaaaactagtactagtgaaaattacacagaaatttgtactgctagtatatcagtactgcaaattgtactccaaggcagaagaatgccgccaataggaagagtggaattttttaattagtgggggtggtttcgagataacagtaggatcaagcatgtttaccgaggtggtaaaaaaagaagcattgtttgtgtggtgtgatgaaagagaaggcaagaaaaaataatactgtaataataaagaaagggaaaagaaaagggraaaaaaaaaagcaaagctttgcaattaatccatttggcacttgagcccttgtgtgggcttaagcacatggggttgggggcacatatatatatgcggctttccccctagccctccaaaacttgctctccakgccctccccgtctcactgacggtggtccccamcgccccasgctycccccccgtgggccccgttcgtcggcgaccgaccgctagctccggcgaaccccttcccgccgacgagatccggccgtctccggtgagctccccccccccamtctctctcctccccggcgcgcggcgcgttgtcccacgagaaacccgcgtaaacggtttcctctcttgsttccytgtggcccgtgsgccaaagcgcaggttttcttggarccgctcgtcgtggcyggggttgccccsgggggaattgargcggccggsgyttgcgcgggcgtttgcggccgggatttygccggcggcgcgcctcggtgaggtcaggatgtggctcaattctctcgtttggttgcgaaggtctttctgttctttttttctctctttttgtttggtgagtgcttgagctgaagtcgtggctcgtagatttagaggaaagttaattctgttttgttgtgagttagtggttggtgaattagttggggaaaacgtctgcattttttttctgtttggttcagagcgagaaaaattcgagatttttggagagctttgtgtcatggagagcagcaaccagatgtggccgtttcttttgcttgcggatgtttctttttttttgggtgagaatagagaggttttttkgcttgcattctgcaaatcttggggttatttyctgttttgctggattttcctttttgttaggatagataattagttgtcgtcttccgtgtgaattggtcaggtcagatagccaccttagaggttattttttycttgtgttgaatccaaatctagaactagcagatgatagtagtaatgtactagccggtgctttggtacaaagtctaattattcctctgttttagatgaaacttgatggtagaaatgttttggatataatttgtttcttgaggcaaatgcttttttggatcaagttggctaagaagcagaaaccagtttggatgcccaggctagcagaatcagccatgtaggcaaatatttttttgttggtatcaacaataaaaaatgattgcatatgattactaacggaagatttggaatcgttggtcttagtggtacaaaattttagttgtttacttgattctgaatacgccaaagctgggggaaatatatatttttccatcaaatcaactctgaagatttttttagtgaaataaatgtacctattaagacgaacatgcctagatgagtccattgtttaactctgtagtggtatctgagctaaaattatgtatattgtttgctctgttcttgatccagaaatttagtgcatttcaaatacgctgtgctcattttgctatttatctcaaaatattttccagatgtgatctgtgatctgtccaacctttgtgtactcgggctcattccacagttaacaaaaaag

SEQ ID NO: 5192 - DNA, 2000 bp, Oryza sativa
gtgaacttattccttaatccgagccctaaaaatggccataaagggagccggttagcccagttactccagtccaggcaagtgacggtggcaggatgtaagtggcccaacatacgtttctcgctgaatggccttatcctcctctaccaaaaagaaaaaaacttctgtacctaaatccggtatgttgatcatctaaaagaacgctttgatgatcccatgagagcaagtctaataggacagcccactactagctccaattcatctatagctaatcaaatagtcaattcatataatagttgcttgctatactattaatatakggyccywcatgtcakacacacagtgtatcttggagatctgtgctgcagctggctacagatctgtagcccgctgctcttctctctcatcgtttatctcattaaaatatgtttagagctggctaatagcttagcctgctattgtacctgctctgacagtgcaaatgtgatttttttttgggagaacagtgcaaatgtgatttggccggccagaaccgggacagaaccaagccaccaatttgtcagttccaaccgatcgatgatactcctatgtcgtacctcaaccgtaacctggacctgagaccacatgatcgtatcgcccacaatccaatagaaaatacacaacgctagtactccgtattacctaccgcctggcgcctggagcgcctgaacaatttcctacgcgtttcgccgcgcatgggagcagatcacgcgcgcggtgtgccggtgtgcgtccagttggcatccggccaccgtcttcaatccggtggttggggccggccggtcggccaggcgccccgggttgggttgccgctgcatgtccccgttagaacaagtataatagtaggctataagccggctaaatgctgatgtggaggagagaagagagaggagaaacgggctgtaaacttacagcaggctcggacacaagaaactctatgagagaggtaagtggaccctatattaattgtaaagagttatctattatatgggtagattgagagaagactataaaaaatcttatagccaacatatcggctatattattaaccttgatcttaggccggtggatgccctaacggctcttgccgttgccgcagtggccggaaatggaacgcagatgcgcgtcgcgttactcgctttccgcttgctgcgcgcagcgcgagaaaaaagcacacgaccagaattccacaaaaccgtgtcccactctcagtctccccaccttttgtcgtgtctccccatcttcacttgttttctcgccaaatcctacgtgagtcgctctctcgagcagtcgagcgcgcacagggcgccccgctgtcctccgcgcatcgccagcccacgcccccgcgaacctgacacgaacatgcgcctcgccactgcagcctgcactgtactacacccctcatcctcctcgatcaattcgtacacactctcccaaccacctccgtcaccctcacgcttaactcctaccccacgcccagcaaaaacatcgtctatggctgtgtttagttggggaaaaggaaatttttgggtgtcacatcagacgtttgaccggatgtcagaaggggttttcggacacgaatgaaaaaactaatttcagaactcgcctggaaaccgcgagacgaatcttttgagcctacttaagccgtcattagcacatgtgggttactgtagcacttatggctaatcatggcctaattagtctcaaaagattcgtctcgcgatttatagctaaactgtgcaattggtttttctttttgtccacatttaatgctccatgcatatgtccaaagattcgatgtgataggtgaaggggaaaatttttgagaactaaactggccctatataaaccctgcgaggcacgcaccgatcgatcactacaccttcactttctcttctcatcatctatatcacgatcgatcacaaagaggttaacagtaacacatggggttcggctcgagggag

SEQ ID NO: 5193 - DNA, 2000 bp, Oryza sativa
acgatgtgagtccactcctagtcctcctcttggtcaacggtcatcttagttacagtagaagcctagtagtactactccattttcatttccagatggacattgccaatgccactgctcttctgcagtgttgctcaaagaccatagttaattcttgctaatgagcagtaccgctacatcttaagctaaagaaagatgagaacttgcttaagagccttgagctaaaccgctgacattaactatataagccttgagctcccttgctattaggaatattgaaatcaacatgcaaattctagtggtctaatcaatacgagaacatagttgtttgtgccaaagtttgcaattgatgaactatgtacggttcagtagtttggttgcagtaaggaattttcgttcaggtgggggtctttcagccgaccatgaatgcatgatgataatggatgatacttagaaaaattcaaggcaaagttttcataattgcactgaacgagggtttctgatcggatggtccatgccaagtaatcttggacacgtcacttagaaaattgattactgcagacgatggtacaataattgatgaccactttctgcagacaatatgatggctgcagagtgcagatactaatagaaacatcaggaacagtatgaatcttggacatatgacatcttacatgtgcatgaaaatatgtaaatgcctctacagtgactggagataggcggctatcaccaactcatggatttagatatcgcaatgcctttagaaatccttgaaaagctaaacaaacctatgccatttttttgtcataacatatatttatggattatatattggatcatggtcaactttcgtttttgaagtgtttgttggattaggtaccgtgatagctgtacctagatccaaatagcatatgcatatccaccttgtctcctggaaataactgtgatctagaatttgatcgtatcttttcytaatttactacacctatagattaatagatagcatccttgtccagtctgtcagcaggttaggagtatagaagctgacttgacttccactatgatctacaacagggaaagaaagttggatagaacagctgataagttgagttactagcagtttttgagcttggtgctgcagtctagtcaaccgtccaactgtccatagtgatgtccgggattcagggcttcccacaataaacatatagtggaaataacatcctgtactctacaattggctgtataaaaatgaagttgttctttttcaagttatggcatcgacaactactcgtaactcatgaatggtacatgctagtctttattattaaaatgatcctacattcctactgtcaaatcatgcaagacatcacatagctagaaaattacacctgctgagttccattttgaaaatgacagtccttttactagccactttttgtttgattcttcaaaatgattgaatgcgtcttgtgctacttgtcctagacaacaccaaactgaatgcccacagacacaaagccaccaaccgctcgttcgtccctattagcgacctggtcttacaagcaaacaaaagaatagtttagcttggtcaccactcacctgtgtgctgtttaattaagcttttgtttatgtatcatgcatggcatatgcaatcgcttgatctacaactagttgatagaaataaaaaaattgaatgcttttcttttgtttatgaaaaaaaaaaacaagtaatagctgcctcgctgacaatcaaatggaggtcattgatactgcctgtattttctttcagttttaaagcatgagtagtaatataaattcactttctaattgattaattatagtaatataaattcactttccaattgattaattaatactcctgctattagggttttcacctgtcagcttatcttcttgatgagtgactgaaactgctcattctatttactaagtttatctgttgccttattttcttgctgttttgcagacatttgcctagcaaa

SEQ ID NO: 5194 - DNA, 2000 bp, Oryza sativa
attaaaatgggccgcccaaacactccacaaccaagaacgcacggcccatcaacccaactttcatggcgccatggccgctcgctgctgcagcagcgcccatccactcgtttcatcgacgaccgtatcccgccgacgtggacacctgttgttgttgcctaccagtggtcaatttcccaaactcaggtgagccccccaattaacgatcgttgcgtaggagtacaacataagcgcctatgccgtccgaagccaagacgcagacttgcagaggccagagggaatgaaaggatcaccatcaacgagcgactcttcctcctgcaatctgcaccatcaagattgcctctgttcagcgttttttctcacgctttttcttcgtcttttcgtgcgcacttttctgacttattttcttttccgtggcggcgaggcctcacgaacgcgatgagatgctcgatcggtagacaggagggagggcaggcgggggaggcgacagcgtgttcctgcccttcgccgcacaacgcccacaggcgccgtaactgtacacggtatggacatggcacgctcgatccttgtaatttgtactctactaccgtgtggcgttggactgttctcgctgtcaggtgtcaggcccgaccgcccaactttgagaggacctactccccactcgtagtatttgtaccgtttcataaggctatttacaatgctcataggtgacgttcagcctcaaccatctacgtcgaaaattcggcgccatgtacatatctgccattcccaactgaagatcacggagcctaaacgaagcaacccgttcttcgtcagaactggcaagcgtggggcaagacgcggggcgcattgagagggggcatggccctgtgcaacgccaccatactcgtgcaacggtcacggcggcagcacagggagaagaaggaaagatggcaactgcggtggcctagggcggagaagggaagatgccggcggcggaggaagagaaggcggcggatctagcacctaacctcatcgtcgtcaccgttccgccccgcctctgaacgcaatagtgacagatcgacggagarggccgccccgaaccctgcaagcgcaaccgccgagctcccccggggccatccgccaatcgaaggaggaggagaggtggagccccgccgccgccgtcgccgcttggactgcacctctgccgctcgggccgccaatcagaggaggagaaggagaagcggcgccgcgcttgggccgcgccggcgccgagctccgttgcgccgttcgtcgcgggcgtgccacggagctccccccgcgccatccaccagtcaaagcaggaggagaggtggagccctgccggcgctgttgccgcttggattgtgccggttgccactcaggccgccgattgaagaaggaggagaggtggcgccgctcttgggccacgccgccaccgcttgggccgtgcctccgccgctctgctcggctccgtcggcaggagacacttggtgccgccactcgctttctctccgctaggcaaaattgctgagagaggagagagatggagaggaaaaatgaaggagagatagagacgggacccaccgaaaataatctgcattgtggagcatgtgacatatatagttcttaatccacgtgacttgtgaggttcggtaaaaattggtggcacattgctattgccctaagaaatatttgcccttgcagccgttggatccaaatcgaccggcaaccagggccccatcgccttctcgctgacatgaacgtctgtgagccaacgagaaatcacagtcgaatttccccgcttcgtcgtccccagatgcacacgcgttccacggtaagccaccgggcgactcgacgactcgacgtctctttaagtagtagtactacgaccgagccgcggggtctctcgattacactcccccgtcacactctcccgctccatccctgtccacgaaagcgcgcgcgggtaagatacgaggccgggagggaagaacgaccacggc

SEQ ID NO: 5195 - DNA, 2000 bp, Oryza sativa
gttttaaaagctatgtgcatttttaataaatgaaactgcattgtatattattaatacactaaaaaatcatcaacactgcttaactcgatgtccatcacttatttccacatctatgtataaatagcctaaacataccacttctatcggataatatgatagcaccgttaaaaatagacataaatgtctctctaacggatgaagtcgataactacaaaagctttcttatgtaatgccctgaaacatgggtcctacattgatatagaagtgcacctaaagaccatcctatggcaccattttaacacttagttcactataggtacacccacaaaggattacattagtaagaatgtcactttagatacattgtctacattggtcttttactgacaccatcttaactcaaccatatgcatatgtctgcgatatttacgatggcatagtaaacactacaccctgcattgaaggacagggatggacaaaaagaggaggtgatgaaaataattataatttttgcctcctacttatttctgtgtggtattatttttaacaaaatcgtagttcaaaggctattgacaacaataagtgctggcgtttatgatttttcttattagtatttctttctgattttactattaatatattgatattttttttgatttatcgttttgtccatagtatatgacgtactatatgacctaggtaattaagttttggtttttttttggaaagtgagacgataaatataggcagattggttttccatctaataagtgagaaagaaaaaaaaaagaatgatgtgggcccagcgttttacgtacatatcaaagtatggacgtacttgtttttttatacctataagtgcacatacaatgcgagtttttgagataaatttaattgtattttttttataatagatctaatggttataaatatgggtccactgcattctaaaattttttaaagcgccacataacgacttaggagtgtttttagaggtgctatgtggcggcttaggagcgattattggaagtttaatggacttttagtagataatagataatagatagattgaagattaggaaagggaagaggattatgtggggagagagggagtacgtacgttacgtaggaggtggggaccggtgtggagaggaggattttattttttttatttgatctaatggttgaaaatattggacacaccaatttaaaggaaaatcaacggttagatttttagactgccacttggcatctttggagcgtttgtaggaggacacgtggcggcttaggagcgcttataggaagtttaatggacttttagtatataatagaagatagatgtggataatcttagaaagtcttataacctacattataagactacatttatatgaatgtagtctgaaagggaggtagtacattatagcattcggtatatacaagaacaaagattatgggtcctattttactgctactgccttaaacattgaggatgtcctaaacctacagcctacagcctctaataggctatccgtgacgagatccgacatagattggccgttaaggctgggcccatctagaaaagtgtgctaggagtaggagtagtaatagactagtagtacgtacgtactcttaccatgcatgcagagctagctaattactccaacaacaacaacaacattatgttatttctggcaattaacgcttgaccccctgtgtcgccggccggcgcgaggtcgcactccggctgatcgaataatttgccgacgaaatcgaccacgctgcatgaggtctccacctcaccacaagtcgctccacatcgacctcgccggtaaaacgttgagctcgcacgtacacgacgcgcatcgtcgacgatgacaccacgcgtgatgcgagtccctcaccaatcactcgcctccactatataaaccccatggcctcctcgctgcagctcacagcctcctcgatctcctctacagcagctcactcactgctcaaca

SEQ ID NO: 5196 - DNA, 2000 bp, Oryza sativa
agggtgaacggatcgacttggtagttggttggtacgtcaaatttactttctacttttctcgaaggcacaactcgatcagtacactgcatgctttgcactttgtgtgttagtttagtaaattattgatgaaataagaaagaacaagtagatgcgctataccacctaagaatgtcaattaattcaattcaatggtctatggatactccgtatcattgattaattcattattatttatgcatatcaaccactgtaaataatatagcgtgatctagctagactggcggtgaatatatccacctatgaaaattttcattgaggcttgatcgattctatctgttattaaaaaagaagagttgatccaattatgcagatcgagtactttcgatcctgtcgcggattatttgcttgatgattcttaaaaatatgttttctaataatataaaattaatcttctaacgcattgattatactactttgtatataagctctttgtttaatttattatataaaatatttaatttaccactataattaaacagatcatccatcagctttcatctccacgaattatcaaaaagagcaatacctagttgcaaacctagctctctaccatatatggcccttatttatctgggaaaatatgtagtggraaccacatatgtagtggaamcttaagaaactaccrttggatccggtaaatggacgttccaagattcgtccacgtcaccatgcgttaaaatttaactcccaataaaattttaattcatgagtgaatccgcgagttaaattttaactcatggtgacgtggacgaatcttggacgttcatttctcgatccaacggtagtttccaagtttccactacatatgtggtttgcactatatattttccgtatttatctgtctaagcaatatcgatcgtcgttgttctatcccacggccaagatcgatcgaatgtgttcatcagcttctatcctaaataattactccctctgtactataatataagaagctttaaagttgaacacagttattaagaaagtagatagaagtgaatggtggaatgttgtgattggatgagcagtgaaggtaagtggaaaaggtgaatggtggaggattatgattagttgggaaaagaatgttgatagagaaattatattttacgacggagggagtaagaatttaagaaagatatactgatcaatataatcaccattaagaagccggcagtcacattaaaccatgtagtgatattattaattaatcttctgcaagatgactcagtaaactttggcggcacgtctctcccgggacgtggctgaacgggcctgggagcatgtcttgtcatgtctaaatttcaaccgtaacaacaacatactgtagttaataaagccaacagacatgaataaattaaattaaaactctactcaacaacttttaccaaacacgcaccgtactaccaggcactgttaatctacgtcattgcatatattaatttttgccattcaattggccgtaccacgggcaaataatctatataaatgacgagatatgcatttatttcaaatgaaaagaattgtcaaaaaaaaattaggatatacacacacatgcatccaatgctgatatatttcgatatggacatggttgctagagagaagagaagtcaaagcaagtgacttggaccaagcaaccatgaaacttcatgactccatcctcttgcagctttcacaaaccaacagacagcttagtttagctcactatacacatccatcagagccatataaatatacatggctccatggccatctcctctcaacaacttcatcgatctcccctatatctttacagggatattaattccaagaacaacacaagaacaattttcgttctctagctcctagattgtttgagaagaggaggcgatcgatcgaatcgacgattcgatcgaacggccggcgaacactgatcatcaaagataaaattaatggtgccatctgcagag

SEQ ID NO: 5197 - DNA, 2000 bp, Oryza sativa
acccattgttcaaagcttgtgatagcaacatttcgtccaatctgacagatgaaaatgactaggattcttcatttctttgttaggttacccattgcttgacggctcatagaaacagagtatttgtatttgaaagttggacttacataggacaaaaacatgcagtataattaattttagatagaggagtttatgaaaaaaaatataaaacgaataagctgtaaaaaaacagtttagagaaaatatttaccatgtaaatttttttctctggaggttagagagtcatgaaagggtcaatttgtggccccatacacatgattttaaccaaaattaactccaccaaggcaccaacagccaccaagaaaaaccctcaaatcctccttttgaacgaactctttaattaaagtggccttttgtgagcacccttgaaaaattcttttcatcagttcgtcttacaaatctacagctgttgactgaaatatatttctcgaatttatcctttcttcaggccgaatatgatgaacccgactctcaagtacttttcaaaagctggaaatgttcaaagttcgtcattcctttttcattagtacatcttgaaagattgattcgttctccgtattataaatcctcgaattgctaattaatccacagcatcactgtctacactgtgacctaaatcctatggctgtacagttgcttggtatgaacggtatgagattcttggctctagctaagtagttactagtagttagtcgtgcaacctagctacaaaaagatggtaactgtccaacctaatcagaagcttcttcgattataataagcacttatgcccatttaatttaagtttttattttgatatgcattgttgcagtatttgataaaggatcacgaggtgtcgaaattttagtgctaatttccacaacgcgagaaattcgagttgtctttagcagattgaattgagagttatttgaatcaataattttgtaaacacttcatacatcaagaaattattcttttatttgctaaaatgtactccatccattctaaaatataagacatagttaaacttgacatgatgtcttcaaaactactatttgactttcagtttctcacataatataatgttcgtagcaacaaattaaatcataactataaaaagctagtacattcaaatatcaatccaataacattgtttttatttatcaaataaattaaatttatatttgactaattgtttttcaaatattatgagagttgaatcttaaaatgcattgacatcttataagttgcactaagggagtaatttgggttgcatgtctcagttggaagaaatgagtagcacacctctaccaagtcaatcaatattatctgcctttgacttggtagaatgtcaatttcccatatatgtgcattgcctctgaataaactgagactctaattaaggtgttcaacggcctcccacaactctgaaaaccacgtgctacatatatattcaggcctaccactagtatatataacaatgtgataattttacttcgaaataaattaatccttcctgtatttaatttgctgtggcgagatcgaaataaagtatcgtcgtcactgaagaaaaatctcctgattcgacatataattgagttgagcaagtcatcagaggtacgacgatttatctgcagagacccatagggagagagagggttcaactcgattgacttagactcagcttgctcagacaaaaatttccagcatcttattattatcccaggctatagctttgtctagtataattaatcatcaaatgtgttctaatatggtcaaatatagcacattaatttattaatacagcagccatggccatacttctccatcaccatatgtaagcaactatgtatagctaacactaaacctcatacactatatataactagctgtatataggatcaaacaagttattatagctctgtccaattaagctagctagctagctactacaagattaagcc

SEQ ID NO: 5198 - DNA, 2000 bp, Oryza sativa
atctctggatggacgagaccatgaagtgccatcaaatgtggttaagtcagaagtgctcctctctctctctctcgacattatctctcaccttcagccctttctctccctcaacagtatctctcacctctagccgagcagattggttgttctgttctaaatggacgagactataaagtgccatcaagtgcggttaagtcataagcacttctctctctcccaacgttatctctcacctccagccgaggcagaggattgctgattcttttcggttccatatctggttctccttcgaaggaactcggttttttggtttttgtgcagctctggctttccttggttatgggtacttgcgcgcacgggtactcaagagaagcaggcctttagaactccgtcagcttaagtacctgcacggtaggcgtgcgatcaagtcgcgcttcttcagcacgactactctgctacgtctccactgcttcctccgcgtcaattttttttggcatcaccatgtttagggagaatggcaggaatggtgacaccaacatcaaccccaacaccaataccgcctctagatctgaagcgttctccgagtatgttattttaatatttttagtgttaaatatgttactagatgatgctattactgttgttagcattttcatgtttagcactatcactagatcatatttttattcacatgtcatatttagtatattgtattttattaaaatataccgaattatgattatatttccaaccgtatatcgagaatgcacaatcttttattttttttattatatggaagatgcacatgcactgttgtcactatgcacacgttgcactacaccaccaccttcatgagtgcaccttcaagagatagagtttctcatgattaatctatgaatagtattacatttttgttgaaaacacattcgaacatgtataataagctatattaagatttgaattctcatggttggaacactgtattttttwatttgtattaaataaggttatatatttctcatataaacttacacagagtgatatcgatatatttcaaaatgaaaggagtgctttggtgaaatggactaggggaaatttttatcatatttaatttgctaaggttctatgtgactaattggtatttttatctctacatatccatggatctggatttgcaattacgttgataatatttagataaaatattttagatgtatacaaactttaaatttactgtagatctgaggtatgaagtcatgaggattacttgtgactttttgcacagtactctctccgtgtcattttgatttttatctagtcaaacctttttaagtttaactatatttttttataatatgtttatgtttattttgagttggaaatgctactatatttttttataaatttgaaaaaaaattaaaatagtttgaatatgaaaaatatcaaaatgacagagtgagtaggatagatggtacatgaaacaagtttgattataaaaaaaaaaatcaaaactgattatagtatgaaacgaagggagtaggataagatgatttgaggtttgaacctttgaggttgatgttgactccggttagagtttaggggccaawtagagtaattttaaaaakagcacaaatgagaggggggcggttccattacgcccgcggtggccttgaaccgtccatagcgcgatctgcggtccaggatcatatcgcgcgtgcgtgaccgcgtgaatgaaaatgcgtaatataccgtttatgtaggtacctatttgcaaaaagaaaaataaaatcaccccacgatccgaagcttccccctgttccctctccctcctccgtttccttcccctcgaagcagcgagcagcgagcagcagcaaagccgcggcatcggcggcgatcccccaaccgaatcacccccacctccggcgatcgccggcctccgccgcaggcatccatccatccatccatctccgcgtccggtccacccagcccccccctggccg

SEQ ID NO: 5199 - DNA, 2000 bp, Oryza sativa
gtgtggtcttgttttgaagatttaattgcaacgaatttaatggtgcaatcggatcatgatttggataagtaatttaagagaaaaaacagtttaaaatagttttgcacgtgagtcgagcgctgacgttatgctgatatcagcgtccgattttaacctcctaccattgaacgcccgaaccagagagtccctttaagtcagaaccttctattcccatcgagatgtcaacattttttgctacgaaataagtgtacaaaccgaagctatgctgcacttaattttgttcattaacattactctccttttatttttttcaaaacttgttccggattcgtctgagattttgagtaacttaatccaatacatcctccggtctaaggccatgtttagatctaggagtgtaaatttttaatcacatcgggtattatgtaggatgtcgtatagggtgttcaggcactaataaaaaactaattaaagaatccatcagtaaacagcgagacaaatttattaagcctaattaatccataattagcaaatgtttactatagcaccatattgtcaaatcatggagcaattaagcttaaaatattcgtcttgtaaattaggactggtttagttcccaactttttattcaaacttccaacttttccatcacatcaaaactttcatacacatataaacttccaacttttctgtcacatcgttccaatttcaatcaaactttcaattttagcgtgaactaaacacactcttagtcgcaatctgtgcaattagttttttagatatatttaatacttcatgcaggtgttcaaacgttcgatgtgacagggtgtaaaatttctgtgtgggaactaaacagggcctagctactagaaggagctcctctgacttcatgtgccattgataggtggggcccactcgcatacaactctctaactttaactaactttataaaaataaattaacacctactataccaaataaatacactaacaaaaagagaaactaatttgatgtggtatgtgttagtttatttttcatcaaaatttaggccccgtttgattcagcttaggattattataatctggattattacgagtaagctgaaacaaacagatagcttattatgatagattattataatctataagtcagataactataatctggtaagctattctaaaggtgctttttttagattattgggtagctaacaactaacaaacagataataatctagagaaataaactagtagcttattatatgtcggtttattataatccagcttatagtaatctagttatataatctagattataataatcttaaactgaaacaaacagggccttagagagctttgacttaaaagacaactaaaacacttcgatgatcgaaaccttgaattaaatatatatgttctaaacagacatatattagaaggtatataatgcacattaataaataaataaaacttgaataacccatatatatatttttaaaaaattaacatattactgtcaactgatgacttggctgtattagaaggtatgagttgggaaccataccctgatattcaaaatgataggatgaatcagcgtataattaattaaatattatattaaaaaactctaaaaatgatcatatagatttttaaagtaatttatctataaaatattttaaaacacaccgaaatgtaggcacgaaaaaacagaaatgagttggaaacatgagaacacacccgagtggactctgaccagcaatatccactcccataaaaaacgaaaagaaaaaaaaataatgacaggaagaggtggcccaattgcaatgggcttccatgggctcctcaagcccaacacgcaatcaccaccatcggtcacgcgtgacgcaaaccccacagcccccctcccctctatataagcctctgcgccgcgctcctccgaaccctagccgcamatccccgsctcttcccgccgccgtccgccgcgcgcacgccgccgccgcc

SEQ ID NO: 5200 - DNA, 2000 bp, Oryza sativa
ggttattcgttagtgtgtcatgtcagtgttttgccacctcgtagagttcggtttagtgttgatggcatggcaccattgtttagttcgttagcttgatgagtaaactgagtgaacttgtgtgatcagttggggactaacagagcagcaattttgaacaaaatctcagcttgaaacaagttccaagtttattactacaaaatatagcaagcccacgtgtatggaaatttcgaagtgtttaattgttccaattgtttgatgatgaccctaaacatagcttaatatgtatgtatactaattgcctacgaacattactcattttccatcaaagcttgaaaccctttttttttaattctgatttcttactaatttagttataagaacatagtgtaagatctgtttaaacctataattaattgaaaatatgatatccgttcttaaacgcattactggactcaccttttatgttaaagcagctacttaacttatatggctactatatgagctactacttaacatcaattttcttctatggttacatcttattaccaatgtcatgttggcctgaatattttggctttttgtcaggttgggcttcccaaatagcctgtctattgctgcactaggctcttccaatttttgcaaatggcaactcccgagcccattgctcggcttatttcccatgtcattctggatttagatggtaccctcttaaacacaggtgattaaaatgttgcaaaatttgcttgcgtttatcattaacctttgcttcgttcagttatctcaaagtcatattttcttatcttgttttaatcatttgacagattgtgttgtaagtcaagtgctgaaaccgtttctagtcaaaaatgggaaaaagtgggatagcaagaaagctcacaaattagttggaaagacaccttatgaagcagcagctgttgttttagaagattatggactcccttactcaacagaagaatttctctcaatgcttactccaaatgttcaatgaacagtactgttgctgaaacttcttagcactcatataacctgcattttgtaaattgcatactgccatgctatctcarkggagaatcttcgtacatttctctattatggttgcattcactttgttttttttttataaaggaagcttttattaatctcagacgattacatcaagttgatagaaccatactaagaaaactcccggcctctgcataactaggatgtacacagccaaaacacataaacccacaaaagagtttgtaacaagagaaggaaagcagtaaaaatcagggagcaccaatcttcaggctagaccgccacccatgtccctaggtaaaacattccctgaccacctgctccaagcgctgacacgccgctgcaaccaaatcccgtgaaccaggcttctgaaggatagcccagatacgaaggaagtggatagttaaaaaaataacctgtaaaggagaagagatttttcttttgtcaaacaccatatcattcctacaaagccataatgaccaacaaatagtggctgcctctaacaggataagtgacttcaagtctttcttaattccccgtagccaattaccaaacatattggatacaccacgtggcgggaaaagtcctgtagccacttgtataatgcaccacacaaaacgggcaaatctgcactcataaaacaaatgtaatattgtctcatctttgtgacaaaagcaacaattcttacttccttgccaattgcgcttagctaggttatcccttgtcaaaactaccccacgacgtaaatatcataggaagatcttcactttaagcggtatttttaatttcaaattactttgtttatgttgggcaaatctgaatgtaccaaggcaagataatgcgacttcacttaaaactctccattttgggttaaattccaatgaaacttatcttgatcctgagtaagaactaggttagcgattcgtggaagaaggttattccacgccactaattttggccca

SEQ ID NO: 5201 - DNA, 2000 bp, Oryza sativa
gcaattccctcttttgtgctgtgcgcattagcaagttagcattaagcaatggcgcactctcgccatgacatgccaccacatgtaatgtccatgtactgatgcagagttaacactctagtggcttagctagtgcttcacttgctcgcagttaagtgggagattaggtcctctttcagcttaagactttgctcgaaatgaaaggaaaagatacagaaagaaaaaatggaatgccgtactaagcacttgacctctcctgatctctgacggcgatgggtgaaagaaaatctctatctcttcaactcagcttagcatggtgcttagctagcagccgtagctttacacggaggatgccgttaatttcgccatggacctgccgcccatgcacatgcgggagactcaacgagacgacaactgaagacgacctgtgcagggcaaatctccaagcttctgacttgtggattacactcgctgcacttctccctttccgaaagattcgcttaaacagttttcggatcaccatttttgtccgaatcattgagttcttttttaagttaaaaaaagttaaatcactgggttgatgtaagtaaatgagaggcccctgttctaagcaggtttcagagagcacggcactcgtacatttggcgaccatggataagttccaggtcctgaagcaacgcaagtgttcctttcgctgcactgtctgtgaacaaagcatacctggcctatgtgtgcatgcaaacaaagttatttagagatcgtgtcacgcataagaatcgtttgtttctggaaatttgtcctctccgaaaacaaaagaacacattacttcgatgtttgaacagacgccatgtttagaacaaggcttgttgattatagtagctactactaatctgccgttctgctttaaagaagagaataaagattataataaaggagtaaagaaagagagatggcgaagcggaaggcttaagaaacgccaaaaaagcctttgaaaaacttggaggagaaaacttgaccgttgcagcgtgggctcctccgcgaaattaaaaagaaccggctaaaattaaaatgcaggcattacattacgcagactcaaggcaggacacgagaaaagctgcaagagtttatccgattattatccacaaggcagaagccaaaacaatctgttaattctcctcctcgttcttccttcaaaatttctttctcctactcagcattgcgtcgtcgatgaamccctttttycctttctcagtttctttcctgagacttttctatacctgcaaagtgcaacaaagtggtcgaacccccacggtttgtcttagttttttctcaacgaaaaagcggcgactgcacgtgtcctccatggccgcggcgctgggttggttttaccgggttccgggctctgccgggtgcacgaagccatcggtatcagcatcaacctctcctctcctagcctcggatcctctcatcctcctcgcgcactagagaagctagagcttcacccactcgtgcttctctcctcgcctcgcctccctcatctcgatcttccaatggcgacgtgacgaggtggttgccctgcgctgcgcttctgaccaccacgtgcatttccatttcccgctgcatccgatccgtttgttgttgttgccgtggcgtgccttgtgaatttgctgctccgagcgagagcgarccggtggtttggttggttgcagaagcttkggcttccgctgargctkcsctggtgtggccggtggctcacgggtttcaggccgcgcgcgcgctcgcgcggtgttttttttttttttttttttttttttttgcgctcacaaggaaagtgcagacgcgcagtgtaaaacgtcgtggcaaccccaaccgtcccaatggcgacgccgcccactgcttcccgcgcgtcgccataaaatctcgtacgcgtacgtgcgcgcgctcgtgtgcgtctctccttctcctctactctctcttcacgcgggctggctggctggctgttg

SEQ ID NO: 5202 - DNA, 2000 bp, Oryza sativa
ccgtgagaagcgcgcgcgccaagcctcgccgcgccggcgccggatcggatcaagtccacgcgacgcgcgccccggcggcgcaaggcgcgggaacgggtcaacgtagtacgtgcaaaggttgcaccactattcggtttgatgttttctccagctgttttcgtgtacgattgaatttgtcggggtgcacacgcgcgcccgtgtggccgtgtgcgctgtgcgtgcgtgtgtgcgcgcctcgcgcgcgcgtgtggctctggaaagcgtgtgctgcagcctttcgcgcgcacgaatctcaatgtaaaaaaggttcccaacggaagcagtttccgaagtactcatgggccctctcgtatctggcacttactgtagcccgtgcaactgatgggcccgttctactaggccgacgactggatccatcaaacttttgtcgcgtaggcgaacgttaaaaaaaaggagaaagtctaatattaatccctcaatgtaggtctgatcatgttcgtatctcttaatagcaaaaggaatacatactagcatatcgactattaaaacaagtgtaaaatgactccctcaaaagttttgaaggcgaattccattgacgtggttcgttgacctaatcaaaccaacgtcaaacatctgatggtatgccacatggtttgctgatgagagatacgaattaaattagacctatatttcagtgagtcaaattaaatttattttatctacaaaagtagatatgaataagagtcagctcaagcaccagagagaacatcttggcccattaaacccctaaaaaataaagagtttgtgcttgtttggttctctaccgtaccaatttattggtagtgccaaagtctaggcaaactttggcactaccaaaatattggtagggtaaaattatttggctaccatttggattgctaccgatataaagtcaaattcttatagtatagtgaagaaatttctagaaaatgaccaaatagtataagggtactaccaaatatttggcttcaatccaaaataacacgcatactattcaatttgccaataaattggtagggtatgtttttggtatcaaatcaaaacggccctttatttcctccgaggaaaaaatgccttttattttacggaaagaaaaccctgcagagccgttcgactcttttgtgaattcacgggctcacagtatgttggttgagtagcgtatgtactgcacagtacatttacatgtgctgcctttgattttttgctgttaccatggcgtgcatcttgagtgaaacatactttacttagaacggagcagattacccgggcgccatgccgtcaatcacacgccatacagatcaaacatcacaagcatcgatcctaggacaagctaaacggaaccccagagctgctaatttttttctttccttttgtgttgtttccctttcagtttcatcttttgcttctagatctaacccaacaacgtcttctgatctcggtggtaggtgatccatttggagctcaaggaagcaacaagtagaatagatagacaacaataatttttttttaaaaaaaggcttgtaagagacactagaaaacgatgagaaaagcacatggatccaatccattccgttccattccactaggattctttgctgtccagcttgcattctatttcccttccattgcatgccagccttttcttttcttttcctctcccaaatggcaactcaactcaagcatcgtccgccacgtgtcgcgtggcccaccgtggccctcatgggcccacgcaccaaccgaccaaccagctcccccctctcatcactggcgggagattggtggggcccacctgtcggttagattatgggccgtaccggccgtcacttgttgctcgcgacgcgcaaccgcccgtggcccacctyaagcgsgsatytcccgsctccctttagttccgccgccccgttggccacagcgcagcgcagctcgcgccacagraaaactccaccaccaccagccacgcc

SEQ ID NO: 5203 - DNA, 2000 bp, Oryza sativa
cggatgattggatcgaggtttgaactctaaaagcaaggaactaaggaagtttttgccacctcgcaaaataactgtagaaagtatgacaattgttgaagattgtagaatacttgagttgagaacttcttttaataatggataaaaatccagcctctattccataaatggatatatatacaaccaaaagttacacgagtgcatacactccacatctcataaccgatacatagaaaaacaaacaaccgaaaataaaatattagaagactaacttcaagttttcctcatcgcttcaaacattgttagctagcccgccttttccatctccatgccaaaagctccttcactctgccatgagcaaaggaaggggataaaactagtccacacaaccgtcttatcaccgccaagcacttgcctcatgctggacggacaatctatgtctcctcaacatgaacatgtccatcgctgccatgtcatcgttgttgtagagtaccacctctgccaagctgtccgcggcttatctcaccaaaagtagttgccacttcgcacgaaaacaatatttgtttggataaatgctctagttttggttctgttcactgttctcttgttgcaacacgggttcaatctatctttttgcgcatttatttccgcggggaagggggatagaaacaaaactttgaactaaaataagttaaaactttgaactgtttctttttacatttcaatatagtttttaattaaaaatgattttttgccaaaataatatccccatctgagggacccataaacccactattataggaatttcagaaattctgttctgaaatattgaaccccggttgcaaaagttagatgtatgccaccatgtgatatgatcctttctcattgtattatttgttttctcctcctatagggaaatttctagtaaactgtgatgtatggtattctaatctagtgaaggtatatgtggggtatcatgttttctttttaaataacccgcacaagaatgtttcacactaatatagcagaaaaaaatcataagactataaccctaagaagctatgtcagaaaaaaaaatgtcaagccacacgcctacactaaaaaccccgttgttaagaagtaaaaaaaaatacaacatatagtacgctagactctatctatggctttgggttggagagagaaatggtgggagagaagatgaaaccgctctcgctctgtccagcccaacaacctggggtgtcatgcgacttctgctgtgttgtggtttccactcttcacaagaatcaattctctgctcaagttatatgtcaggtttgtccttagctagaagagactaaaagaccagttatctgggtccaggcaaattacatgcctagctagacacgaccgatcctttttatttttactatcatgagaaggaatagctagaatctggaattaatggaggcagtttgttccgaactggtcaccagatgcaaggcagcatagccaatcatacccgaatataaaaaagttcactcaaatattgccgcccgggcgcccaccgatgcatgtggcctgctttgtgtccgtgtccatgaccgtgccaccacccgagcccataaatagcaataggtcaatttgctcctcctccccacacctgcagcgctgccccttcctctcagtggagaggagagcgaaacgagacgagacgagaattcctctctcctcctgtgtgcatccgtccatccacgcgttcccgagaatcgcatcgcgatcgggggcatacatttgatgcttacacgagaggaattctaagctctcgctcgctcgctcgcaacctctcgtgcgatcgtcgtcgcgtgccagtgtcacctcgccttcaagagattctcccctccaagacgcgcccggccagacgccaggagtcgtggtcgccgagactacggctttaaagccagcgaggcgaggaggagttcccccaaacacttcagtagctgctactgtagccagcagcggcggcc

SEQ ID NO: 5204 - DNA, 258 bp, Oryza sativa
aaacttatacttcttttttctctgtagaatttgcaaactacttttccagaccagctaactttgcytgggctctatggatcgactatggatcctgcagcattgatcactttgtcacgagtcatgacacctccgtttatgctccaacactataaatacgtcgggtagctcaccctttcacctgcaactctgcaatagctagcttgcaacctcgcattctcgcttcaggacctttgctctctgacaaacctaagctcgatc

SEQ ID NO: 5205 - DNA, 2000 bp, Oryza sativa
tagttggggaaaatttttgggtttggttgtcacatcagatataccgacacacatttaaagtattaaacgtagtctaataacagaacaaattatagattccgccagaaaaatgcgagacgaatttattaagcctaaataatccattattagcaaaagtttaatgtagcaccacattgtcaaatcatggcacaattaggcttaaaagattcgtctcgcaatttacacgcaatctgtgtaattggttttttttcttacatttaatactccatgcatgtgtacaaacattcgatgtggcagcgtgtttttgttctgggaactaaacagagcctatatatgcagatttactactggagaagtgatttttgctaggtcggctgatagactaaaaattgtttttaagtcccggttaaaatttttttgatctttagtcccggttggtgttaccaaccgagtaaagattatttagatctttaatcccggttggtattatcaaacgggagtaaaaatccatctttaaatatttctctcccatctccgatcgattaagtcccagacgagactttcctcctcaccgagatatttaaataagatcggatcataccctctcctcctaccccttagatccccttcctcctcccctcccctctcttcctccccttcctcctcccctcccctcttctccccctcctcccctcccatccggcggacaacggcgacaagctggcggccagcgggcggtggggccacgcacggcggtgcccggcggggccacgcatggggctgcaggcggcaggcggcagccgtggcgagtggcggcaggcggcggccgtggcaggcggcggcagctggcggaagggaaggcccgcatgcataggccgggcgccctctcctctaccggtgtcccttttttttatataatttgtgattcattgatatgtataatttctttttttttaaaatttgtgattcattacatggatctgatatgtataatctgtgatgtatttgatttgtgtgtatttttttaggatttgtgatgtatttgatttgtgtgtataagtaacttaggatttgtgatgtgaataatttgggatgttactttgatttgaggatatgcgtggcactcgatttgggagaaaatataaggattaactctagcaagtagcaaagaaacaataaaaaaaaaargaaaaggggaccaaccggaactgtcactactctctctttagtcccggttggtgtaaagattcaactttactcctggttatttcacccgggattaaagatgggtatctttagtcccggatttatagcctcggttaaaaaaccgagactacagggggtcccaaccggaattacaaacggtttctccggtagtgattgttcatcaatgattgctgacacataattgacaactttggaattatattaggggcatgctgcccccatggacgaacgagcaagactaagacgttatcggtcagtaatgtccacacacgaggtatatcaagtgaaaaccatcgaataaataaaaactcatcaaaattagatttaaagttctcaatcttctaaagaaaattcctagagatacgtataggcatgaaatcttgagcccaattaaccttcatttgaagaaaaaaggtattattcatcttaaaacagtttggctttgaccaaagttaaaatgtcttataacctaaaacggagggagtattacacagcaaccaagtactacaaacaagcagaaaatttcgtgctcaaggaatctcccatatcagcatgtttccaaacataacagaaatttaatttacaccctacttaattttattacccctcacaaaacatgaataaccaatgcagctaatctgggcacacctatatataaagaaagaaagcatggcctccccatagtgtagcatagctcacttccaagagcctcgtgacacacaccactcactatactggcccctcctcctcctcggagatcgagccggccagcc

SEQ ID NO: 5206 - DNA, 2000 bp, Oryza sativa
atatatcatgtcagttttttaaatatatatataataactatttgaatactacctctgtctcaaaaagtagttttgcactacttatataccacatttgaccgtccgttttatttgaaaaaaatatgattcgtatttttgttgttattagataataaaacatgcatagtactttatgtgtgactaatttcttttaaattttttatattttttagataagacgggcggtcaaacgttgaacacagaaatccacaactacaattaatatgggacggaggtagtaccatatacttcctccgtccaaaaaaaataatctagtattagtattagatgtgatatttttaagtacaacgaatttagacaaaagtctgtctagattcattgttgtattagaaaatgtccaatccaactaatttaacttatacaagttgatacaaaaataacatatttaactttgtatttaatgtgaattttcacattcaaaattattattttgtttatacactatgaatttaatgtggattttcacattcaaatttattattttggtttctaattgtatagatggaatttgaacttgctcgtgtatagtcagtcatatatcacatatgaatctatcttattaatttttttaaaaaaaataatgactttttaatcgacatgcacaaaacgagtaatgtctcatatgaaaaaaaaatccagcaccatctacacgtaaccctcaatcctcccaatacaatataacgaagccaatcccaacaaggcgacatggggcatgtaacggccggggctacaaaccgtgtaaaaaatgaagggattatcttaaaaaaaactgctgcaagttaatggctccgaatagtttttttttgtcttttttgttttcgttggatatacttccgtatcggtttccaaaaattgtcttaattattccctccatatttattttgagatagaggttgtagctcggttcggatccgttttgtagcaagttacccggccggtattcaactgctcgctgtttgtagtaatacgggaagatgtgattttctttttaatctccaggataaaaatgatacagcggtcgagctttggttggaggaaggactacagcctacagggaaaacgccgtttgcctttgtccattgaatgcttttgttgtggtcggtcaccttcgatcggatgcatttctgattctttcttcttggaaaagaagggctaaagattgtcctacggggctcggtgctgtagtatgggacaaaggcagaggatgtgaacccgtatgactttatttctaactctgtatcacgatcaccggactaattgactttcccgactaataataaactctatcacgatctctatctgattcgtcgtgtccttattttactcctgtagacatcaccactgacggcggttcctaaaaacaatcaggcttgtgaatctcgaggcctaccggccaattaatttaatcacatctgttagttggtggcggcacagacgaacgactagaagccatcgatgtgtatcctgccttgcctgcgtgtgatgatcatactgtgatcccatcttgtgcagtactccatccgtttcacaatataatcattttagcattttacactttcatattgatgttaatgaatctagatatatatatttatctagatttattaatgtcaatatgaatatgaaaaagctagaatgacttacattgtgaaacgaaggaagtagtatacgccagacgtgagctctcttccttcctcgtctaccagtttactgaactgctgactttagtgaaagagtagtctcataattcctccaaaactttataaagccaacgtgaaatttgtgttggttatgcaggtcacattggggcgtgtcaacgttgctcaccatggcttaccatacaacccctctatatatacttgtggctgtccgatttgagggcatttgtttccgtcttttttacatcccgtttgatcggaagttcggaacagcagcgagcc

SEQ ID NO: 5207 - DNA, 2000 bp, Oryza sativa
cgaactgatcattgaactaggcagctagcggttgcagtccataaccagcattttctcacggctgggaagaaatctactgcctctctaatctgaaatactggcctgttcacgtgaattgtgatctgttgatgcatgataatctgtggcccgatcaggccgcctgcaaattcagtttctgcacatattagttgatgctcaatcgctacaacgagtactgttgggttaaatctattgatgatgacggtattttatataggtccgacacagataactgctatcggtgacggtatctgacctgacacagataacttttcacatcactgaccaataatacgtgacgtagcctccctccgacacagatgatggttcctgcctcacacatatgtcctgttttgcactaatgagtgtacacagaatactgtataccaaattcaggtagtccacacactaccgcatagacaaccccattctgagcatgtttacacttgcggttgcccaaatatacatgtcagtactagcagtgaacatcctggacagcatgtcagaccgcttgctctgcatgttactgtagttaaggaatcaaacttgcgatgcagcatatgcggaagtaaaattgccctgggacggcaggacccctgtggtgatgatacatgcgctaagtatgtgtgcccatagtagatggtgtacaagaacccgtactgtttgggttatctgctgtcagttgagttggagaaattggatagataatacagcacgcgtgcatcccagagatgtggatgtgttaaaagaaaaaaaaactcgaagcttggctcgtcctagatggattcgagccacaaacgagtcaagctcaagcccaaactaaagctcgcgagctttgctgagacaagctcaaagtttataacgagctggcccaacctcatatatgctgtagataatagcccaccatagaaattaggaagcacactagcctaaggagaggaagaggcacacattcctgaaaaaatttccgtcgatttggcttccttccgtgtgatcactcatagctgttcgcctcatcgcctattccgtcgcccttccagccgcgttgtcttgttccgatggtgcgacctaacctacgcagcgtagctacgtctacgactgcgagccagagatacctatgcgcggctacgcgtcgacgacgtcgtgctctgcggcagccagcagccgattgcaagtctctccgtttagttccgggaggtatctaatttagaagaaattattagatgaaattgatattgatgccatagtgaatatgacttcgcatcagtaaacgttagaagaaaattttaaggtaagatatataactcatttaataagaattgtttttatgcattacatttattagaaatatcgttatattattatggttgtattaaaggaccttttttctagatttgctccagaccactaaattgaaatgaccgggcctggtaaacccaacgagttcaaatgaaactaaggatgatttacaaaatttaccagtgctatttgtgatttagcggaacgtgctaccggaactcccatcacgtgcaccctgatccctcgcagcactcacagctcgacacgtgtcccgcatcacgtgtcctccgcccgtccactgctttgcgccgacccagcaaaacagcgtgagacccgcacaccggatcacgcggcccacaaaaactaaccaccacatcctaatccagattagagagcgcgattagtctaaaccgcataataatttacagaaatgcccctcacctcccctttttattttattttttttctattttttttccgcagccacctccccttctcctctcttatcgcaccacgcgcactgttcacactccacagtatgttcgctgcgacgacgcagytccaaatcggaaccctaaccctagtagtcctcctcctcccgggctcgatccgaggtcgtcatcccgctgattccgaggctctctactgcggcggcggcggcg

SEQ ID NO: 5208 - DNA, 2000 bp, Oryza sativa
tcaactgtcttttagtaaaggttctcaacctcacctctctcattttacatgtgcatgctttccaaactgttaaacggtgtgtttttttgcaaaaaaaattctttagaaaagttgttttaaaaaatcatattaaccttttttttaaaaaaatgttatcacttgattaattatacgttaatccattgctccgttttacgtgtggaggggaggggtttttaacctcttcgaaagaacacagcctgtgtgctttcgtgctggtgagatgtatgcttccactacataacattgctttcaatcagcaattcaaccaaaagagagagactacgctgtccaacgatggtgctcacttctgtatttgccagataaaacagcaacccatgaaggctcctgaaatcaaaaggatgtatgtcaataaagttactttcagtagtaggcctcctttagaacaaagatattttaactaatttcctgaaaaaaatattataaaggattttcgaatgagttaaactaattgctatgaaattttcaattcgtacatttcaaaggagcccgttacattcagtatgtgtgattggctgagcttggatttagtactagagggttttttttgtcactttcgttgtcagtttcttttttctaataatagctaagaaggcaaacaaatgatttaattaaaagtatttttaaaatttaaggggtcctttgaaacaaagaatggaaaaaaaaacatgattgaaatatcatgcctggttaaatactacatgaaataaaccgcatgaattgtttgtttggatgtctcacagaaaaaaacaattcttttttaaatatttacatattgatttatcagagcgagaaagaaagaaggtgcattggaattctcatagcatttgtaaacatgaggtaccaaaatatggagaaaatctgcctatcctttaaaattcattttaacccaatttccatcattcaaaggctctcattgtaaatattttcctatatttttcctacaaatttcttcccatccaaacgagtcataaaatccaaaattagcttcggtcggtacaaacaccagaattcagccaacaaaagaaaccaaaaccctttttttttgggtgcaaataatgccgagaactggctgcgacccaggacccagggcaaagtgatttggacccggaaggagcaggaataatccctgacgactacctgatgagtgataagactcaactgacgtgctgtgctgttctttccaaatccccatcgctttcttctcctccttttttcttcaattcctctcgctttactttgcactgttcgattcattcgtcacggcacaagaaaccattcttaatcactcgccctttcttcctccatcagtccatctcactttggttccttcaagaaacgaagcatcaagaaagaggagaggagaggaaaagcaagtgaggtttcagacttcagaggtgctctggaggagtttggtctcgatcatcatctctctgaagcctgagagagtttcagctccgattaccacttgaccatggtatgcaagcttgccctctgcagatatgctgattgagatgctgattctcctatggctatgtcgacttcttcagattaattttactttgttggtttggtgtctggttttcatccggtttcttgatgagattagtttctgaccaagtagctgaatttcgttagcaacatatcgttttgtaagctttgcgcatgaaaccttgttatctgaatattttaaataagttcaagaattgcttattagaacaacgtaaccgtgatcctaaacatgtacatacttcaggttgaaaaaaaaattagagttcattttcagtttgctcccagtggttgcttctctgaagtcaattaggataaggataaacagaagcagcagttactgtggagagaatcagagcaagagtctgaaccagcagaaataaccaaaaaatttcgctgaaaaactctgaactgaaataaccacgagacgc

SEQ ID NO: 5209 - DNA, 2000 bp, Oryza sativa
tcaaggttttgcctatctcatcaagcattgcatatatctgatcagactgaggatgtgaatgatccccagacaagaactcgtaaacaacaccatcaagttcgacaacactcgatcctggaggcttgtgtatcctgtgttgtttcatcgagctcctgacctcttgtacaaggtcccatttcccagcagccgcatatacatttgataagaacacccaggccccggcatgctggggatccaacctgagaatttccatcgcaaccatctgccccatctcaaaattcctgtgacatctacaagccaccaagagagcaccccatagggcaacgtcagccttgaacgggacggccctaataagagccaatgcctcctctagcaggcctgctcggccaagcagatcgacggtgcaaccatagtgctctatggtgggttgcagatgatagtcgagaggcaatacggcgcaggawtcctcttgsccctcgtccaccatgccagcatgcgtacatgcgcytgagraacggcggtgargggttacggaatctggctgtatgttgtggtyccttcmatgtgtgtgaacaaatggagtgcatcggtggagaagccgttgagggcgaggccagcgatcatgacggtccaggtgtggacgtccttgtggcgagtgggagtggagtggaagagggagcatgcggtttggacgtcgccgcacctcatgtacatgttgaggagcgcggtggcaagatttgttgtgatggggaagctgcaggtggttgcgaggtaggcgtgcgcccagcgggcggtgtggagcgccccgaggtgggcgcatgcggataggagggcgagcagggtgacgtggtcggcagtgcgcatcgtgcggaaraggcggagcacctggacgtagtgggcscgggaaaggtaggcgtggaggagcgagttccagagggggaggtccctgtggttaggggggctgaggtcgaacacctggcgtgcagcgggcaagtcccccgcggcggcgtacaaggagaggagggatgccctgatgaagcggtcgggagactcgaggccgcggcggaagagggargcttggaggcaacccccgcagcagctgcagctgcagctgaggaggaatcggaatcggcaaggcgcgcgcaggcggcgaggagtggtgggtaggtgtagttgttggggtgggagcgggagtgggagagcatggagcggtagagcgagatggcgaggtgggggcggggcccgcgggcgagggcgcgaatggcggagttgtaggagaaggtggtggggtgggcgcggaggatggagagtgcgtaggggagggaggcgagggaggcggcggcagcgagggggcccgccgcggaggggtcggcgaagagggcgccggagcggaggaggtgggcgtggagggcctttggacacgtggcggtggcgggcatggtaatggtggtcgtcttcctcttcctcttcctcctcgccggcggccggaccggagcgcggctgtcactgtcactctcaggccctgtttggctaattgatatggaaatgatttccacccactaaaagacatctttaaatcttaaccatttattctccctcttttatttaatcctaacccttcattcatttcctaatcttaatcccacccctcatttcccgttatccaacattatccaaacacactctcaggggaagagacgagaagagcggctctctctctctcgtgggcctctcggcccaagatctcaagggacagacggagaaagagggagctgggcaagtgggccccggagggcagtgaccagaccacaggcggcgtggaattcaaaggtgagtcgtctcgtcgtaagccattgcgcgtggtttctttcttcttccttaaacctgaatcaatctttctttctttctttctttcttgtctactagtcttctactggagtaggttctacgagacacaaattagacaggagagatcgagtttgaaggcaggaaggcaggcg

SEQ ID NO: 5210 - DNA, 2000 bp, Oryza sativa
agcaattttcacgtgtggatcttccaaccgtatgtaacaaagtatttacaaaaatcgctatttttatatacggatggcgcacccgcacacgaaaatctgatttttcgtgtgcggggtggttatgtcgcccacacgcaaaaattaaaaactaaaaaaaaataaaatccaaaaaagcmaaaccctaacccaaaagcagccgccgccgccgccctcctcacggactccgtcatcgccgtcgccgtcgcggtagccggatccgccgcctccccaccgtccgaacccgcctgcccgccaccaccgccactggatccgggcgagggacggccatcgctgccagattcgggggggagcagtcgcctccgccggatttggatgggggaaggggtggtcgttcgccatcgcgtgcacactgccgcgagcccgccgctcccggtysccmaccgccgtgcacacgtcgctgagcccgccattcccgcgcccaccgccgtcggagccggaggaggaggcgaagaggccggcgccggtgccggcggcgtggcccgcggggctcgagctcgacgcggccacgcggttctagctcagctgaagtgaggagaacwttaagaggaggagaggaaagtgaggtgaagataaggggtagagagagaagataagagggagagagaagggaaactcgaattttttgaataggttgagagggaatgggtattttttcgggggatttttaactatttgccacttttagatttggcaaataactatttgccacccctatctcaatgacacgtgggtccacatgtgtctatgacatgtgggtytagtgggaaaaagttaattgccccatctaaatgtgacaaatggttaaatatctcatttttttgtggcaggtcgattattaggcccgtctgtgaaaattgagtatttttccgtgcaggactgttaagatgcccgcctgtgaaaattgatttttgcgtacggttttcttaaggaaccgcacacaaaaatggaggatgattttcgtagacgcgaccagtcagtggcggaggcagcgtgagggctggggggtctttagaccccccccctaccctctaatgaatcattagagcccccattaagaccccctaaaatttaaatccatatatctatcgcaagggtgttaaaatagactttgtctgagattgttagaaggcccaaaaggctgaggagtccccactataattttatcctggctccgccactacgaccagttatgttccgtatgcaatctaaatggatctttgtacagaaaaatagttttcgtagtagtgcagtagctagtgtttgcatctaacttgtcggtatagttgacgctatacaatgtacatggacaaatatctgtaagactgtaactgtccctcattgttcggtaactttactagatgatgattaattagccatttgatcgctactaaaattgtgaggtgcattttgcagctctttcgtagctgcactgagctagaaatatccaaaattttaacaatggatcatgctaaatcaacacaaaacacaaaacttgtgctcctcgtttaattttcacacaaacgtactatttttttcactccgcattttcctctcagttgttcacacaggataaaatagaaagatatacactaaacacgccggtcatttttacttttaatcctcgtttccttcttaatccacacggattataaaaatwaaaagaggttaacaagcacgcctttccttacttacagagttccacacacaggtaaatttccagctagcaattgaccctatcggccccacatgtcagtcagattaccacacgccactctcgattcccctgtgcgtttcggactgcatgcaagggtgggccccacatgccagcctcacgcaataaataccctcctcggcacgagcagcagcatccgcaacaaattcacaaccctaatccggaaacatcaagaactcaacccaattcgcctccaattaattcccca

SEQ ID NO: 5211 - DNA, 2000 bp, Oryza sativa
ggattgttgaaattcggaagagcgatcaattgggcagaagaagaaagcatgggaggagcatatatgtcagccaattgagctgaccaatgataaattactctgtgaacgtactaaggatgtgttcacttgcaaagtttttttttaacgactcgcacaagacagtgcgaagttctattaatagagcaggaaaaaattacaagattataaccatgaaatgccaggaaaaaggaaaaaaaatgagtcaatatgggtcaggctttatggaaagtcaggaatgctgcatgtttgaagaacaaattacctcttgaccctactgacttgatgcatgatgcttgttaatggatcgattcttcatctatattgcggactacgaaggaagagcgaagaaaattgttactgtagctaaagaagataagccaatgaacaatgttcagctcaagctaggcatggctggaggccacacatgagtgtctactggagttcttccaacaaaagaagatgggagtccccagggagtgtcatgttatcaggctaaagagaatgaataatgccctatgatagactagattggtttttagatcgacatttgtttggacgttcggtgttgttctactcatcagagtgggacagcgtcgtatgatgatgtaggactaataatgtttgtttgtgtcagtgtgtgtgcatgtttcttttggctgtccttttgcctgttggctgcatattgttaaaacttttgctcattttagtaataaaatgggagagtaatgccctctttctcaaaaaaaaaaaaaatatcttaggcgtgtascyctaacaaatatttkgcyccccattttyctcycaaagacmcgtcttkgtttracttgtcccttgtmccaaraccagggtttamaattttaattycagtgaaaatatsggtaattycggtaggmccaaaatttkgkrattttsggcmctttttggaccgatttttttttttkgaaattttaaaaggttctgactgaattttaataaactttgacaatattccacaaaaaaatgagaaaacctaaacatttcggtcagtattgttttaccggtggggtctgaatttccgaaattttgaaccaaaattgtaaactctgaccaagagttatacatcatttttttacataaatcgatgaagtggcgggttttacaacttcggtgtgcatgcataaatctacccggggaccgaaatttcgagggagcaaaatacgatcgaacctgaacaaaatttcctaaattttaaaactttacaagatttgaaactacaaatctatcgaaacattaatagatagtcgcaaaaaaaatagttccgtgccagagggcccgacattttattttaggctgtgttcgttagaagtagttcccaattcctcctcctcatttttcgcgtgcacacgcttttcaaattgctaaacgatgcgctttttgtaaaaagtttatatacgaaagttgctttaaaaaatcatattgatctattttttaaaaaaaattagctaaaatttaattaattatgtgttaaacactgcttcgttttatgtggcggagagtgaaccctcactcccgaacagagcccacacatgacgtactcccccagctcgccatattgccacccggcggatcacactggaacacgtcgcctcctccccccgcgaatgttggccatggccatggactccacctccactccccgccgaattatgcccggatcttgccgccttctccacctcaactcgccacgacacaaaaaaaagcgagcaaccgttcgttcgatcgatgcggacgatacgtacacccaacgcggaaaagtccgagaaaaaagcagcgcccaccaacgctgtcccttcccctcccattcgatcgtcctgcacctcgtctcgatcccccctatatatacaccatgcactcatcacctcgacctcagctcagctcactcatcggtagcagtgtgtactctagctcgctcgatcttggcc

SEQ ID NO: 5212 - DNA, 2000 bp, Oryza sativa
acattttgaacaccaaattagtttcatcaaatttaacattaaatatattttgatagtatatttattttgtattaaaaatattagtatatttttctacaaacttggtcaaacttcaaaactttgtctaagaaaaaaaatcatgattttagatctaaacaatatcttcccttctcgggccatgatatctgtcctataaaatctatgtttgccgatgacaatgtttagaatcaaaagtagaatttcttcttaaggctatacacagtgggcttttttcctaacatccccgcggtgctagggtggacttccacccctatgttcgcactcagtgaggagtcgtgtatctctatggagcctacacgtttcatggctcacccggggcagatcattaggtgggattcgctttgaatcctatgtatggaccctatctaagaccacatgtagtgtggactgtggagtatgtgtctatttaatgtcttgctcctgcatgacacttgaggtttggctagagcatgtcttgcactgctcgttttaagttgctatgtagcttgtgcatggaccctacttgagaccacatacattatggagtatatgtctgttcgatcagtgtattggccctacatcttgttgaggtctagctaaagcatatcttgcattgttcttgccctaagttgctctagacaatgtgtacatggacttgttgacctcgtctgatgcacatgacacatgctaatttttgtttttaattactaaagcccatataggagaaatgacgtcaccccctagcccaatagttagagcaaatcgtgtgctatcagactgcagaatgaaaaagcccatcaagtagcctagaatggccagacacgcactaaagaacaaaagatgcctgctcgatcgagttctcttcttcttcgtctaggcaagaagatgaaggcaaggagtctccttttctttcctacaccactgaccagcaagctctcaatttgcaaagagaacacaccactttaagtgacaacgtgatcaatctcagcgaaggatcctatagacccctagcaccctcctcccaccttggccacccagtttacactatattttatgtcgacgacaacatctagctatttcttatgcagagaaacaagttycaagcattcaaattgaatgtagtttcaatttatttataatagctatctttatctcagtttcttaattagggatttcatttaatcagttttcccccaaaacatagggtttctaatttgacaattcatttgaaagcaattgataaacaaatggtagagtttggaggatgaatgcttgaagcttgataaacatgtactaccaaacttttgctaaggcaacatttagctctacaataacaaaccctacaaatcactattaaatataaattgcttgatatgtcaagtactagatagttttattgtgatatactattatgtttgggacaccagatcattttcgttttggatttactatgattgtttaggatcctacttgagaccacatacacataatacatagtatttgagacctagctagtgcatgtactctgtccattcccattccaaaatagaggccgcttttggattaaaaagttttcaaaaaaaaaggagtttagaagtaccttttatcacatcaattcaaaattttctctatcctaccccttaaatataggtattacagtaatttttttaagcattattttttctatataacttggatcgataactatagaatagaaggtagtaccgaaccgttcctcctacaggcaattccctcaacctaaaccattggaagaacgtgccaagttggaagcctaacctagcactagtcttagaaaaaacagtagaaatcgtgagttatctctgcaataaaaaaggaggtaagcctacccacactgcaagtctccaactcgggcaagctctcctcccccacgactcccctctccttcctctctctctcgctcgcgcgcgcctgcgtcgcca

SEQ ID NO: 5213 - DNA, 2000 bp, Oryza sativa
gccccaacacaaacccctctctcatctctcctctctctctctctcgcaaaccctcctcctctcctcccctctccgcccccgccgccggccgtgcccctcctcctcctcctcctccggccgaagcgcgccgcccacgagcatcagctccccctcctcgtccctccctccctccccactgtccgccggactgacggtggggggcgcctctcccgcccacgaggatagaaagccctagcttcgtctctgctctgtgcctccgccgctcttcccccgctggccggacggcggctgcccctcccctcccttcccctcccytcccctcccattcgtcgctcgtcgacccctctccgccgccgaggctcgctgtcccaaggtattcctcttgtccccttcctcggstcctcctccccctgcgccgcaactctgccgtggcccgcccggccgcccggagatccgtccgggctcggctccgcctcatttctttcgctggcgatgaggtggtctaacttgccgatgcgtccagagtaggctctgttcttttgtgttcttttggttgagttgggaacccatccctccggtacggaaaacgaagcagtccattagcacgtgattaattaattatttgctatttttttttcaaaaatagatcaatataatttttttaagcaactttcatatataaactttttgcaaaaaacacaccgtttagcagtttgaaaagcgtgcacgcggaaaatgagatgggggagttgggaactccaggaaacgaacagagccttaaatccagatggatgtttctcttttacctccagctaatccgtccgcttcgttgaggattccattgaatgcttggctgtggtggagtgctacacgactgctagtagcagcttgcttctcagcaatttgggtgaaccccccacattcttgaggtatcgctgcattttatttggcagcgcatttataattgctgtcttactaaaaaaacacatgtttttattttctccttttaacattacattttatatgcatagccatgcaaagttcatggtacagtagggtctactttcaccttatttgcttgtatacctgaaaagcctgactgttggacatagccacgcaataattgtaaagaagaggttagaataatctatatgctaatattgatccttttatgttactgattctgcgtgtatttcaattgtacctcctgttggacataggcatgatgaagcaaactgtttacatttagagtgtattagagcataggaattctatcatcgcaaatggacagatggacatgctatatgaaaatgtaaaatgcattagtctggagtagctattatgtgtgctccatttcaaactgtatatgtggtacttattctggttgactcatcatgtgcagtgttatctattttcaccaaattttaattttttaatagccaacctgtctctttgacatgttgtatccgtcaatacaggcagtaacaattggatctacatcttgccactacaaaaggatcaacgatctgtactagccttcatttgtgggttcctcattgggaattgggattctttacaatggcagatatgagccctaggacagatacatcaacagatgataccgatgataaccacatggcaagtctttctttctttcttttttctagactaattcttgttaaccttgatatgattgggcacaaagcatcaattgtccagtttcatgtttggaggaaactactaaactattatactaattatcattcaaaagtgagaaagagcatcaattctagcaatagaaaattaaaacagcaaggttgtctgacgaagtaaggatgtatactgtagaggatgttttatatgaaaattaggctatcgttgtcagctgttcagtaataatctccaaaattcatggaatatgtatatattgaaacgttcagtatatgttggcattctctacatagaaagttagtttcatacgaaaatcttgttatcagaga

SEQ ID NO: 5214 - DNA, 2000 bp, Oryza sativa
agttttcgtgttcaattttaatcgtccgtcttatttaaaatatttttttaaaaaaaaatttaaaaaacaagtcatgcctaaagtattgttcatgttttattatttaagagcaaggctaataatacagacaacctattggatataaggttctttgtagtcttttctcagtctacccatagaagcaggtacaatagcagactattagccaactataaatatattttaacgagataaaagatgagagagaagagcagcgggctatagatttgtagccagctgcagcacggactccaagacacaatgtgtgtatgacaagttggaccacatattaatagtatagtaagcaactattgtatgaattggctattagatcggttatagatgaattagagcttgtagtgggctatactattaaacttctctaatagttagctctttacaattaatacagaatccacttgtctctctcacagagtttcttggttcttgtatccaagccggctgtaaatttacagctcgtttctcctctcttttctcctccgactcagcatttagccagcttataccctactattatacttgctctaataacaatacaaatactaatcataaaagaaatttaaataaaagggacgatcaaagttaaacacgaaaactcatggttgtatttaaaatataacggatgttgtatttatattgagacggatggattactcttggtttaagtgcctgattccatgacttgtttattcgcacgagggcatgcacgagctacactacacctgagtacctgacatgacagggcaacccacaataatttacccccattttcgtttattcgtcagcaatcatggtataatttccttgaacaaaaatatccagatgaggctgtgagaaaacataacaagattcttctagattggtagtacttcctccgttacacattctagtattttctatatttatattaatgttaataaatccagatagatagatatgtctagatttattaacattaacatgaatatgaaaaatgttaaaatgacttatattataaaacggagagagtagatgtcactggccagtgccccctgtccatttctcttcctcctacgtccctccttgtttttggcgcgagaagtcgatcgagaacgaaacaaactcggcatctccatcgtgccatccaccgcgcgcttccgtccactcgcactgatccttccggcggagcaatccatgaaatcctcgtcgtcttgccgtgtttggttgggattgcatttgatcaagaggatttatatatgtggatttgcagctagcttagcttagggcatgttattttcttccctttcctaacttctatccattcgtttttcgaataagccaattctcaaacagttaaacgattgtgttttgaaaatacaattatagaaaaattgcttgaaaaccatattaatctatttatactataaggctgtgttcgggtatcctggttcccatccggaatacttcctccgtatttgaatatatgacgccgttgactttttaactaatgtttaaccattcattttattcaattttttatgtaaatataaaaatacttatatcatgcttaaaaaatatttgatgataaataaagtcacaataaaataaatgataattatataaattttttgaataagacgaaaggtcaaacgttagttaaaaagtcaacggcgtcatccattaaaatacgaagggagttgtaattatggaaaacggagcgatccatttagcgcgtgattaattatatctattttttttcaaaaatagattaatttgatttttaaagaaattttttatatttttgcaaaaaacgtatcatttagcagtttaaaaagtgtgcgcgtgaaaaattgagagagaggggttgagaaaagagggtgccgaatacaccctaaataggttgatggattagctccattttccacctaagagtgcattaatatctcgattgcttggcagtc

SEQ ID NO: 5215 - DNA, 2000 bp, Oryza sativa
aatctaccataaattttcgacagtaaacgcaacttcctgtccggtatgattttcagggaaattttcccatttgcttcagttcattatagttctgtcgaaagcttaattgtatgaccacccaaaatcaccattgagtaagataaacagtttctcgtagctactactaacccgaactgtgattacgcaacacaaacaaagttggccatggtgttgacagttcaactgttcaaggttaaggtcctgtttgaaacagctactgtatttccttagattattgatacgggttgtttacacatgattagtatgataaattagaaaattaaattcaccaawtggcttaggatagacagtctaatgcagcagaagaaagcttctaaaaaaatcatctttttaaaaacgtgaagcaaataatctgtagcaaagatcttagcaaaaatctgggaagacgggccaagctaccccaagtagtaaggctgtgtttagttcacactgaagtttagaaattttgttgaaattgatacgatgtgatagaaaagttgtgtgtgtatgaaaggtttgatgtgatggaaagttggaagtttggaaaaaaaaacttttgaactaaacagggcctaactgagaagacgggctaagctacacaagtaatgagaaacgtttaggggtttttcagctagcttcataagatggtggacagtggtggactagttggtttgggttcgaagtctcaccccattctatttatttgatattaggccattccataaatttgtggtttttacacaattaataaagacaaactaatttctatacgcatagggcttggttgtcacatcggatatacggacacacatttgaagtattaaacgtagtctaataacaaaaaattacagattccaccagaaaaccgcgagacaaatttattaagccctaattaatccgttattagtaaatgtttgctgtagcaccacattgtcaaatcatggtgcaattaggctcaaaagattcgtcttgcaatttccgtcagaactgtgtaattggtttgttttttttcacatttaggacttgtttagttggggaaaaattttagatttagttgtcacattagatatacgggcacacatttaaagtattagatgtagtctaataacaaagcaaattacagattccgtcaggaaactacgagacaaatttattaagcctcattaatccatcattagcaaatgcttactgtagcaccacattatcaaatcatggcgcaattagacttaaaagattcatctcgcaatttacgtgcaaactgtgtaattgttttttttttgtccaaaattaatactccatgtatgttctaaaacattcgatatgatgggtgaaaagtttttgttctagaaactaaataagtccttaatactccatacatacatctaaacattcgatgtgatgagtgaaaagtttttttttgaaactaagggccagttcactttgatgccattttcaaccttaataaattttgataaagttgccaaaaaatagctacatttagtttgctaccaattttttggtaactatataagaaatcatgccaaaatttgataagttgccaaaatttttataatgccaaaatttggtaggtttttttttcatcaaagtgaataggccctaaacgagcccattaagttggtcatgctattattaagcaaaaggtacagtatctacttataatctgaaggagaatcagatgttgggctggtggctgctgctggttctcagctcacccgccgtggtggtggggactttctagaagaagacggcaagtgtcaagacttgtagtttactccgttgatctgctccaaccaaacctcccatctccctcccccctcccctgccacctccacctccactctccccttccaaccacaaccccccatcagcgcgagctcccccagatctccccccacctccactgccgatgacctccgccgcctagcttcccatccaccgca

SEQ ID NO: 5216 - DNA, 2000 bp, Oryza sativa
ctacttattagtttatcagtggtacataactaaaatttaaattctaaaacttaattttaaagttgtttttaagttttttcatccattttcatgtttcaataatttttccaaggtttatcagccgttgctcaaacgatcagatagcagccgctatagcctccatagccctcaaaacagtggacatattattcacatctccatcggtagagaccctggatatgatactagcacggccggctgctatctatccatcctgttgggctttcctgtgtctgaagtaccactgaaccctcaaagtcagtactccactaagacgttgaaacttcagatactgcagaacatgagccatcgtcccttgcaatgttggatgatggtccatcaccgctagctcttgtgtggcgcgctttgttttccttatatatcctccatatatataatcacatcgctatagcacttctttggttctttgtaatcttggtcatcttcatctcccatctctccctttccttttattaatttctgcctcagccttttctagatgaaagaaaaattcacagctgtttatttacaaaaaacagtataaactcctcttcgtactaaattatatataaggcgcgcatatattttaaaatttaaacttcattagttttgactaacatttagtctaacaatataaggtttagtgatataaatatggtattgttagactagtacctagatgtactttaatatgatgttggtttcattattgataataatacacttcaaagttttgttgttgaagagcactgtctcgagtcaaaccgcagcttgtaatttgggatggagtaaatgcttggtggcaaattgatgaggttaactccactgttttctgcattcttaccacccatcattaagtaatgagcaggcaggattgtcaattacagtgttctaactaacacaatctttgcctgggttcttgttggccttattcattatcggcaagctaacatattatatgaatagggtacccatagaaatggtcaggtctaatgattgattgcaaagttagttatagcatacatatccatgcatgataagtcataactatagtattgacttctaccttagctctttgttgctctctgagtgtacaagtaaactgcatatcttaaaattaattactctgtttgttggatgtaagtttctagtttactagttaattcttgctcttctagaaatgaactaacaatggcaccaagctttttgcacgacatatggctctcattcaattcccctctagaacacaagaggttttgcacacagggcataacacactcattaaagtagtaaatcgtataggaacctagccagctagctagaccaaaatccctattttcccaaccaatgacactgatcttgcacctaattaatattaaaccaccaaattaaatccacaccaaattaatagtggccctggcaccataaccctcctgctttctaatcagtgatgacacacacaaaacacaaaagctaatcatattaattaattaactaaatgcttaaagctagccatgctttgggacaaaacaagctgtggctcccctaggtacagcccagatgaatatttagcgagtgtgacacatttggataataaaagattaagacatgccctcaatgaaaggaagctgtttggtgcccatggagatgccaaatggagctttctcccctctcttaattctgctttctctacgtacgccgtacgtacatggaggcccccacattttttttctcttttaatttcctcctttttttattcatgtcttaaaaaattatatttgacgcatgcatacaccaagttaatttggctgcatacttgcatggtttgtgtataagtaggacaggagggtgtggcttgagagttcgtcactaccaccattctcttcttcgtctacttccagctagcctgagctctagcttagctctagcttagcctgaagaagctaagagaggaagcaaca

SEQ ID NO: 5217 - DNA, 2000 bp, Oryza sativa
tatttgaataaaggggtgattctaacaaaggataatctagctaagagaagatggaagggtagcttattgtgtagcttttgtgactctaaagagttgatacaacaccttttctttaattgtataatggctagatacatatggagtgcggtttattttactttcggggttagacaactcagaagttgcgctcatatgtttggtaattggttgaatggttttgaacctaaactcaaaagacaaacttgggagggcatagcggcaatttgttggggtttgtggcttagtaggaatgacatagtctttaacggctacaatcatatttctttcttacaggtaatattcaaggcaattcattgggcaaggctttggtctttgcttcttaaaaaagttgaaggagaagaagctcaagtcaagtgcagaattttggagaagcgagttatggagttcttctctacctttggatggaattttcgaagaagaattgaagtttagcctctatttctctttaatcgtttgttaaacttttatttgtgtgtccctatgtaatgagaggagtcttttgtactcgtgactatggttttggctgtgtacaccctcgcaaggtgtagaggccgggtttaatataatccattatctaaaaaaaaagttctaccaatcccaatatctcaattgaatctcttgacaactagtgttcttaggataattgtatcaccttaatgtaattgactgagttcaataaaagcttccattatgtaaaaaaaagtcctagtttggtgaaagcgtttgcaaccagctataaataatgcaatcacgctgaatgaattgctcgctttagcacactccgcaccccttggcagcatacgctaccttttttctttctttctttttggaacggaagccttgggagcaatgctcaattgctcaaagttcctcgatgacaatggattgttcactgttaatttagtttcccctgagatgcaagatttataggtactgtgcagcctgtagtagcaattgcaaccaacagatctaatcgatccgacaaaagattttgatccttttgatcaaattacaccgtgaggttgggttatgttatgctgcccctgcctacgcgatcggctcagctccgccgtccccccttcgccgctggccgccgcggtcatcttcacgacatacgccgccgtttctccgctgcccactcaccgccccgacgcgggttgcgggccgcggacgtgacgcggcccatcttagtgggcccgtagttggccttaggttatatttttttttcttttcttcctctttaatcaaggttacatatgcccggtttatattttaatttttcttcttcaaacttctaacttttctgtcacatcgaacttttctacacacaaacttttaacttttccgccacatcgttacaatttcttcaaacttccaattctggcgtgtaactaaacacaaccatacttacattccatattcctttgatttttttataaacagtaaattcacaaaaccatagacatcaataacgtaaaatctaagttgtacaatttgtttcgtgagtttcttagcaaaatatttcataaaaccctagctgcaaggttatatcgttaatttaataaatatgttcatctataataattgttaaaacatttgtaatgcatgcggagtatatgtgtattttaccctacataaaaatatgaggtttctcgaaacaattttatctccaaacataagattccttaaaacacaaataacaataattaaggtagtttgcgctttgaaaatgaaaaagaatttgtttcattgactttttgttgacgtcaatgcatcaggcatctcaatcccgattgctgatatgaaagtaccccaaacgacgagatggccaccgactcaagcacggttgccgccatgttgagcctgctgtgaacttgtgatttcttcggcgtgcgacttggaaggtggaagtagcttctctatagcacacaaacaacacg

SEQ ID NO: 5218 - DNA, 2000 bp, Oryza sativa
actttgttgagtggcagtggcattttggaggtacgacagtgcattattctagtggcatataagcaattacctctgttctgatggcattttgccaattggagcatgtcataatagaaaaatctaggactgttacgttctctagtttttcataacatttttttacttacacagtaaaacgcatgcgctcgtaacgtactcaactcatcctataaatacacacgcataccctatccttatcagtacctccgaaaatttgaattggtatatccaaatgttgacgaaatcactacgaacgactcgctatccaagggtccaactccaaagggaaaaagaacctacatacatatttgatcccctctctcttattctattaatagaaaaaatactcatgcgttacaacgagtaaaagcgttttttctaatggtacaacaactgagagctgaggaataaattgaaagatcagtattgataaatattataattgaacaagcgttgcctcctacctcccttgctctgcctgcctctcttaacttccggaaaatagttccgtgcacgtacaataccgaagccgatcatctccatcaaatctagttgaatatttctcggtcttctaaaactgattaagggcttttgatccacttgatctcttttttcagtatttcccaaactcggagcaaatccataaaactcgggataaaaacggccgggggaagatcactgattggccatcattcactaccgtttaaacgaagattaaatctaatgaactaaagccaaatttgaaagggaaaatcatgggaaaggatgagggatgagtgaggaatcaatttttgcaattaattaggggagaaaacgcatgaggtggtagatcaatgtggcggcggcgttagggtttggcccgggtggaacggtggtggcgcggcggcggcgctgcagaggtgcgcggcaacggattagacacatatgtatgcatgacatacaaaatcaaatacacagaatccttgcttaggtataaaatagatttgagataaagataaatattagaaaactaacttaaacacggatgacatactaaaattttggcggaaacaactttaatttatataatacttcatccgtttcacaatataagtcattctagtatttcgcacattcatattaatgttaatgaatctatatagatatatatatgtcaagattcattaacatcaatatgaatgtggaaaatactagaatgacttacattatgaaacggagggagtagtagagatagagatagagataagcattcagtaaaaaaaagcattgcaatggaaaaaagtccaattacaaccctgattttcttcggtggtggtaaacgtacggctacatgaaaacaactcacacgcgttcgacaaactccactgaacaaatcacagtgcacgtcacggtcctgtacgtgtacatatcatacatgatcatatccccaggtacgttgtgcacgcacaccttaatcaattaattgcacacagtagtacagtacgacgtactgtagtaccccaccataaaagcagctaccattaattacaacaacaacattatttctaacacttgaccccggatggagtcgatcgatcgccaccggacatatgcaaatgcaaagcaactatgcattattacagcaaacaacaacgttatgaccccgctgcgcgcgtcgatcgatccgccgggcaaaacgtcctaatccgattcgacgggatcgtaacccgcaacttacgccaacgtacgctccggcggcacgcacgcacggagatctcgccggtgaaatgttgagctcgcgagtacgtacggcaaggcgcgcgcgacctcgacgttgacgcccaaactgacaacccccctcttagatctctccttcctcctctgctatataaaccccatgccctcctcgctgaagctcacagcctcctcgatctctcctctacagcagctcatcactgctcaagagaaaggagacggcaaca

SEQ ID NO: 5219 - DNA, 2000 bp, Oryza sativa
atttttggatgagcccgtttgaccagatgctgtgtttgtcgaaatagagaggcatagatttgatgattatttagtacattgttgttgaaacctcatcatttcactcatacttatgcttatcagccaaaattagaattttcaaccttaaatttagatttgattttgaggtttttttcatcgaagtttatttttcagcatttgtttatagatcattaaggacacgcatataaaaattttattcataaattatttttcgtttgcaaataaaccgtttggtttattcctagaataaacraaacgatggaaacttaattatctgcacaagcacatgaccattctcagggaatgtgctttacagtgtagtttcacgaaggatttatcttaccaggggaggggttaccgtaccttgacgataaacctggtaaccaccgcgaacagagaaacattaaagaaagtttataaaaaagttgaatttttctataatttttttgaacttggttgcagtgttttcatgaaattttggtgtcaccaaaattttcaggaattttggaacttttgtttgcacaaatttatttgaaaatttaccaaattataactgaatttgaataaatattgaccaaattaaaaaaagaaaaatgaataaaccgaaaagttcaggtgagatatttgcttgcggggaaggggggaagtttgaaattttataactttcgaacataaattgcaatccttgttggtggggtgactaggccctcactgccaccgtactttggctttaatactatgacactatattaggccttgtttagtttccaaaacaaaaacttttcactcatcacatcgaatgtttggacatatgcatggagtattaaatgtggaaaaaaaaccaattacatagtttgcgtgtaaattgtgagacgaatattttaagcctaattacgccatgatttgacaatgttgtgctacagtaaacatttgctaatgactaattaattaggcttaataaattcttcttgtagtttcctggcggaatctgtaatttgtttttattattaggctacgtttaatacttcaaatgtgtgtccgtatattcgatgtgacaatcaaaaccagaaatttttcccaattaaacaaggcttacatgttaattacacggtagacagatgagaaaatcggtgtatatggattttttttttgtttcacgtttcaaacatatcgaatcagtccctcaaatatcaatttcttaatggagatagaaaagaaacagaagaagaattagtacacaactacacacccagtaaaaaaaaaaatgaatcagctacatgcaatgatgcaaacatgaaactaatcaatttgaaacggggcatatatacataaaagagtaaaagagtaaagtgcattgacggtccttaaacttataggattgtgtcatatacacccataaactcttaaaatatatatttaggtcccataacttatcaaagtgtatcatttagatcccaaattgacacatcccctctacgatcctatgtgacgttgatgtggcaatgccatatggacgtgacatgtcattttcttttttttcttcttttctttttcgttttcttcttattcttcttttttttcacgggtcacagagaaaggagaagaaaggggaaaaagagaagaaaaaaagaaaaaagaaaaaatttaaatgggttccatttgtcagttaaaataatgccacgtatatatgtatggcatgctacatcaacgccacgcaggatcctgaaggagttgtggcgatttgagacatagataacacactatgacaaatccttggaattaaatatgcattttgagagtatatggatctaaatgacacacctcctacaaatttaaggaccgccagtacatttactctaaactagtacatgcattggccatggatgcatggatgaatcgacggatgcgtacgtgcaggcgggtcgttcgcgtacctccgggtggagctgggcgacttc

SEQ ID NO: 5220 - DNA, 2000 bp, Oryza sativa
tgaatgatcaataaaccatgtgggagagaattaaatagtgttttttttcaaatttggacaaggtgacactgatttaagtaggataaactgtgattgatctcacaaattaaactgcagctcgtcaaccatggggtgcctgacgatgtgatcagcgacgtgaggagagacttaactgagttcttcaagctaccacttgaagccaaggaggcgtacgctaaaccaccagacaagtacgaaggctatggccagcacttcgtcgtttcagagaagcagaagctggactggggagacctgctacacctccggcttcgcccaaccgagtccagggatttgaggttctggcctgcccatccttcatctttcaggtctgcctcacaaacaaaaccacaactaatctttgcattgatcatgactatgggaaataagtagttttgagaaatttcaaccaagaaatgaacaattttttttatttccaaggtttagtttttcagtctgaacgttcatggcttctcttgttccaatgagccattttgctgcatatcacaacacaaatgtttgacaggaattccatggagaggtactccttggagacggcaaaagtagcacgctgcctgttggagttcttggccatggacatgggcgttgatccggagtctctcctggaggtattcagaggccagccccagaacatgagggtgaactactacccgccgtgcaggcaaaccggcaaggtgctcggcctgtcgccgcactgcgacgcgaccagcctgacgctgctgctccatgtgaacgacatgcagggcctccagatcaggaaggacggcaagtggctcaccatcgaagccctcgacggcgcgttcgtcgtcaacgtcggcgacatgcttgaggtaaaatattgacctaggctttcacctgatgcgtcgatctgaaaccgaaacagtttttctttgctgatcgatgttgaattgctggtgcacaccagtacagagtttctagcttaatcatctaccaacatggctgctgcttgcagattctgagcaatgggaggtacaggagcgttgagcacagggccgtggtgcacccggagaaggagcgcatctcggcggcggtgttccaccaggcgtgccgggacgcgacggtcgggcctctgccggagctcgtgacgaaggacggtggcaggccggtgtacaagtcgatggcctacgaggatttcatgaagcgcttcttctcggccaaacttgacggaagggctaacgtcgagggcatgaagatttagtggtcgagaacatggatcttctgtaccaagaaataatcagcacttgattttttctcttctatgtaccagttgctgatgtgccaatggccagtactattttggccggaatacgaagttatcacggacgtcccgctgttaatatcatctatcagtgaaaaaatagccgttgatgtgagcacgtgtatcaagtacaggacttaactagtttagatcggttgtccgaagttagaacatgtttgggtagtattttaagcttatgattcatggaattgctaaataactttaacccgttttttctccacagaagtttcaaatttgtgatcttttggttgcctcgagattcgtgagaggggaggaaaaaaaatttgcacaaccataagctagcgggagttcgaattttgcacgactatgcgttagtgggagtcgaacacccgatctcagatttaagagcttctagagctagtcaatccaatatgaacatgtttttcagaattctatacgagttacacatataaatcatattgtgattatagagtagttataatattattatactagtacactttaataatttcccatgatcccaactcaggccttttagaagcaaaccattggagtccgtaaatcaagcataggtgtcaatcttcagttcatggtagcccgttgacgtgacgacgatcaaatccggcgagagtccgacagataacgagaataacagccgacc

SEQ ID NO: 5221 - DNA, 2000 bp, Oryza sativa
tacaggagcacacctttgcaggatggctcaccaacccttgctcaatccctgccctaactctcccctccggtttggatctcgccggcttaaggaattttacggtggattccaccaccgccttccaccaaccctcaccagatcgatccaagagccaagaaatcaactatgctctgatacccttgtcagatcctaggagtagaaatggagaaagtcccaaattcgatcggaacccaattcttcagtttaagtggccgccgcaaggaacagaactagggttctaactaagctactcctaggacaagtaattatgattctcgatgccttttctcttcatctcacatagagttttaaaggagattacatcggtgaggaccacaactcccattacagataagttacagctcattcagctgacgaaagcaaatgacaaaataaagagaacagtggaccccgacaactattaacggtcagatactcctaataccccttcgcgagtaatctcagccataggatcttcataaccctcaacttgttcttcttcagacttgattctggactgagctgggactaactctgaacttcttctaaaactcctacagacttagcatttctgatccttgatcttgacagtgccagaggtggctccacggcgagccccatcgacggctgctagtacccctcagtccgtgcgcgtcggggccttggaggtgtgattctgctcccgctgctctacttcttcgctttctctggcacattatgaaattacccgtttctgatttaggaaaactaggaataatgcgcagggttgatcattagtgaagctataatacgttttgtacggttgcagcgctaaatccataattgccccttagcttctcagaggggaaaaaacttgcaggagtatcctttttttaatcttgtggatagtagtatatcttgattttactatgagctgcttgggtttgtttgtttgtaaagtggtgttcctggtgtgctctgtaacaaaggcaacgtgttagatccagtttggcactgttaatcggtggtactacaagctaaggctgaaggcctgaacaccttttgcaagtgtgcccctttttgcagcaaaaatggttgttgtcctttgtccttgtacctttaaccagtcctttaatctaaataattttggtcggcgttactttattgctccggaaaaaatataagtacaataattaagttcatctttggtttcaggttgataccgttatttctggcaaaccaaggatttgtgatatggacatgctttgcacaagtcagattgatgagattgccaattgtttaacacgtgtgagtattatatgtaattttgtacttaatttatgggacttaatttgatctagaatgtgcagacagtctcttgaaccatggatctgatctcccgccctcgtggctcagcaaaaatatgaacatatacttgtggggcacatcattgtggaggatagtgcggactgccgaggatattgttatcattgatttcactaaggagtgtggaagtctgggatctggctatcagagccaggaattctttcaggcatgtaaaaaagtaagctcttgtcaatataaattcctttttttgttcggatcatgcttaaagatttctctctgtgtgtgtaaaacaacagcaggtttgcaatattcattgctagtgcacgtgcgcggggggttgggggggggatgctttgtgaccacccattgtggggaaaatttttttccaaggcatcttgtagtcttgcaaggagctatcaagatatttccgtgcaccatttctgtaagactttggagaaaggatggatgaaaattgcaaaagaagagcacatagttatttttcaaactttgtgaaaggaaagttttgtgatgaactgatgaccacatgtgcagtgctacctccatatatatagaatccatgaagtaatcatcatcagcacagtgggaagagcaagcaagagaaaaccagattaacc

SEQ ID NO: 5222 - DNA, 745 bp, Oryza sativa
gaagtgtgtttagtttgttgccttaccaaactttggcatatcaaatttggtaaggttgaaaacagcaacaactaaatatgcacgtaggatgtcatgttctcttatttagaattaagagwgaatgattgttatgtagcatgattcaaccttttcytcyttgagagaggaatggtagagctgttcacatcagttgaagcagacagacaaggtgattggaatttgagaacatcaccctgcttttttccatggttagtcatcgctgatggcaggcgagtcacacttgatggagaaaattccaagggctcttttgacgtgaagatggaagatagtgtactacaattgaagagcttgaagccatatcaggataagagactctgccttccccgtctctgatactgtatgtgttgctttcagttggccatctatatccaccagtttttctatccattatctttaaaaaaaatcccttttgacatagatgtgttcctctaatgacatagatgtgttcctctaatgccataaggtagagactctctaccttttacttcaaaaaaaaaaggcatgatttagctagtgtaaacacctggatacctaaacagtaaaccataaaatcaagtgagtgttcttctgaaggtctataaatatggtatattctacacgttatatgcagtatacagcctagaacaactgcttgccaaaaaaggaaaagaaaagaaaacacttagtgcagaaactgggaattgca

SEQ ID NO: 5223 - DNA, 182 bp, Oryza sativa
aaaaaaaaaaaaaaaaaaaacgaagacccattcaacccaacgtacccaagacgctgacctgatcagcgatccatcaccaaaataacactccgcccctccatttccccactatttaccattctgccactagccgaggtctcctcctcctcttcttcttcccgctgcttcgcctcgcgctcgcc

SEQ ID NO: 5224 - DNA, 2000 bp, Oryza sativa
gggatggtgtcttgggcaataagcaacgtgattttgacctagctagttagagaagttacagcaggtgcatggaaactgcaaagtaaaagtgccatatttgcggccatggcgagcccagacatgatggagatagttaacctctctcgcatggttgaaattaattgcaccagttatatcgtgggcaccctgaaataccatcatatttgaagacaggatacgtaacagtactagtttctttatactaagcttaatgtgctgttgcttttgagcccttatttgttttctgtcaggccaaggccgggtcatcctgcctctgagaagagagaccacaagtggttgaatttggcccctaggagagggaaaaggcaaagatactgatacatacatgacccccggtcggcgaggcgactcctactattcagtccagccgcgcggcgcgtgacggcggtcatcggtcaaagacacgaaccggaaccagtgtggtgaggcggacgtacgtacgggaacgggacgaccaacccctggctgctacgcgatccgcaataataattctcggacatgccaacaccataggcccaccggcccgcatgtacttgtagcgattaccggcccggagaatccagcgcgaccatcggcccatcaatctgcgggcgcgttgcgcctccgcaaccgcaaccgcaccgagcgcgcggcctgcctggctagcgtttcggcccatcgatccgcgcgcaccgcaccgcaaaaccggcagcgcggcgcggccgtcgctgctggcggcagcagccggctgctcctcgcgaatcgtgatggatggacgcgtgaktcgtgacgttgcgattggtgcgactttgacctcgtttggttttgcgtttccgtcggtgcctcggcccggccccggcgcgcgtcggcatgtgacgtcccacgtgcgcctcgcctccacctccaccgccgcgctcctctccgctcctaggattgttccttttttttaaaaaaatatacatttttggccccttctacagcttcttccctttgaattttttttcgaaaccgaactcttccatcaattccttcattgcttcttttactcgctttctgaaacaaacaagagtgtaggtgtatcagttgtgtgccattctcgtctcttctccgcgacgcgttcgctttctctcccacccaaaacccccagagagggaagagaaacgcctccctcccctctcctcccccgacccaccctgcacctccttcctcgtcgacgccatggcagcaccggagtgaagcagccagccagccgcccggatttcaccatttggtcccgggtttcgcccggatctgggtctctcttcaaccgtcttctccaatctggcggtgctatagctcgccgcgcccggttggggacaaggcccagtaggcgctagccaaacagtgttgagcgcctcctcccctcctcgcgcctcggcgcacggccggcgagaaggttttgaggggcggcgagcttcttcaatctgcctccatctcggtttgaatcggtatgcatatactagcatctcmctgtagactgtagtaatacgaaattgtactagtagtttatgtatgcgtcgccgtcggtttgatctccagaaccatcgctgtcagcgagtagcattagcacttactgcgagcttatggtccctggggatctagtattagtttgtggatttctccatttgatgttgacatgctacagtatctccttcgcccatcatactactagaagcgtttccttttgcgcttttgtcgaatggaaaagatttgtagkttttttaaggtgtaaatcaagtttgatttttattttttgttcacctgcatctgttatgaaaaattgttgtttttcccttgttgatgctacagatgttctatgactgcatcatcaggttcataagtcctgcttctaatcaatggtgctaacagatgtttctgttttgtacagagtggtgtagcaaataacatcattttcggaggca

SEQ ID NO: 5225 - DNA, 2000 bp, Oryza sativa
cgcatatatgcaagagaattgaaactaatagctgctatcataatacacctcctatatatttttgtgtgcattgtgtttgtgcatacaataaacacttttttagtaggtacaacaaacatattgccagtactttctgatggtaagtgcatgccttctttttgttggcaacaaggtgcaacacttttcttgggcaccagtgaggcagtgacttgaagatgttaatggtggtgcatgctatggataatgaatgtctgaaatatattttttttctggcagayaaactaccgkmtatatatatatatatcacttttctaaggcaacattatgatatacacatacaaggccaatgtgtattgtaggaatagtgttgagaaatataattgaactactctaaggctgagttctttccytaatttttccaactcacctctctcgttttctacacgcacgctttttaaactgctaaacggtgcgttttttttamamaaaattctatataaaagttgctttaaaaatcatattaatctattttttaaaaaaatagctaaaacaatgcgttattcgttttacatgccgcggaggaggggttcccaaaccatcctcccgaatacagcctaaatctttatggcgaccatgatactgttaagaggcaaccaacgtacactgccaaacacagtgaattgatgatggaggagaagtaaataaatctatctagatcaacacccatgcccaaggacatctagaggcaacaactacaaataaaaacaagtggcatgtcaacaacaaggagaaggattctatgaggtggcttgacacattagcaaggatagaactggaattttatcaagatcagggttggaatagattgtattaggctaagctgtcccttttttgcatggacatgagacaaccagcttgcttgcttgagacttgagagccatatgtaagagtttggccaaagagataagtgagtttatctgagcaaattgtggcctcataatatatatatttcatttaaggaacatggatctataccatttggcttaaataggggcatatatgaatcgaccacgggtgtgttcggacgccccctcttctcaacccatctccctcgttttctgcgcgcacacttttcaaactgctaaatggtgcgttttttgcaaaaaaaatttgtatacgaaatttgcttaaaaatcaaattaatctatttttgaaaaaatagctaatacttaattaatcacgtactaatggatcgctccgttttccgtgcgggagggtaaggttcccaaccatggccaatgaacacaacctaggtttatacatctcaaaataaacttactaaaacattactcccttcgtttcacaatgtaagtcattctagcatttctcattaacatcaatatgaatgtgagaaatgctagaatgacttacgttgtgaaacggagaaagtattaaagaaaaagatagatttactgaaccccaactccaagtcaatttctctaaattcataggcgcatccaagcatttgtaagctccaactcctattctcaaattccttgttctcagttctacaaaccaaactttgtgcaaggataattggtgattatattagtgtatatttaagtacttttcatctaaaagaagtgcatgttaaggtactttttatgctaaaccccctagtgcctcctgttgacatgtttactcctcctccggtccgcatggaaaacgtgggagtaggtgggggcaacagtgaaacgagtgtaattacgtataagaacaagggctaaactgaaaaatggatttcccaaaccaaaagcaaaaaaaaaaaaggggaaaaaagatagagtggggagagagtcaagagaggggcgtttagcacacgtggaagctgacgataaatttttttcccccaattccgcctctttgctttgcgtgcgaatttgatctcgaagcttccgccaagcagcgagctttcccgatccgcgggggcgtcgaatcct

SEQ ID NO: 5226 - DNA, 2000 bp, Oryza sativa
cccatcgcccggcgccacctccactcccgccgcatgcttcaccgccgctcgtctccccgccagcccttcacctccgccgacaccgatatgcgcttgtgtgttgatgtcgggcgccagattctgggcgttaccactgactgcggttaattttgttggctacattggtaatctattcatgacacggggaattttgttattactggatttggggctttgtggatgtggatgaacagttcagggaaaaaggaaatgacgaaaagcaaaattattttcttgctttttttgttgagtgcctgatgtagtgaattgttgatgcatgttgacacgcggcaaatggagatgactggagctcttggagttgggaggacccttcaaactggagctgcccataatggtttaccagtttggtatggtttccattgattccaataatctcattcacgtttcgttgcgttggcaagtctatgagatcgtctgaaagttgaattgattctgggtgcttcgattaatatcgcaaacaactatcgaactgtcatatgttaacgtcagagtgttgatgcatttctggtgatagccattcaggactgaaaacatgaaatttgtgaagaaactgctctaaggggtttcatcatgctactcttcaagataagctatgaaagtatttctgtactttgatgccttatttccacatttkgatgtctcattaagacacgacacgtttactaaacctacacgagaattggttctctttacacatgtctagaaatttgaagacccggataattacattcccggtctcgtacgcttacgcacgggcttgtgtgtgcacataaatggctagaacatgactccgcaacccaccaaaatggcttctagctatattttgtttgacaacttgatttctggaaaattaaacgtaacggcatctccttctgcgctggaatcaaacagccaaggctactgttggaagtcacgcaaccaattataacttgcctctcttgtcgtgtgtaaatggtactacgagcatgaccacactagagattatgtaagctaaccacgcttaggggttaaatatactttttcaaaaatagaacacaaaagaataagtaaaaatatgattttcgttgcttcacatgaaaattaagaaggtgagggcctgggcgtgcctacgaattctcaatggaaaacatttgtgaaataggagatttctagaagaactatgagatacattccaaaaaggaccacataggaaactttttatcaggtttgaatcctttatagtccctactttatttttgcattgttctaaatgaggttcaaatgacaaattgatcagaatacatgtaataaagaaaaaatcatgcaggcaaagtcaaaataaaggagagtaatgttaacgcacctggcaatgtgacaacaatctccacttacatctgattatgtatctacaaatgtgaactacctagacagaaaaataaatactcaattaggtttaactcaacattcacataagggtaaatggttttccaaaataggttcggcagttttgaaacatgtccataattttacgtataacttccgtgataagttgcttgacttgttggcatgaggcacatggaatgttccagaacagcacacaattcacaagaacactactgtccacactcatgcctctcatgagcaaccaggtggcccacggggcccacagtatgccacttacatattccttgtgtgcacacaaaaaaacaaacagcagaggaaaactaactacagggtagaagccaagacggaaaggaaggatcataattagtttaataaaaaaagataagaaaaaaacaaggttctcagtgtggtgtttgtcaggacagtgcaaaactccactaaagatgtgctcatgtgctgtacctgtgttctatatttagttcttcttgagagatagagatcaagcagaggaggcaccgctaggtggtgtgttcagcgggctttaggaggttttggca

SEQ ID NO: 5227 - DNA, 2000 bp, Oryza sativa
ccaattctagtagtcagcaacgtcactaataaagtataggaaaattatagtcaaagttatgcaccccttgttcacatatgtaaacacgaggaaacataaatttgaaaacatattgaataaactcccaagctcactatccgattctctattgcctaggaccagaggcgaagccaaaattttctcaaccctaaagcttaattaaagtaatcatcataggttattttttcttttaattttcaaaatttggagtgttattttaatgagtatttagggttaggagtaaagctttatctctaactgccctactcctgttccgccctgtccatggcatttatcaagcgaagtacggtgcataggcatgggttcaaagtcaaactcaatcattttacagttttttcttttaataaattgatttatatataaactttatggtccatttatttctctaattctggttatccctaatgatatggtttcactaactaaagatgacatattgtattatatagtcacgatagtttataatccctgtttcaaataggaaatgtccatcatggactctttcttataatattatttatttctcttatttttcgttggagtatttcggaactaattccacggagtgacccaatagcatagaattaattaagtattagtatttttttaaaaaaaatggattaatatgaaaatatgcgctagtgtgtaaattaaattactcctttcgtcctttctagaggatcatttggtactttggcacctattaaaaaccgaattttgctcctttctatatcagcttcaatggattttatcctatcaaaatattgtagcaatagacaatcgtttggcatgtgtggagatttgctcaaacgttgtaaacaagaacttgtgtcatcttccatccatggcgtttaaaggctgtggtactctgctagtctgctgcataagatggtcgggcaatctctagccaaaaaacaaaacaaaaaaagaagaagaagaaagaaaagaaaagacagagagcatgtcaaccatatctgatgaccattgacaaattattgcctttgatgtagcagctgaaaggacttcagagatgtcaaaatcaaggagataaaaacagagactaatcgctgattactagaaatatttgatgaccaggaactaatcgttggagtatatggctggcgggaccggcggctatgcaaaattcaagatcagaaaataagtaatactagatgccctaggtggacggtcgattttagttgagagctattttggcaatcattcgattcggagatgagtttttccaaggcaatttaaatgttttttctgtcctttttttttctttttcaaggattgtttccgttagagattaattagtatgattcacagaccacatgcgctggttgttttgacgacgttaacttttaatatatctttaaccattcattctattcaatctttcacaaatatgtaagagtgtaaatggtgcttaaaatacgtttaacaaaaaccaagttacaaaaaattaaataataattacatgatttttaataagatgaatggttaaacatatttttagaagtcaatggttttacatgttaaatatcaggatcagtacagtactataaatcgctaaaatacatagaatgattcttagagtggatttaagttgatttttcatattgtaggttgacatctaagctagctatgatgtgtactccgacaatatgctaccggcaacgacattttcttcgtcttcgatcaatcattgaattagggtttacggttagattaattcaaagcaagggagctcatcgctgactctagatatatttctgtcactgtttgattgctcgcatgattcgaaattcaatatttctgtcatcactgtttgattgctcgcatgattagagaaattaaatgaaccagcggtttcaagtcaaactctcaggtaggccaacctccgatcctctcgtgacagctttaccattgccagcaca

SEQ ID NO: 5228 - DNA, 2000 bp, Oryza sativa
cagcagactagcagagtaccacagcctttaaacgccatggatggaagatgacacaagttcttgtttacaacgtttgagcaaatctccacacatgccaaacgattgtctattgctacaatattttgataggataaaatccattgaagctgatatagaaaggagcaaaattcggtttttaataggtgccaaagtaccaaatgatcctctagaaaggacgaaaggagtaatttaatttacacactagcgcatattttcatattaatccattttttttaaaaaaatactaatacttaattaattctatgctattgggtcactccgtggaattagttccgaaatactccaacgaaaaataagagaaataaataatattataagaaagagtccatgatggacatttcctatttgaaacagggattataaactatcgtgactatataatacaatatgtcatctttagttagtgaaaccatatcattagggataaccagaattagagaaataaatggaccataaagtttatatataaatcaatttattaaaagaaaaaactgtaaaatgattgagtttgactttgaacccatgcctatgcaccgtacttcgcttgataaatgccatggacagggcggaacaggagtagggcagttagagataaagctttactcctaaccctaaatactcattaaaataacactccaaattttgaaaattaaaagaaaaaataacctatgatgattactttaattaagctttagggttgagaaaattttggcttcgcctctggtcctaggcaatagagaatcggatagtgagcttgggagtttattcaatatgttttcaaatttatgtttcctcgtgtttacatatgtgaacaaggggtgcataactttgactataattttcctatactttattagtgacgttgctgactactagaattggccagccggcatctcagtcacacttgcatccgaggatgatttaaacaagaatgaatatttggtagactcaaatagaccctattgaaatgtaatcgacgaaattaccctccttttaagtctcccttcgcagtaacgtaattgtgtctggtcaacgcacaatttcggtcagtaactccctggcccaccaccactcttctttgggggaaaatacgtggtggaaaccttgtagacagtagaaacttagaaactattgttggatcgaaaaatgggcgtccgatattcgtccacgtcatcccgactaaatattttactcacagatttactaatgagtaaaaattttactgcacataataacgtggatgaatcttaaacgtccatttagtccttcaagtttcaccgaaagctcaatttagtctttcaggttttattttgtccacgtagatcctctaagtacttgttttggcttaaaatcatccttgtacccactttaatataccatatggctatttttagtcgataattcttttagaaaatgtcacttttgcccttaatttgtatacatctatacaccggaaaaaaaaccaaaatgaataaatacgtcccattatttcaacatgtgcatataaaacttgagcttaatagctaccgtatacacttgcaagtacataatttatttttttttacatatattgctatgcattatctataaaaagaatttattgcatgcaatttttctcttatatatgtgaatgaggaggtataagtgtcatttatcatgagagttattggttatgtgggtttaaggataagtttgaattaaaataaaaacttgaaggactaatatggacagattgaaacattaagaactaaactgatcattgtatgaaacttgaaggaccactttagctattcaccattttttaatccactgtatttatcgtttccaccacatattttcctcttcttccgagtatttatggcgtacttgcaaagtggcaatacggtggcgtattttccccctcggccaccgaaacctctctctcctcgagctagaccacc

SEQ ID NO: 5229 - DNA, 2000 bp, Oryza sativa
tgacaaggccgttgttgttggaggtggtgggacggggaaactcagacgcaggtgtaggggcggtggcggtggcggtggcggtggtggtttggtcggttttcgcagagtcggcaaccgcaacgctcccctagcggtggcattagtggagagatggcggcaacgaggagagaggtgcagagccacagcggtggtaacgccgaatggcttggcgatggaccaatgtgccatggatgtgtgggttgaggcggtgaggctaccagcgagcaggtggtgggcgacaccggtgaggttgtgcggttgcaattgcaaactctcctctcgagcttgcttggttctagaactgagaatagggagatgaaatgtgatctaattcgacctattcatccaggggcatacacattcgagaaaaaaatcgaggaaatataatttggaaatgtaagaaacagagcaatggcattataacgaatgcccttcgtttgagagtggcatttgatcaaattctattttaatgatggtattctagcgaatctaatttttttagatggcagatatacaaatttctcaaggtgcggagagtgaaagggagagaaaaaagatgaggaggagacattcaatgttttctgatgcgacaaatttatggagccttttaactttacagagcataagcccctcaactccgtgacaaacaagcaagttttgtggaaaagaaaatgatcaacacatgatgacaaaaaaaaaagatccaagtgtaatctctaacgaaaatgggccttaaaaagactaggtaagtggcttggagaaaatctcatttcggaatttgccaaaatatcgctcagctcatctctcaaccagtgtgtcatctgctgctctcttcgttctaaaataagtacaccttattagttcaaatttaaattggagtgtgtatttattttagaacagatggagtattattttttttcgaattgatcttaaatcttaaatcttgcgtagccgccagtcccgccaaacaaaaactactctatctactcctgagcatcttcaaataatacaattacaatagtactgcagggaagcctcgtagtctctgttttttcctccttgatcttgacatctctgcagccctttcagatgctacatcgaagacaacgattggtcatcgagtctggttggcgtatatttttcatttttatcaccgtgcgccagggttcaccaccctcggtaacgagcgatattttgtgattctgcagaagccgttggtaaaccaataaaaaccgacaaaatctaaaaatttcttatcaaacaattaaattttagtttgattttttctcccctataaaaactgagctatttgtattttgacccggtccagaaatccggatttcctagttatcctttgcttttgtaaatcgtgaggacgcctactccctccgtcccataaaaaaccaagctagtattgggtgtgacacattttagtactacgaatctggacatatctatgtcaagattcattgaactagaatatgtcacatccagtcctaattctttttttcgggacgaagggagtaatggcctaggtatgttaaagctcagccgttggtgcgattttgaagaggtttttttttttcatgcgcaacttacgacctagttgacacaccttcaactctagctccgtctcttttggagcatgagtttaaccaaacggtttcaactttcaactctaaaaaaagaagtgaatcaagttgaagtggtctcacaaaatgaataagtagagttaagtttagacagcttcacaactacagtctacacttaaaatctagagttatattagccataccaaacgggccattagtccatcaaatttcatctgagattcaatttaatatccaatgtttcaatatataaatttatccttttcgaatacatctaaattcacttgtgccacctcgcgaatcatggttagttattattgccccttattcgcatcaattatgaaaggagaa

SEQ ID NO: 5230 - DNA, 2000 bp, Oryza sativa
tcgttgtcttcgatgtagcatctgaaagggctgcagagatgtcaagatcaaggaggaaaaaacagagactacgaggcttccctgcagtactattgtaattgtattatttgaagatgctcaggagtagatagagtagtttttgtttggcgggactggcggctacgcaagatttaagatttaagatcaattcgaaaaaaaataatactccatctgttctaaaataaatacacactccaatttaaatttgaactaataaggtgtacttattttagaacgaagagagcagcagatgacacactggttgagagatgagctgagcgatattttggcaaattccgaaatgagattttctccaagccacttacctagtctttttaaggcccattttcgttagagattacacttggatcttttttttttgtcatcatgtgttgatcattttcttttccacaaaacttgcttgtttgtcacggagttgaggggcttatgctctgtaaagttaaaaggctccataaatttgtcgcatcagaaaacattgaatgtctcctcctcatcttttttctctccctttcactctccgcaccttgagaaatttgtatatctgccatctaaaaaaattagattcgctagaataccatcattaaaatagaatttgatcaaatgccactctcaaacgaagggcattcgttataatgccattgctctgtttcttacatttccaaattatatttcctcgatttttttctcgaatgtgtatgcccctggatgaataggtcgaattagatcacatttcatctccctattctcagttctagaaccaagcaagctcgagaggagagtttgcaattgcaaccgcacaacctcaccggtgtcgcccaccacctgctcgctggtagcctcaccgcctcaacccacacatccatggcacattggtccatcgccaagccattcggcgttaccaccgctgtggctctgcacctctctcctcgttgccgccatctctccactaatgccaccgctaggggagcgttgcggttgccgactctgcgaaaaccgaccaaaccaccaccgccaccgccaccgccaccgcccctacacctgcgtctgagtttccccgtcccaccacctccaacaacaacggccttgtcatttcctctaccgcgcgtggcgaagacgaaagaaggaaactaactactagcacaacggcttcaccgagtaagcgctcggctcctgcccgatgaggactcctatgtctctttcctcaaggattgcaccggcaacttcgccgtctctggcctccctttgcctctcaccaaccggctggtgctcgcctatgcggtgtttggggacacggaggcagcgtgccaggtgttcaacgaaatgtcagacaagagcggaatcacctgggcgatcatggtctcggcctactccgatgggtgcttctatcacgacacgttacattggtctcctctcgcgcttactcggttctagaacacacaatggagggatgaaatgtggtctggttcaacctattcatctaggggcataaatgtccgagagaaaataaatttgaggaaaaataatttggaaatgcaagaaacgatgaaaatgatattttagcgaataccccttgcttgagagtggcatttgatctaatcccattttgacgatgatattataacgaaaccaattcttatggatggtctatatgcaaatttctccatgtaggatgtcatgttgtagttctatatatgcgtggggtaatttaaaagctaatactaaaaataaacatcgaagaaactaattaaagtcaaatttaaaattaagttataaaatttaaatattaatagaggttgattttatataaaacaaatgatgtgcctaaaccactttctccggtcaaacactccgtccccacctatcactcgactagtcgaattcccgaacctcctctacactagccgcctcgtgacaacttaccatttaccatcgccagcaca

SEQ ID NO: 5231 - DNA, 2000 bp, Oryza sativa
ggaggcggaggtgggctagttagaggcggtgcaaggcgatggaggtggaggcggaggcgggaggcggcgcacgccgatgtagtcaggcaagcacgaaggagatgagaagacggtgtgaactgaggaggatgggaatggtttggatggatgcgagagccggagggcacctctctgcctctagggtttctagcaaattagtgggcttattgggcccaattcggtcatttcggttaaccgagggctctgactgaattgaccgaacagatttaagtctttcactggtcgagaccgaatttctcagtctcggttttttcggtcttggtcttttcggttcggttcttcggtttggtcttactctgcccaacccgactcaaatccagtgctctactcaaccaatcctcacacgaactgataagattgaagtgctctaagtgaggaaaaacctcactaagtttggtgccaatccaaccacggttgagcctccaatcactgatttgataaagatcgggtaacaaccactaagctgaacaatctgcaactcttcttctccactctcctccccctctcttgtgtttaatttgctagttgcttctcctctctccaatggctgctgctctctctctctcaatggaggctaggttttcgtttgcaccacaaaaatatgaggcaatcttcatcattgatgaagacatgtatcaatagctcatatttgtaagacttttggactagaatgggctgagagcaaaggctctatgtggatggagtttagcctaacaaactccacctcccgacatcatggagcacctggctgccttccggtagtcataccaatgagctggcaacaaaccttgagattctccattgtcatcaccttggtcaacaagtcagccccattatcatcggtgcagactttctcaagccgcattttccgagaacttaacacatcacgaatcaaatgattacgcacgtcagtgtgctttgaccttgagtggtatagcagcatgtgaggtctcagatatgatcaacggctagtgtagccttcttccgcaaatatgaactcagggagattggaagttaatattcaaggaagaagaccacactagccatcgactacatctgattgggtttagaccacaagctctggatccttcatattggtgtttgtggctctaaattaagtttgtctagacttatcctggtgtatgttggcttgtatatatctgtctagatctttcttctcacttggcatgtcccctcttctcttatggagtcttgtttttaaactctcggggtgctccaagaactaggaagacaagtatggatacgatccgagtaatccttgtaatgtccgagtagaactcttcttcaacttctttgtctgaaatacctttcgtatatgaggcatgattctgtattaagaattggtatatagtgggctccgtcgggtctaactctaagagtattgggtaccccttatcgttaacactgacataattacccttggaagttattatcaacggaagcccataattaagagactagtgtaaattaatctttcaagcagggtataactatatccccgtatagtggagctattagttattctctgggtaggtagttgcttccttccctgtggaagtggatgggtattcaaatttcaactatgccatccaatcaagccacgacgatccacagccatagtgtaaaaattcaagtcaattgcttacaacttcactcaacatgaccaatatatatatactaattaaatttgtggaacttggataatgcaatctgcatattcaaaattatacacatggagtcatgcatggacaagaaaatgcaggcaattacgcacccaattgtagcaagccactcgcaaattttcgcattttttctttgccgccatcacacctaaccgactccttttccacacaaacagattataaataagcaccatatttccaactccgttcatcccacgaaacaacacgagacagaaa

SEQ ID NO: 5232 - DNA, 1662 bp, Oryza sativa
cccaaagggraaaaawaaaaactcctygggcttttcgcttttccgctgcagcagcagcagccgttgtcctccgcggccgccggagcggcgcggggcgggacacgtatcgccccacccgcccacacgcacgcaacgcgactcggcatccgcaatccgcatcgtcgtcgtcgtgtcgagccgggtccgcgacgaaaccgaccgcgcgcgcatgtctcccgcctgcctggcgggcggttacgattcggtcgccctcccatgccaccacgtgtgcgctcctactccttacccgccaaagcaacagtggagagaaaactaaaaaaaagagaatgcgttagaatatgtcgtggaataatgggaggggataagcgatgctgaggtagcggccgaatcttcccgacgcacgccgaacatgcatgatacgagtatatgatttgatttgatgatttttctggtgccggtaccttgaggttttttttctgtcctgactcctgagatgaaggaaaaggctcgatcgatgatgcgatcggcgatgatgagagtggtggttccaagtaacgtgggggaaatctcgtctctcggcgcaatgctataaacatgcggatgaccatcaccggagtaagtagagtaatttagtcgtacttgtacctactggaacagtgaccacccaacgagcctcacattcactgaatcatactagtcgtactactactactacaacactggaacggatagaaaacgataaatgacgccgcataatcgacaacgcatgggaccaaactcatgcttatctgctcttgtactcgtgcttatctcaaatccacctcattttacatgcccctttttgccacagcaactttcggtcccatcatggcatatttgcaaacgcaaaatagtttataaataaaattttttatatgcgtgtttttatagtgatataaaagcaacggttgaaagataaatttcgataaaaaaaccttaaaatcagctttaaatttaagattaaaaatttaaattttgactgataataagtattagcgaaaagatgatgtcctaatttccccttttcgctccaccccatgacgttgtccgacatctaaatactactcctaatcaacttgcaacctaagataatttagtatagtacacgtagtacagcctttttggagcagtaacaaaagacgcgcgggccacacgtccgtgcagttgcagccgccgctgcatccccaccgcgaaaaccacggcaaaatttagcggcggccgctgtggccgcctcacccccccgcgcctggctgtccacagcaacgcacgcacccgcacccgcaccgccgacccgaccgcggcgccgagctgtcccaattctgctgacctcggccgtgacgccatcctcgcacgggtccaatccccgacgcaggaggtggcctccttcctcgaaacccaccacctcaccaccacacgtgccccatttcatcccatctcctcttcttcccgcagccgccgactccgctttgactcatccccccgccgccgaaccttccagactacctccctctatatatccccccctccgcccgccatttctccccattcgagaaatccctcacaacccacaacattttcaaacaacgcaaagcagtagcagcagcgagaagcaagcaagaagcg

SEQ ID NO: 5233 - DNA, 2000 bp, Oryza sativa
gggttgtcaatgccatagataagaaatgtcgcgctttccagtggacgggtatggatgcagttcagggaggacgatgcattatgtcttggacgagtgtttgtcgccccagagctatcggtggtttgggtattgtggacttgtggcttcattcttcaccttcgctagctctggcttcagcgctcaggccacctctattgggctgacctgaaggccccctcgagagatatgtctgcgtcgttcatcttcttcgtgccagggaacgacacgtctctcttttagagaaaccaatggattgagggtcgctcggtggcctccttggtgcctggcctcctccttgccgtgccaccacatctccgggcatcgcgcacaatcacctctgctctctctaacaacttatgggtgggggacatccgtggcgttctcacggtccctatcatttcccaattcctcgtgatctgggacacggtgttttgtgtccagctcttagcgttggacaagcgattggtgttacttggcttaccagacatttttcctcggccaacactcctttgcttgcgccaatctactttgtcaggctaaaggccctgctaagtgtaagcttttcctgtagcttgcgttccaaaagtgccgctggatgaccaaccttcttctaaagcgtggtattgacagccactcagtctgtcccctccgtgcccaagaaatggagacggtgaatcacatcctacttgattgtgttttcgctcacmaggtctggcatcatgttctgtctcctcctggctagsstrmccttgtcccctcccgtggttgcacactctaggtctggtggccgactactagggcytsyttgtcagagcacctcataagggtktcagctccctygtactcccgatatcttggcagctgtggaaggagtgaaactctggggtgtgcgakatctctctctctctctctctctctctctctctctctctctctcgttggtttcagtagtgttggagtctgtcttttaggaaggccgtctgtgatcatctgctagtggtactgcttttgggggctttctaggaatatagtggggctactcctctaccatccctcgctataggagttttttgtttttaagtaacctttccccttgtcacttttttcctttttcgattttttcttcccctgtcccccctgcaacacccttctagacgttttgcattgtgtaactaaactccgtcttcttctattatattgacgtgtatttcttttagcgtgttagtgaaaaaagagggtacctatgctatttgctacatgcatgaggctaacctctcacgtttagacgtgttgctactgctaggttgcacccacgtggccacgtgtatgtaacgttagtggtgacagtgtaatagtgtttgcatgtcagtatgtgtgaatgcttgcatatgtgggaaagaaaatattgtgttccagaaagtattcatctatcgaaaaaaacgaaactgtatatatctgcatggtgtgaaatgcttgcattgggccgagccgtgaagccgccccgaccccatactttccgcacgagcaggccgtcgaggccgaggtggtgacccatagataagcccacataaccaactcatcaagcccacgaaccaaaccgacgaggcaggtgatacacgcggccaccgaccacggcgaccacgcacaccacatggccacattccccagatctggcaagcccgccccagccagggacaaaacgccgcgccagccgtcgattggctggccgagacgcgaccaccaacaacaacaagccgcgccagcgcagagcgagcgcgagcctcgtcccccccccctttctctctctcctccccctcggatctgcctgccctctgcccccaccgtttcaaacctccattcccccaggcgcacgaaccgagagggtcaggaggcgaggatcggaggggagattttcgttcgttccagattcgggacgtgaggggaggcgggagggggagatc

SEQ ID NO: 5234 - DNA, 2000 bp, Oryza sativa
gataccagcactryttcctgggactggtatcgattaacaggttaawttggagcgtcacgggcyagttccggtcggractagttcggggcgtgacarwcwcsctmastkgytkwswmgscaccagkwwwkrmkrawgatggccgaygtwgtcswaccgkctkagtcscacgtcgwcgcyyacgygsyattagmakyyaarmmwwkmyctatrygrcccatctgymattcacacwtmamrarkcatctgatkrgcmsmamwgacyatgtgggccccacakrtsaksctctctctgatcttmttystcatcymtstmkytcsmwwmtctmksttatakytyysytttgctcttywysttywmtswmktkrskywatcgrykkgcaggkgykrtgamakyrgcagatrwtgsctcrgaagcrkykkksaggscksrcgctkcwgktryrsaccwagtaggccagmgtagcgggwswkgsskwmkstgatgtggcyccgcyagsstacwtccctctcgcmakcsrcytmscmcwtgccgmmtccgtmstcatccysstctctmcmrgtatcgmmctmtgcgctcgcgccgmkgssykgactyyttggkggtgrgaggaggayrcagagaktagggtactaactkgtggsryttacragrrttccwcgcttamtcyrctgatttgawwwtattatactrwcackkrtcacatcagtaaaaccwksacmwaayascrtctkwagacctcgggtkctmwgrwwtyatcamggattragmgwcatgktatgtctgryatkacgkgmtkrtttgkcrcagmcaamyagtywcagmkycaccwraagtsggwgwsgagttgkgtrragctckctcacrawatkrmcyagagasstggagytrggtyyagscmrmkccacawytccwstsacgaaammyaactcstsamgckaaattkaagagttgsmrcatcwwctawasatgcyctrcatrgttrmwwacatgtgatkawracttgacatatctaaagtgaactcattcggtaacagacaacaatcaaacacgtgccaattctgcagtgcagctaggaggaatgtgcgcatcaccatttcagcttctgcattggaagtggattttcatcacactggaggggatatccgtctcgtatatttagcgtatcacttcarmysrytactgmarmamwtttaaaaaaaatagagagaagatgtattaacatgtatatcacttcacaaacatgcaagttcaaattcaacttctatatctcgcaacgaaaaaaacaaattaaactacaactagttaacagttaacgtatatccacaatcaagtttgtttttttcgttacgaaatatagaagctgaatttgaacttacatatttgtagagcgatatatcacatcttaatacatcttctcaaattttttaattttttttcataatcatttaagtgacatgcatacaacgagggaatatcccctccagggatgaaaatagtttccggcttctgcataccttgtgatgtccctctcttgtctagtactggcatgaatcggcacgcagcactgctgtggctgctgctgcttcatgtcatagtaacagtacattctcatgcaccggtgaccgatgcactgactggtcgtccgccacgcccaacaagaacaactactaggctagtactggaggactatcttttttccgagaaaattactctccatcccttcttatggagtaggagtattaaacaaacagaagaaaggataatgatactctgtttgggagtcctttccctccctttgatgcagcagcagcgtttttgattgcgcatttgcatggcgcgcggccagcccaacatcgcaacgcatcaaagtagggacgatatatatatatatactccgacgatcgatcccttgccttgctcacgtaccgagctgcttcaagaaaaaaaaatcaatggcgtctcagaagaaagcaaggacttgaagaagagctcatagt

SEQ ID NO: 5235 - DNA, 2000 bp, Oryza sativa
gcccgtgccacgccggggagaggtaccgcaggtagtccaccccgacgtacgccgccgccgcgacgcccagcccgccgccggccccggcgaggagccgccggaggctcgccgccagcccgcgcggcggcctcggcctcggcctcggcgccttccccctcgccgccctcgccatggtggcgtctccgcgagacggcgagagcttcacttggtcatggactgcgaaatggagtgaggtcagctcgagggaagctgggagatccgggctactttgggctaggttgcaggtgatgtttgaaccgtccgatcaaaaatatacggtccagattgatgggtgaggcgctatcatctccatcgggagaaccaggttgtatagcataggaataagtctattacatatcctctgtctttctcctaattgaatcgcctccatcaaccgcaaaaccaaatataatgtctctcctttcttcagaaacggttgcaaaccaactccttttgtagtttgggaagcgatttctactgatgtggcaggttttgaccatggtcgacttcacttagtcagtagtgaaactcacatatcaacgactctcctctcttctactcatctctcttctcttttcccatctttcctcctagaccggtggcacaaatcccgccgagagagcacggccatggtagttgtgggctgatggagcaggaacttgatgtgcattaccaccgtaccacgaggagttcgtggccctgaagctctagtatggactctatcgatggcaacagctccaatgccgcgtctactaggccaagggccgacatgccagccatggtgtttccatgaccttgaacatctcaagctactctatgacgtcgtgctatgggacagaaagtttctaggtctgaggtggcgtccgcataccttgcgcttgtgcaccgcaagcttgccgtgtcatcgcttgcgaggcatgtaacatcaattacccgtgctctcctccataagatttgtgtcaccggtctcagtggagagatggaaaaaagaggagagggaagaggaagagaggagagtcactgacatgtgggtcccacctgcttactcagcaaagtcaaccatggtcaacctgtcccattagcggaaattgcttcccaaaccacaaaggagttgatttacaccggtttcgaagatggagaggacgttatacccagttttgtagttgagggagacgattaatmwrgagcaagagatgagagaggtaaaatagacttactcctatacatacaaccaggcaggctggatcgggccaggcccaatatatggcccaatgcgacccaatgacctatacatctctctactatctcacatgcagcgatgcagagtcacgcatcctgccaaatgcataggtagaaaggacgatcaattcagggttaaaaaaatagtgcaatgtttataaactctttaattactttttttcagtcattatctaaaaaaatactaattttcagtagaaggtacgtaaggggaatatattttggaaggagtggctatagctagtactagcttttaggtgccaattataagctaattaagaagatgcacacattttcgattagccgagtgcctttataattaactaccgctgtttgcttctgcatacgtgtacccgatcgatcgaagcagctgagtccaacatgcgaagtgcagaggttgtaattgcccccttgcaaaaaaaaaaaaaagaaaaaaagaagaagaagcctctaatggaggaggtgagcatgcatgcggatcgagctggaaagcgccattaccggctccctcaaactccttaatctaccattatcatctcgtgatctcacctctcccatcattcttcttcgtgtttgcatcctataaattgctagtcactctccttgattcctcactcaactcagccacaagtatagctaatcaagctagctaagctaagctaagttagtatagtgtgatacctcttgtgaaggtagagagatca

SEQ ID NO: 5236 - DNA, 2000 bp, Oryza sativa
ctctctccacctaaaaaaatgtcccactccctcatttttatccactcctccctcattctctctccttatcctcccctccatctccctcatatatccgggcactcctctcctgagcaacggtagtagactcgagagcggttggccgtgggcgggagcaacgacggtgagctcaggagaggccggtcgcggccgggagtgacaacggaatgctcgagagaggccaacagtagtgggctcgggagcagctccctctaggttcgggaggggcggatttgccgccctcagctccgagggggtgataatgacggcagagcttgaggacggcagatctggtggtgtcgcccttggcaccgggaggggtgaggacgacaatagcgggtggtkacggtggagctcaatggcggcggatccagcaacgttgtcctcgggaggggcggatccgctgccctyaaccctagttgatggctgcgaggatgacgatgctgatgatggcaccttgggagctagggttttggccgacggcgggttagggtttcagtcgatttatttaggtcatatgataaaatcttaaaatctgtccgaaaatctctaaatgtggagctgaaaccagttgaaatcacggaccaaaaggggatcatttataattttcttgaaatcagtggttgttgttgctatcaatggatttggggagaaactgcagcctccgcatctcgctctcttgtgcgactctcgatttcaaacagtgaacggggatctcgtgcgagattgcaaggtgtggtcagagtggtggtgtagatccttcacaacaaagccacacctgcgaagccccacacggatggatgccacggcacggcgcatgatcgaacggctttgagacacatcgcgcgatagggccatttcgattttatatatttggatcatttctcacattttctcagagcgaccgacagagatcgatatatcctgataaacattatgttttacggatacacataatcttccacgacataacatacgaattttctagcttaatattttttttctcgctagctttatttaaaatggaaaggacacatcacacactacgcctcacacaaaaacgaaatacatgttcgcatatatgcataagcctctactctataaattacaaatattacagaggcgcaggcttctagactaatagcgtatatacatataattgtaatattacatatgtcactttatactagtcttttgcaatatgtagttgaaagtttatgtgaagaacttatgtagaatttgtaattcgtgaagaacttacatatgtcacattatatacgtatttcttctcttggtaccatttgaaattcgtgactttaaaacgatatgcgagtactccatgtagcaatgatccaagttacaattaaaaagttttaccttgagagctttctaaaggtagataaacaatgtaatcctgttttgattgtatacgaattctccacgtagcaactactacaagttacaataaaaatgtggcattgagagctctccagaagtagataaaaacagcgtagcacaatcctaatcctgttcagactgaataggaccccaagtactacaaatctacaatatcgtgcgcataaaaatcgaacccccaacccaaggccccaaaccttatttccgatcgtcggatccgactcgaacggtcacagccgttccacgcgaccccgacaccgatcctgaatcaaacggcacctcgcgggcgtcaaaaatcaggagccgtgctgccgctgcggacctatctttttttttttctctctcgttttccctcgggctacgcctcttcctctctctccgtccgcaggaggccgcagccgcttcgggatcgggaaccggaggaaaggggaaggaagggaaaaaggcaggcgacccggccgcgcattttccccccctccctctctctctctctytcgggggccccccttccccctaccaccaccaccamccgccgccgccgcacg

SEQ ID NO: 5237 - DNA, 2000 bp, Oryza sativa
  misc_feature (1)...(2000): n = A,T,C or G
aaaacaaaatcacatatggatatattccgacgatttttttaaaaattattattgaattatttttaaatgttgcacgatgtttcaccaggtatatcggaattgttttactgagtagatcgaaaatgtttcactcgtttaaatcgggtattgttttaccttatataaaaacaatgtttcagcaaatagtgaaagaatatttcagttcactgcaacatttgatccatacatggtgaaatattataagtacactaggtgaaacatttttcggtggaacaaaaaatgaaccgaattctcttaatagggggtttccaaaatatgtgggtttttttgttgcaatggaatatttcagttcactgcaatattagatctatacatagtgaaacattgtgagtacactaggtgaaacatttttggttgaacaaaaaataaaccaaattaccttaatagagggtttccaaaatatgtgggtgatttgttgcaatgacagataggagcaaagacgcggagggcctgcatgcagcgcgtgggggaggggctcgcatagtcgcagggggagcgcctgatcgggctcctccgcgccagtcgcccgggtttaagaattttcaggatgacttgcgtacggccaagacacgcgaacaaaacaaccaaaaaaaattccgcttctggtctttaacggttctacacgaagagcttagcaaccaaaatgacaaaaatatactcctaacgtttctaaaattgtgcataaaatttaaaatgctactctctccgtcctaacatatacrcgtttactctcgtcaaaaaaagcaaactagtccgtgtccacgtgacgtctgtcaatnatgkatatgaataaaagacaagtcacatataatattaatcatgttttatcatctaacaataatgaaaatacgaattataaaaaaatttcatataagacggacagtcaaaattggacacggaaacctagggtttgcctttttttgggacggagggagtagaccttaagatttgtcccaaaatataacaatttctctaccaacattctcttcccaaccaatcacaaccctctactattcgcttttttcatctacctccaccactcatccaattacaaccctccatcgttcacttctacctactttcttaataaccgtgtccaactctaaaacttttatatttagggaccgatggagtactaatactcctcccgaaatttaggggccatttggatgagtccctgtcacatcggatgtttggacactaattagaagtattaaatgtagactaatgataaaacccatctcagaactctagactaattcgtgagacaaattcattgagcctaattaatccatgattaacctatgtgatgctataataaatatgtgctaattataaattaattaggcttaaaaaatgtgtctcgcaaattagctcacacttatgcaattaattttaatattaatamatatttaataattttaattagtattaaacatctaatataacatggacttaaaatttagtcactatatcaaaacaccacgcttaaaattcaagtgttctaccccgctactacacctccacgtggttcggcacctgctggccggccaccgtatctcgtggcctatagacccggcctacattgactatccaaccccaaaccgctttactttctcatcacttctcgtcccccttaattaatccctgattacgagccctcatttcctccccccgcatccgtccaccgatgccctcattcacccactcacccccatcccccatcccactgacagtgggccccacactcttctgtccccaccgctcagcgaaacaccgtaggcgcacacgtgaagggtacacaggaatgcgtcttctctgaattcctctcacaattcctcatctgcaaaggaggagacctcggagagccggaggtggtagctaatggtggtggaaagccaacccgctttgcgccatctcccactcgcctcccgctcccg

SEQ ID NO: 5238 - DNA, 2000 bp, Oryza sativa
ttctccgttgctttcctcatcgagcctgcgagcttcaacggcgaggacagcgcccagtcgccctcctcccatgggtgacgagctcggcggcatggagcacgaggatgacgacgcatctgtctcctctcctctctctccctccatccctcccttggcggtatggagcactagtatgggccacacctgcaaaaactgacgaggaaccaatggcatactttggctacgcggtcatggcaaatatttggttccctctactcaggccggatgccacataagcgcattgtgaatggtcatagtagatacaacgtttccgtgaaaataagatttgaactaatacatctggattggtgagatcgtggtgaatggggtggggtttttttttcagttttttcctatgatgtaaaatttgggaagtttctttatttaagtgggatggttatgttgaactatattgtactaccccgtccaaaaaaaaagacaaaccctagttaggattgggtttttttggacggagggggtaggcaacactggttcttgattttatccttgtccaaatattatggaaactaggttgtatcattgatttattcaggtttgtagattcggatttaatttgtaaatactactccctccgtcaaatgatgccgaatggccaataagatgcacaatgatctccagcggttgaaaaaaaaaggaaatgtacttcaatgtctcagattgaccgaactgttaattcccaactgttacaaatgcccatggttctttaatatttgtttcccggtggtgtacctgatccagctcaccagttcagttaaatgaataatgaagtagtgcatacataattgaaggtgtaatgttgttgatttcctaatactctatgtttattacctaaaatgtctgttctgaagatgcatatgcctgaaatgtcttcaatattcttgctagactacatgtttgaaatgtttgttctgaagatgcatatgcctgaaatgctttcacaacatacgctgcgtgcctgcgtgtgtattaccgttgtagggttagcaccgacaaattttaaaatgagttagtggaagatgcacctttttttttccgtaaatacgtgagtggaagatgtatatatttttttgcgtgcgtcttctgaggctttggctaaccttaaatttgttagtgggatggggcagatggagagattgtggcccgagcaaaactgagacaatctggagtgtacgttgcttcatccaatggtctggcttatttaagatgacgtggctgcaccccaacacaagaaaatcaagattgatgtggtttcaccccaacacaagaaaatcatattaagggcttgtttactttgctactatttttaaccttatcttttttagtaaagttccaaaaaaatggttacatttagtttgttgctaaattttagtaagtacatatgaaatcttaccaaaatttagcaaccttactatagtgtagggatgagatgacgtggcttcaccacaacacaagaaaatcacattaaagacgtagtatatagaaatagaatgaattgtataagtataaaaaaatagaatactattttaaagacgtagtacatttaaagggtgtatttagttcccacgctaaaattagaagtttgaagaaaaaagttagaagtttatgtgtggaaaagttaaaagtttgaagaaaaagttaggatatgcggggtttatttttttaatatctgcctccaaagtttcaaaggaaagcatggtctggcacattttgttattagaaaacatcatctcatcactaggaatcaaataataggatatagctcgtggttccaactttgccggctgccgatgactgccaacaactcggccgtcggcaacatagattcccatttatatccccttgtagtactccataaacacgcagaaaacacgagccataatcgagcaatgaggagcagggtcgtgctgtacacatggatggtccgggggcacctccacccc

SEQ ID NO: 5239 - DNA, 2000 bp, Oryza sativa
gctgcgacccatcgaagtgaggaggtgacgaagtgattccgaacacctgcacatgttcctcctccaagtcatcttcgtcatcaccccgcatccccatcaacctcaactcgtggttgcaagaggatggatcgtccatcgtcggcactccggttcctcaacggcggctaccgctcagcgacctgcaagacacacagaatgagagaagagagcagttagggaccggagagaagtagaaaaccaagagaggagagaagagcagagataggtgtgtacggtgtacctgcgcatccggagcaccggagttgccgttgatgatagagatcgacggatctacgagaagaagatagcagagactgggtttggggagtgatgtgacaaagagctcacggagaaacggtgagcgggcgatagtggcaaaaaaaatgaaaaagaaagaggaaatcgagagcacggccaacgatccaaagactggagaggcggagatgagacaaggtcacggatccggcgaggcagcgaccctcggtggtagatccggcaaggcgttcatcagagacggcgacggagagggatggagagatggaggcgtggtcgcgtggaggtkgaggcgtggatcgacggaggcggaaagcggaggcggagcggtcaaggcggaggcggaggcggaggcgtgcgtggatcggcggaggcggctagggttagggttagggttgtgagggaggcggactggcggaggcgagaggacgcggtggcctttatatatgaggcgtgggcacgcggcggcggctcccgatgggcctcgtcgggccgtgcctaccgttatacaggcctgggccgtgtcggcccatcgtgccgtgccggcccatcgtgccgtgccggcccagcgtgctgctgcgggagcctaggcatggcccggctgtcgggccaggccggcacgggcacgaacactgacgggccgggccgtgcttgggccgggcagtcgggctgcgggccatatggccatctataggtgtgcagtttgtaacagcgtgtagtgaggcgtgtttcatctacagggtactagtatctactggtgctgcttgatttttgtcaggcgtgtgcttacgtagctcagcaattttggaccgtgatgggggttggcggcatcggtcttcgcatgagcacaatgaccccgaaggcccgaagcagaacatgtccgacttggtggacacatgcccgcacctactgcacgaacaacagcggatccagaaaaaaatagcagtatgatctgagcaaactatataaagttatagtccaccaacccatctacgtatggtaaaaaaatttagtggggtcttcgtggaggttctcatagtcttcacacctgtagtgaggctcgagacaccactgcccccatgctggatccgcccctgtgcacgaatcacaccatgaaaattacttagagcggatacaataaactgattcagcatgcatgctccaaaatacgacatatcatcttattcttatatggatgggaaaaaattgagaagggagagaaaagtgggcgactaatctggcgccggtgctagcacggcctcacacgctcatgcagccgtgaagacgattaagagcaagtttaatagtaggctgtaaaccgactataaatttatatggaagaaagataatttaaaaaataaagagggttgactcttatacaagagctagccattcacatacttcaagataaatacattaaatgcaaaggtgagagatagagagaggaggagaaaaatagagataaccttatggctgatctactatatatgttaacctaatataagctataagctcatacttggctctattattaaacttgctctaacagcatttacaatgctccacgctatacagtggccaacaattttcttttttaattatttttacatatattaacactaaacatatccaacgtgtctcgagctctcaagctactactgtactcttggacttcgatggggagagcc

SEQ ID NO: 5240 - DNA, 2000 bp, Oryza sativa
agcatgttaggataaatgcaagaaagataccccgaggagaaacccgggtcgcgtcctccggtccggaatagtcaaaggctgggtggactcgagcctagagcggctggatccgtctaccaatgaagtctgcagcgacttcataccccgacaagcctcatactcggagatcgtcgacaatgtcgatgaaggattggagagaaggggtcaaagggggctttgcggtccaagacgggatcttgtccggttgttcctcaggaacaacaaagacagggtccgaatctttgatctgaaggtagaaccacctcgtccaccacttgctgcgagaagagggacactggaaggggatgtaacgcgacttcaggccatcccgaagtcggaacccgacgcatccagacaccctgttgggctccatccaasgcagctcatagtagaagcgaaagagatcgagaaacggctctaccccaatgtaggcctcacaaagatgagaaaagatgctaagaaaggcgatggaattkgggttcaggtggagcagagaaagaccgtagaagttcatgactaagagaagaaattcggaaggcggagggagaaaaccgcagagaatgtagtcttcaatcgcaaccatgcgacctaagacgggctggggattagtacctcctgcttccctttccatggtcccacgaccgggaagggcgccgtcttcctgaatcttcttcagcgacgcgctggtggaggatgatttgccaagatccatcgtcgatcggagatcgccggagaaggggctaaggtcgacgaactagggtttcttgtggaagcggagaagactaagagcgtttgcaggcgggatgttttctgcacgatgggcggacttcaaaatggatccccaaaattcctttaaagagacgcactaccgacggtgcgaattccaaggaacggagagagatgcccgccgaaaatttctgggtccgttacgcgcaacagttttttggactttagtttaaattcgctcgtgaccattgggtttcaaacggtgttctcgactacgtcatgtctctacggtcctcgcaccaggaacgacaacaatctcgacacaggaagtcgcgaatggttacacgagctcatttaagcagaagtcgggggctactgtcagggttacgggttaggtataccctttactctttgatatacgtctcatatcggtatggtatacccacgcgtatacggatactctccgcatatattaaggaaacccctcacggagtttacaaatggaaggagtcatactcggacaagactgggtcatcaatgtatcgtgtaaagttcgatgtttccgagttctacttggaaaccgcctaacctgtgatataaaagggaccccccggggagggcctgaggcatcgaatctcagagccaacacaaccctcacagcatatgaagtcggagcctacaaggagccaaaccgctagggatctagtcgaaccaactcgactacgatctcgccggatccgtcgatttccattgttccctttgtaacctgtgttttccatcatataatcccacatcaactggattagagctattacctatcaaggggcctgaaccagtataatctttgtcttttgtctgcttgatgtcgtattacgtagatccttgtaccagcgtaccccaataacctctatatccggcctacgggtatcacccatcgacaacatgcaagatcaaattcaacttctacatgttacaacaaaawtaacaaattaaactgaaaatagttatcgcatattcgcaactatatttgttatttttgttacaacttgtagaaattaaatttaaagttgtttgtttgtggagtgatatatctttccccctgtaactataagtggattaatcgaactgtaccgctagcatcctgtagtgtagcaaagttagctagcagttctacgcgggaaggaatcgctggttttcttcactgacccgttatctgacctcatcgacatggcaaa

SEQ ID NO: 5241 - DNA, 2000 bp, Oryza sativa
aggaggcgagatgatactagtctatgaatacatggagaacatgagcttggatctctacatatttggtacccattcctaaccaaaaaaacaaattcattactcactgtagtctgttaatctttgtagaaatgtgatgcataattatcttctgtatattcctgtaaagctctgatcttctgcatgcttatcacacgggcctatttggaactgacaggagaagatcgtagactgcgagcctctctgaattgggtgcaaagattagacataatccgcgggatcgccataggtgtcgagtaccttcacaacgtgaaagttattcacagggatctgaaaccatccaacatactcctagatgacaatcggagacctaaggtagcagactttggcactgccaagctgtttatcaacgaccagactgatccaacattagttctgtcagcgtatgatttttaacttcattacttcagctaatgttcctattcaagtttttctggcattttctgcatgttttccttagaggtctcaactgaccgacaagctttttttttttkgttaatgaaggggctacatagccccagawtttgcagctcarggaatctgacgctcaagtgcgatgtgtatagctttggagttgtgttgctagagataatcagtggtaaaaggaacaggacattaccaacttttctcgtgaggtaagtgaacatataagtcgcacaattgatttgcctaaagcaatagcctaacgaattgagaagccagtgccaacagactgaactagcacccgcaaaaaatgacataaaagtcataatcagtactactctagatatgaattcaggcaaagttaataattttttgaaaggaaaaatatagctattagaaaatgcaaatgggcactatcatgtaagtgagtttttttctttttggcagacctgggagtcttggaaacagcatgagatcgaggacattcttgatttaggactgatcaaacctgagcctgatctcctgcttgggctagacaggtgcatccaaattgggcttctctgcgtacagcaatctcccgatgacaggcctaccatgaatcaggttgtctcaatgctaaccaaatacagttcacagatagccatgcccaagaatcccatgatcaacagcagatgcgagccttcagtttcacaagtagtatctgacacagagccggcctcacacgacagacctgggccgagcctgaactgaccgtctcgtgcttggctcggcatgtcacagctcacaagaaatcgcattggatagagagagtttgctgttgtttgtggccccctgaaccttcttctcagctattcctgtgttgattagtgtacttatccccatgtcccagcgtcagaacgccgtcaacactgaaaaattcgggtttctgatgaacggaggaaaatccatctcgtgtccttgaggtctttcggactattcttaagcttcagcaatcatgtgtacagaaatcgttgtaggaagtttttgcacacaagtgtactgtgatgaccagctaacaaaagcaaagcagctccaccctcataatgcactcatcatgcgtcaatgccaccaactaaacgggttacgcacgcatgcagcgctgacttctcgcaacttttacgagttttctcattctctccaaggtgattttagttcccaactttttcttcaaatttctaacttttccatcacatcaaaactttcctacacacacaaacttccaacttttccgtcacatcgttccaattttaatcaaactttcaattttagcatgaactaaacaaacccttagtatgatttcgtagcaacactttcctttgcgcgtgcacctccactcatagacccgtagacgaataaaaagtctcggccatacgttgactcacgggaattactccaaagctatttgtgaatcagtgaatgtgatgaccagacaagttatttcttcaggcttcacagtcacaggcaagtgaagaacaaaccaa

SEQ ID NO: 5242 - DNA, 2000 bp, Oryza sativa
ttcttacaaaaagtatacaagattttttgttttatcaactcatgtaatgtttctggtatccgacccaatttattgggacccaaccgacccaacaaaaccaaagtagctcccaacgaaaagggaagcttggcatgttagttttgacccgggacagctttagccgattctctatccgattcgagcccacaggccacagaggctaggtaccaacctcaacctaaactgctaaccagatacacgtcacctaatcaaccccctataataattgcttacttcaatagggtaggatgttgtgcaactacaactcataaataaaggagagttagctaatcagtggttggttgcgctgcatattgtcctgtacttcgttcattcgaaagatgctgtttttaaagaaagatgctgttgttaagagatgtatcgtctaaatatgttttatttatagaaccaagatgtccattttgtcataaaaaagttgttccaacacttttaataattcatctaaacaacctaataaaaacgctctcttaatactatttatctgtgttcgcggaagagtttatgatcttgagtgcttccaatactggtattgcgaaaaactggtccatagtaaaatgtgttaacatgttatttgatcatgacttcctgagttcatcgtcatactagctccaagagaaatataagtgttaggtcttgtttagatgcattatcggaatcataggtttacaaaagccttttgtgttgcaagtgtggactggaaagccgcaattttgtgttggttaaaaagtttgctatatagttatattaaatttagctactaaatgagcataggattacatggcacgattctagctatgaaggcgtgtcaccctatatatcattgaggcttcaaaacaaaatgcattaataaaaagttaaaatcattgaacttggcaagattaaaggtaacatagaaacaaacaacccctaacataaatataagactgataaacatgatccataataatcctatacaacatcgggagtcgactcatatgcaccaccagctatcaaaaattcaactcaccaccctaaattacatgaatcttaactactctctccgtttcacaatgtaagtcattttagcatttttcacattcatattgatgttaatgaatatagatattgtcattttagcatttctcacatttatattgatgttaatgaatctaaatagataaatgacttacatcgtgaaacggaggaagtagttttttacgaccatatgactattgcaatttcttagaaaatccctccactgtacaaccgtacttgagttgacattattgcacacatttgaagtgtatacagtgtccatcttagcgttgttccttgatacaacagtcaaccgactcaatccaatagatcgttgctaaatactaacgaatatcctttactttagtttcacacatcctctatcataataacattatcattatagacattgatatatgagataatagtaaaataaaacccacattactataccggtagtaacattacaacgtaacatcctcacccccttagtctcttcggccatccatcgtctaaccgtaaacaccaacgcctgagattaaagaaaaccacgaggaggaaaagtaaccgtaactaccaaaccaccaagcccaatacccataacaataaataattaataaaagagcgcgggcccaccacccaacccacctctcctctcccgcggtcaaactcgttccgggtcaacacacgcgtgacgcgcaggcgcagcgagctcagttacctctcctcctctctcgcgcgcgcttgccccgccatatataccggcgagctcgcgccgtgtcctcctgtctgtctgtacccccgccgcggctcacctggaaactgggcagattggacaatcgctcgagcgagctagcgagagagagcgcgagagagcgaggcggcgcgcgcggtggttgcggatttgtagcttagagcgcggggcc

SEQ ID NO: 5243 - DNA, 880 bp, Oryza sativa
ggggayttaaacttcattaaaactggaaacmccatatcttaatttatactaatttataagacatatcttttaaacaaactaagtcaaactcctctcaagataataataaaaaaaataaatcttatagtaataaattaaatattatatastttaaarctaataaatattttggaaaatttcaaataatgtcgatgaagaaaatttgaagagaaataatacttttgaagcatataggccgggtcattcggttgatattttatccttataaatttctcaaacatatcgtacaatacatgcccgcgtgaatgcacgggctaatttcctagttatatgaaaacaaataaaattagttatagatgaccgggagacaataaaagaaatctacgatatataggattattttatggacttgctgaaggaaggtgggcccaaatatgggtcatgtagcaaatgattgttggagcaaggcccagcccaaggtagcgtacatccagacgaattccgaagcttccggatactgacgctccgaaatgcgctggtgctggaagctgtggaaggaaggctctcgagtctggaagccgcatcgcgctttctccgctccacctccacgatccaacagatgggctgcaaccccaaaagagcgggaaatgttgagaagcctctggaacacctgcgatccgtccatcgtcttcctgttccatcgaggagtatatatatatatctgtccgtccgtcctacttgtcaaatccaatcgatccatctctgcacagctgcacttgcatttcagccagcgacaagaaagcaccaaatctctttgcattcaagcagcaggcaacattgttgaggagggatcaccgatcggatcggagcagtgaactga

SEQ ID NO: 5244 - DNA, 2000 bp, Oryza sativa
tttagtttgaaaagtattaacagaaatatagcttaaatatgcattttaatcacaaaagtacgagcctaattgcgattaacatgagccaaacttgtcatgcgatcatctggcaaaacaaacctgtagaacgaatctggtgaataattaacagtactatatccgatccgagcttgttcaccaaacatgttgtttcaggaacaccaaaatatgttcaggtccatgtggaactcaattatcaaatactaccactcattttgaacgcccatgacaatgcactctgctcttgattctcgaaggtcgtcgtcttctggattatttcctcgtcaaacacttcagaaacttctaccgggctgatacatttgactatgataccgagcagcattcggtagccttttcatcagggcaaaagcaaattatgattgtgtggtaaaactgcaagtgcatgtcaacgatgactactgaccatttactttatttaattcaggttgattagcggttagcacgaggaaatggaacggaaaaaagacgaagaagccaagaagaggaaagtgaacacaccgatctcacgctagcgacgtacggggaacttccacgtgctacagggagctacgcatctccgtcgatccttcgtttagtcgcattcagttaaaaaccaacaacctgatcattcgcttaacaaactgaattcccacaaaattaatctacgtgcacaacgaggccggactccaataaggttttcagtattcctaacattcattccctttaaagggacttctgatccggtgtatttttttttctctctggacgattgtttaatatataatagaagtgcctttttctctggatgatgtttaatagaagtgcctttttgttaatacccaacgtgttcaacatatgaaacatgctagccttaaaaaaatggaatcgcttgaaacgaatcgcatcgttatgtaggagtttactgaccgtatgatcaacaagatttgtaatttttctacttatccgttgagcttcactacatgtttaggttttcgatgacataggtaccgtttggatgtgtacagagaggggtgtggggctcaatttagatcctctgcagtggaggagagaatgcagagggagctacagtggggcagggtttagagkgtggcagatagaatatggttgtcagagagggggtattgttcaatgattaatcagagttctgtgaagtagtgtttataaatatatgtgtaaattttgtaatatatgaccttcttcgaatgcttaaatgcataaaactatataacccgaatatgtttgtacaatttttcaattgagcaactatagcttaacattaactcaaatatgtccagtttagattttcaataatcatagtactccactaaatagtaaccaggtttgttcgcattggataataaaacataaaaataatctaacgaaacatacacaacactaaataagatcctaaaagataaatctgtgtttttcttcactattcaccaaagaattgtctttttattattttcaaataaagtttagtttgaacttaagatttgacgagaacgtatttcttgcctatattatctttaatattttttattaaattacaaaccttttagattttatttcatgggtttttatttattttgatgatttttatggacatcgataaaatatgtttacctacactattgctaggcagaaatttcttttcacccatgtcaaagaaaatattgctacgcagccttaattagcatttctagaaaattctacttcttccatgtgtaagttgtactgcaggccaggcctagccacacacatcaaacaacgagcatgcggtggatttagcaatttcgtagcatccccgtgttctccccacacaaaccttcgcgccgcccatttttccacctcgtcgtccttacatataaaacgtactccactcttcaccggttaccatttcatatcccgatcgctgctactactaagcacagtgatcc

SEQ ID NO: 5245 - DNA, 2000 bp, Oryza sativa
aaacggcccaaaccagcggctcacacacaccttatccatgcaccgttttccgatgtgatgtacctttaaccgagaaagcacgacctcatcagaaatcctaatcagttaaaaataaagctgaaatttaaattttcaaacttaattttaagattaattttaagataattttgatgtagtttctttttagtattagctttgaagtcataaaaatacatatataaaatttttacctataaattcatttttatatgagcaaacgatggcactytacactgtataccattgtttcatatcagcacttcacaaaacttcgtggtactctccccgtccaacagtatatgcccatttttagaaattaagaaattaacgaaaggacaagtcatgcaaaaaaaaargaaaaacaaactactagtaagaaagttggtatgagaaaaataaactaataaacgttggtaggtgagacaaaataatactataaaagtcaataagtatggaataaagtactgtatcagaattttaaaatatcttatattttaagataaattaaaaagtaaaatcccttatattaagagagagtatatacatatttctttttctccttcaaggaaggaaaataacacatcattgaacgacagaatgagtaaccaaaaccatttttgaaggcactcctggtaaaacataggacaaaaaattgtaatactagtatagtacaaagagcatgaacggatatgaacaaaaaagtttcagaactggttgtccctttcttctgacctgactttgccacaatccggcgaagccgccatcagaagttagtagaacattcgacaagttacgactagtttcactttggatccgtataagaactcaaggggatttcaactccatccgttatggtcaatcaagaacatcttctagatcgaagtcaatagtccaacagaggcatctctgtcggaagaccccagatcaaagtttgccatctggccaactaatcctccagcgacggttaactgttatccctgctccaccatgtctgaccaaactttattctcccttcctctactctatatcgagattcatttagaatgtttctcattttagtataatgttgatttattttagaacggagagagtactctctctcgagattcatttagaatgtttctcattttagtataatgttggtttattttagaacggagagagtactctctccaaaagtgcaggagcagcacgtaacgtacccataccattctagtcgtgtattgatgattgattgcttgcttgctgtgagtatttttgtcacgaggatcaggtgaaacaattaaaaacacaacggccaaaaagacaatggccaccatgtgttatacacagtacacattcgcacttgcaaatcatggaacatgattagttacaggacgatccagtagttatagtactacggagtagtatcaacaatcaagcaagtagtttgtgaattgtgaccatcaaacagattcgtgtagtacaggttgaaatgaactgctcgccggcgtcgcagcggagtagtgccgggtcgtcgctactcacgagcgtgtgccacttccccgtcgttgtcgccacctacttctacctgcgcggattcccgtcccgaagtgacaatttccccgtgaaatccccccctatccacaagggtaaggcccgtgcagccgccgccaccgcctcctcgcacctcgtttcttccaccaccctcgcgcggcggcggccgtctgccgtctgccaatccgcccgcccagaaaagccgcctcgttccgttgtctcagcgcgtttgaccagcgatctactatccccccttccccctcctcctcccacgcctcacacactgacacacatatgggcataaatatgcctccgttgggagagatgccaacacgacacaccagctagtagtgtgcgggtttgggagaggtgcgtgtgcgccctgagctgctgctgccgcccggccgccacccgtgacccgcgcc

SEQ ID NO: 5246 - DNA, 2000 bp, Oryza sativa
acggtctagtaccagataagactttgagtgaaacttgcttgcacaagacttgcaattcaaggcgtggtccattgttcaagttgtgagtaagtgtagcttggagttttaggtggatgttcaaccttaattggtctccatcgaaccgctggtatataaacagtatattggaaaaaaggcaaatctcagtgggattttgagatttggtgggggattgttggaattaatgaatgggccttagcccactcgaagattaattctttggaaaatcacaaaagcccacctcatgggaaggcatgcatgtggagtttagtaccaccttgcttattctaggagagggggacctccttaaaagggaggatgccgtcctagccacttgaagcatgtgtggtggagagaagaggggaaacacacgcgcgcgctcgctcgcctcgcctcgccgggccggccgcggcgcgcgtgcacgacgtacgcgtcgaatggtccgaaaaattggctcctcacccttgcgcagatgcagcctccttttgcagttttgttttgctgcaaattcgaattcgtttttgttttggaaacgttccgaaaaatccggtgcgtgcaaacggcgtggagtccggataagttacgcgcgacttatccagttcggttacgcgcagtagagatcgtgcgggcgccctgatcaagcgacccttctctatataaaccgaccttccgtcttcacgcaacatatgcgatatcaatctagggtttgcctcctactctgtactgcgccgtcgctcgtagactactccatcccgctcgccggcgtgcaccggcgatcgggagagcaggtctccggaacctctgtcttcgacgtcctgcaccgggagaaggcggcaataaggtttttgggaagcgcttcgcgcgactgctccctgtttattcgcgacggctcgtcttcctcttcgctcgcgtgtttcgtgccttcgtagacacctgcgaaaagtttcgaccaagcagccggtctttccgtcacctcggtacgtgttcaatatgttgcgcatatttgatcttttcatgttatactgtgtagtttacatgtatagatctaatgatgcgttcatgctagttttcatctgtaatgtcatgatttatttatggaatagattaaatcattatatgtctataatctcaacaatcagttggtatcagaggagaacaccggtctccgaccaatagaagtatggctattatccatcccgaaaaccttgaacctatataatatccatgtctccttttctcttgcactataatttcatttgcattctcatatcagccgatccatacattatcgaaatacaacctgtaagtagggatcctgaggtcggggtataaccatcggcatattccgattgggagatgtagatgcaggttttgcagatgaatgtgttagacttgatttcgtagaggcatctaggtctttttctcattattttccaatgcatgcatcgatcaacaacttgcatggaggtgacgatcgaaacaaggggaaaaaaacaacaacttgcagtgaggcgatagtggtagttgtagtttggtcggtcattcgatctcgctatagagctacgacgacgtattcaaccatatataacacatggcaatgatcttgatcacctttagttaatttttgtgagcatgtacgagtagccacgtaaagtatcgatatgaagtaaattaaacctcaatttcccaaatgtcacgttcgcgtgcatggaattatttgctcctcttaatttgtgaataaaataatttgacgagaagcgtacgtacattgcaaagtcatcgaactttgcactataaatacccagcttatacagccatatatctcacaccagcaacaagctaatcatacatacatacaaatcaattccctttttaattagcaattagagagcttaattaattttgcatcgaaaatggcaacctccagcttgctagtagctgcagtgctcgcggcggcggcc

SEQ ID NO: 5247 - DNA, 2000 bp, Oryza sativa
gtcaggctgtcaccagaaagtcctttttccccggctagctcctgcatgcagctgatgagcgtcctgcatggagaagaaaagaacagatggtgacactgaattccaagagtgagtatcacttttattttaattgatacatactacatacatacagacaccggcgatgtgctaattgctccaaaaatctccagaaaaaacatatagtacaaatgcatatataccacaacagacaatgcaagcctccagaacggatgggatccgtctgcatgaggaatcaaaggacaaggatgatcagctggaaaccagattataaaatcatcaatcaatgccttttgattcgccgcgcgcttgtttaatgtttaatgggggggatgagtatccgctgtcacatgggcacaggaggggggatggatgccattacaatcctaatcatggaatcatggattaaacttttcccccttttcctttcatcaggataccaggccataatacttgcattgactagctcatttgggatgaatactataactccaaatgtttttgtctctgtcctccaggcccttgcatcttttcttttctttttttccagtacttctaaattccaagaaacacaaccggcctctccacaatgatcaatcgatcgaccgatcggtgttcccattgacggcagagacagtcagcagacaaatcattattcctgtacctgcgcaattatctgtgcaattatggggaagctcaccgttctgaagaactgatcaccacagacacgctcaacgtgcttcatctcggattggagaagcagatacggatttccgaatgaaaattgctagggtatctagctgcatgcccatggtaaacaaaggggagaagatgccctctgtcctggaataccaacatctgatgccaccacttctttttccccaggaccccaactgtgatgattgacggggagcttttccacagagacaagtgatccagtgacttacctgaaaagcaagagaaataaaggacaatacttaggtctgacacataaaatcttgcaggtgggagaaaatgaggtgcacatgcacgcacgcacgcacagcacaacacagcacagcagctaacaaaattgggacttaattggcaacagaagaaaggtggacatggcctcccagtcccagcactccagcagtagtctgctgctttctttgcccctgcatgaaacactcgtgatgtacaagtagctgcaggaaagaaaataaaaggagaggaaaaaaggatttaaaagagagaaaatttctgatttctagtagaaaatggtgtactggctgggtcgcagtcaatcaacatgggagcaagaacatcagtccttgtcctaataatgtaaaccctgatggactggttttactttcacttgctgactgattctcatcaaacaagtacactggaaatgggaaacgagataaaaggraaaaaaaaaaggcgaagaaggaagaagatggaacagttttttgtacaaggccgcgacaattaaaatatcggtggagacggacggcaaccccaccagttttggcaccggacatagattcttaggagatgacgagacagaccccccacacgcacagccaggaagcaaccaaggcaaggggttaaacctcccttctcacaaccaccaccaccaccaccaccacctttaaaagaaggtgctaaagggggtgtcctgcaaagaaaaggagaggagtgccccctaacctttccctgctttccactgaaatctcctatccgcaaccatacagttgctcaattctggtctcagccaaagccccaatcattcatcgttatataggtcactataccctcccttgcatttcccaccaccaccccttgaagccatgaatcgctgaagaagtcgtctgcgctactgctaccaccggggaaggattagctgcgcagaattgtgcgagcgaagcctgccagccgtgcgaatttcaagctccgaggtcctgcattgcactgaa

SEQ ID NO: 5248 - DNA, 2000 bp, Oryza sativa
cattggttatgtaactcagaagttttaatgatatggaaatgaaaacatacacggtgcggtcacatcatataataattcttgcaagacttacaattttggttattcctgaaccatgttcattgatgatgttaatatcatatttaaagtaaattccttcatgtaaattctttatgcaatgcaccaaacatctgttaattacatggcagtgttaactaaatagtttgtacctatcattggctgaactcatgggaaatatattttttggcctctaacatgctgtagataccaataattgtggtggctttgagttggatggctagacaccactgttaatctttgaacacctaccctgtttgtttagtatttgatacatgctttgatttgttgttacagaaaggcaatgttgagaatcagaaggagcatttgattttgctgcttgcaaatattgatatgagaaaaggggctaatgcctaccaaagtgacagacacaatcatgtggtaaacattctctttgaagcttcatttaatatcactaatcttgagtgagcttgttgccttttcacacatcattctcagtccgcataaatgtaagaatattaaactgattcatgaacttctagtatggctcgcagatgcatagtgatacagttagatccttgatgaggaaaatctttgaaaactacatttcttggtgccgatatttacatttggagtcaaacataaagtaagtaccactaatgatcattgcacatctggtgctcaaaatctgcaaccttgtcaactgagaatattgacattgcagaattccaaacgatgcctccacacaacaacctgagattctttacataggggttgtatttgctgatctggggtgaagcttctaatgttcgctttatgcctgaatgtatttgttatatcttccatcatgtaagtgattttttttctattatatttgaggtaaattcaatttatgatacatcctttcattcacttgtggctctactctgttttatcgaaaatctgttatgatcaattcctttttttgtaactgcacttttggcagtaatactgacaaggcagttaatgccaaatattgttggtttatagagcattagagctatgttggcttctctgcttcaatactgcgtgcatatgaaatttttttttctgtactgctctttgtatcatgccagtctaatttgtctatgtataaactgattatatcgtgtcgagaagtatcgttttcatccaaaccttaaggttatgatgccatgtcactctagagtaatgagaaaaacaaattaacttcttacttctgagtaatgtgaaatataaacttttgccatcttgtgcaaagtgatgctacatgcaattgcagatatatcaactctttacatttattgcatatttcagagccatcagtacaagaacacaattatacccatgtgtttattcatggaacatgtgtaagctgcttaggaatgggcataaactccaagagaacctatttaaagactgaagtgtataaaagttgtggacatggccccgctgggccagtgcgcatagaagctaatgttatggctggcagtagttaaatggaataataagttcaagtttgtttccttgggatcaaagttgagtcacccttacaaaaatggatagcatgtaatcaccattagctaatcaagaaatatacttcatgcctctatttgctatgtgtcaactagttctctcatagcaatcaatgtctacctctcccttctaataccctaatgacctaatccgtttcaagccactagtgattatccccataaacaagcttaacattatcaaaataagacattcccaccagttgtttgacaaataaaatgatgtatgtttttcttttctattcttttataaattttttcttacacagaccgctagactaataccgtgcatatgcactaaacatacactaactcttttattaatcattttcaccctaattcacgagttag

SEQ ID NO: 5249 - DNA, 2000 bp, Oryza sativa
ggcttcatctataaaagatagactcatgccaattataacaaacgttcttacagagtaacacttggaaacaaaaccgagataaaagttcaaacgactaaagaccgatgtgtctagctgataaccatccattggaactaaaaaattgcaaagctgatgactcaagatgttgcgatgccgcgatcaactgtgaacgcagatcctcatgccgttgcagcttcgcccattggcgtaaccaatgcgtacccctgaatagtacctgcaaaaaagatttaggttcgtaattgtcaaacactaactcgtttcttgttaaccaaactgtccagaaaagcgctgctgctgcagttaacagtaaagtattttgttttttattaccccccttagaccactgttggaataactcaactaagtttgatggggtatttataccaaacaaaatatgaaccgctcgccacaagaacttggcaatatagcaatcaaaaaacaggtgttgaattgactcaggctgatgacagaaagcgcattttaaatcaccatgccaattcctcctagctaaaatatctttagtaagaatgacacctttctttaagtaccaaaaaaaatttttatttttgaagggaccttaatttgccaaatatcctgtgaaactctaataccattactgattagtgcagcatacatcgatttgacagtaaaatttcctgaggcctgcaaagaccacacaaacgagtcacccccatcctgtaataatacttcctgtatggaagcaagcactctattccatctactaagattcgctcccaccaaattccgcctaaacgaaatattcagaggggacgaactaagtactttggccacagagtcatttttccttctaacaatattaaacaatgatggaaatctgtcctttaaaggtttattacccagccccttacatgcgagcttactgaaactattctcgaattaagccttttgctactagagaaacctacttgaatgtttttttttctctctttggaacttgatcccactgcaatgaatatctgggatgaaaattcatattgtgattctaacaaaacatccatttcactttctttttcgcagatgaagtaaaactaattatattggatatccaattatccgaagatctcagttcagtttgagcagccaaaaccaagatcttaactcatttctactagatgttctttccatttagtttatacaattgataaatagtagtaagcggtggccaagtgcatttcccgatgtgccacttagatggtgtttggatctagagactaaattttagtccccgtcacatcgaatatttggaatgacaaaatctatttcataacattggactaattcacgatttgaatctattgagcctaattaattaattcatgattagcctatgtgatgctacagtaaacatgtgctaattatggattaattaggcttaaaaaatttgtctcgcgaattagctctcatttatgcaattagttttattattagtctatgtttaatacttctaattagtgtccaaacatcctatgtgacagggactaaaatttaatccctggatccaaacaccaccttatgcatatggagtcaggctttcatgtgctgtgatttcatatactttggaaatcgtactggttagaagtcttccatccgtgtcactccagccctaggggcgacgcccaccccctcactctactcccctgcctcgcagccgccggcaagccggcaagctgccaggccggcggcggcgggatgcctttcctctcctccctcatcaacggggccgtggctagggcaccaaggcagcggggggagcgccgcgccgcccggattagggtctccttgaccggatccggcggtgtctgcgatggctgggacagcgaggggagcttggtggagggggtggttgccgacggtggggacgacgaggggagcccggtgacgggcgtggttgccgacgatggctgttaggcggcacg

SEQ ID NO: 5250 - DNA, 2000 bp, Oryza sativa
ccggtctggtcccgtttggatggctctcgcggtctcgcctctctcgaccggtccagcatttgctgcttggtcgcaactccccacccgctcgcacgccgcgaccgttgaaattggaatccttcctgcgcgaggggaaaagtgtggcatgaacagagaaaagaaaaaaaaacaacaactcactttcgatgcaggactcgtacgcagtccatcgcgacgtgctgtgccgtatgtccccgcgcacacgccgatctcccctcctaattagcactgcacatgatttgctatctcgataaatattttggagtaaattacactagcggtccttaaacttaaacttgtaacaaactttcacttagatccacgaacttgcaaaacacgcatcaagatccttaaacttagtttaatgtattattacggtccaaaccctggtttaaccatggtcttgcttatgtggtatgtcacgtggacgatgacatggcaaaattttctttttccctttctttcttcccatcttttctctccttcctcacctcgcgtggagaaaaatgcagcaaaagagggaggaaggaggcaaagtggagaaaaaaaagagataagaagggagaaaaaaataaaaaaatttcatgtcatcgtctatggagcatgccacataggcaaaaccacgatcaaacaaggctttggaccgggatgatacattaaaccaagtttaaggatcttgatacgcgttttgcaagttcgtggacctaagtgaaacttcgttacaagtttaaggaccactggtgtaatttactcaatattcttgtaatccacaataaataaaagaaaaatagatatgccaacacagctatacaagcagatatgaccccgttcgtaaccgattatgtggawtgtatcyaattgtttaagatcaataaaactctctttatctaaaaaatgtggactgtatctcgatttckgttttttaaattgcaaaatgatacattttgtgtgaaaacttttctaatatatcacataaatgcatttttaagtttgtaatatctaaaacttaattagttatatgctaatgtctttcttgtttttcatacactaacttcatcttcgatactttctccgtttcgtattataagtccgtttgatcttttttcaggtcaaccttcttttgaccaagttcaaaaaacacttaacaacatttacaacattaaattttattaatataatattgaatatattttgataatatgtttgcttcatgttaaaaatgatgctatatttttatataaattttatcaaacttataaatactttttttcatcccataatataagacattcacgtattttgatattcaacttacgaaaacatttgacaaaaatagtataatataaattaaattttatttgttgaaaataatatcattggattgctatttgaatttacttttcatatggttataattttattgatataaatagtatataagaaattataaattaaaaattagttttaaaaactatgtcaactttgattaaaaactatgtcaactatccatttagatattaatgaatctagacatgtatatatgtgtttagattcattaacatctatatgtatgtgggcaatactagaaagttttacattgtaaaatatggagtacttgtaatatacggagtaccgatgaaacggagagagaaacgaacaccaccatacagtaataaaaaaaatacataggcttaaatagaataataataataatgcaaccggcaaccacccgcaaccgcaacgcgagcgctgggttttaaacgcgagaggccccgagccgtggcagcgcgcagctctcgtcccctcgtgccgtggcgactgagatctctctcgtctctcctctctcgtctcgtgtataaatttccttcgccttagtttcgcatctgctatctgcttcttcttcttcttcctctgctgctgccgcgttgcgtacggtcgtgggaggaaacagggagagggag

SEQ ID NO: 5251 - DNA, 2000 bp, Oryza sativa
aagcactatacagtcgtataagttaaaattcgattattatgatacgaagcactgtacaattatgcaagcaattttatctacgttgtgcaagtaatattcacggtctgattttattatttttgtttcgtgagttgtagatcaaatttaatcatatatgtttgtctatatacttttagcataccaacagatgttaccttttttgaagttttttataactacatttaagtcatctaaaaatatataatgggcaccatgatatatgtaaacttagttctctagcatcatattataaaacgtataaaggacctctgaatctagcatacacaatatgctctaattttcatcgggttgctactgcataaatcaaccacgctggttgcatctccaaaaaagcaaatagtcacatacaaagggtaccaaaaatgccacaaaatattaagtctgatgctactccatatatcaaacacgggaagttgcaaaatcccagcgacgctacccaagcacatatccgtagatgcaaaaaacatcagatccgtgatagttaatactagatcgatagttaatccataggtccaacacactagatccaagcttccagcaacgctagcacataggattcaaaaaacatgaaaagaaaaaatcaaaaattaaaagcacacacatatgaaccctaaaatacaaataaatcgttgctaaccatgtcagatctgtgatagttggaacgaaataaacaagttctgcactgcaaaccaaaaaggattcaaaatccccaaaaaaaactgagaaaaaaatgcaaaaaaaatacctggccatgaacgagatggatcaatctccaactgacagcgagagaaattcggtggagatcgctcacgaacaaatccggcgccgaagaaggggagcacgagagaaatcgcctcggtgaggtcgacggcctcggcgaggtcgctggctacgcgtcgctcgaacgagagagagagagaaaaggaaaaagtaaaacggaaacaaccagcggcgcggaaaccaatatcaaatactgttcaaaattggacaacctaaacgggtaagagagaaattacgggatccgataccacaattattgggtcaaagcgggtccgcagacaaaaaaaactgcacgaatcacggcgtccatccgacagtcagaacaggcgactgcaatcaaccacaatttatggcgccacaaatctagcaatatggacttttattttaatattgcttggtattattccaacgtagaaactactattcaagggccagtgcgctgtgagccatgtagcacgccttcaagtgctaagaaatcttagatcggaagccaagtagaacctcaatatgttcattgcgaacaccacagttcatggaacatgtgcagtgaaaataactaatttgttaatttatctccattactccttgcattgtgagaattaatattagttacatgtatttcagataataatagctactacatccgtttcatattatataagtccttttaactttattattagtcaaaattctttgagttttgactaagtttctagaaatataaaataaaagtttaaaacagatcaaacatattatcaaaatatgttaaatatcggtatgaaattaatttgttgttgtagatgttgctaaatttgtcgggtttagtcccacatcagtaagtgatgatgggagagcacgaattaaaaggtgagggcagtcctcatccatcagactagtcttttgggctgcgtagacccatgacttcaagttgtggctccggttgagtctgtggtagaggatgcccaaagtaaccttggtgacccacggttggttgactgggctgcgcactctaataaaatttttatgtaaatttggtcaaatataaataagtttggttaggaaaaagattaaagagacatacaatatgaaatgaagggagtaacgaatactaaaagatactgctttttttaccttatcctgaaggtgaagaagggaagccc

SEQ ID NO: 5252 - DNA, 2000 bp, Oryza sativa
gcaatttgcatgcaaactgtgcaattggtttttttttgtccacatttaaatgttacatgcatgtgtccaaacatttgatgtgacggaaaagttggaagtttgaaggaactaaacacagcctgattctctgaaactaataacagctttcaaatggtctcctaaattcaactttaaccattacttcttaaaccaactaaaaatataatattgtgcaattattttgtaagaaaaaattgtggctttcatgcatccaatttaagcaatttactatattatggtagctaacgtttaaagtttttatcagataaacaaaacaccatatttcactttgggccacattttatcacctatatttcgctttggatcacatttcaactaatgttttattttggatcaagtaattttacctccatgatgtttggaccatcctgataacttttttatccaactatatccaatttattatataaaaatagattaaaggatgatccaaagcacatatcaatagtaaaatgtgaagcaaagtgaaatttactcaaaacgaaagttcactctgtgaagtgtcaaattatcaaatccctcctcctattcgttgtgttgtaagaccagtttaaaacaattgatgaagtggagaattaccaaattccccctaatctctgtctccccctccctcacggcctcacctcttctccctccaaattctccatccccggatccccctctcctcctcctcctccgccgctcgtcggagccggaggcgcggcggccttctcccgcgcccttcgtctcctcacacccgcggcggccggcgagaaggcccagaggcaaaggcgtgaagcggcctcctcccccggcgcggcaccctcggacgcacggcggccggtgagcaggagcaggttcggagggggcgacgcggccgggctccttccaccggccagcatcctggctcgagtcgaattttgaaggtattgattactctcgtagcctccctccctccacctctccgcgatttcatgagccagtgtagattggggttgcagatcccctggagtttgacctccaaatccaccggggtggatttcagctgatgatttctatggatggcggattaagcaagtcactttgttccccatctactcggggtggccacatcatttcaatcctatactgctttgcgacatgtcaatctgtatcttattagctttcctgggctatcagtagttgacaaccagaacttgattggagaagaaacatcttgtgtgaaatacatatgacactgggaacatcatcatatgatagttatgtattacttacttttcagaaacttggggcaccagtatttaccgcaattgattgaatactagtactcccgacggcaaatataaggaaagggtgggagtatattattagcagatcaacagcgaaaattataaaatacggcacaagcattatgccataacttaaattattcattgtcttgtcagttatgaatgtatagctcattatgtgtgggattagggaagaagagggtgacatgggcaaatggctacatctaacgcctaaaaaagaagtaatggtccagatttgcgtaggtggatttggaaccaactctaggggatctgcacctgtagattggagatccatccggactttgctggagaaaattttagagttgagcaccctttaggtctgcacctgtttctagatgttcaattcattggaaattgatgacccaactgatgggcaaacacatttgtgaattgaaaaaaagattgcatgagtactgattaggagctatgttaaaactcagcaatacagtctgaattaaggttgtttgtgtgatcattcggacacaaatgatgtgcatgatgccatgacaacctgttccttctgcaatctaatttccttctaggactagataactaaagccatagtttccatgtgaaactgttatttattgtataatgctaaatggtaagattttcgtattgataggaagc

SEQ ID NO: 5253 - DNA, 2000 bp, Oryza sativa
tctagcattacacacatatatgtgtacgtgagtgttaatgaatctagacacatgtatatgtgccttgattcattaatatttatatgaatatggataatgctagaaagtcttataacctaaaacggaggtagtagttaacattatccgatccataattacattacagattacttgaaaagatatcaaaggtatcatattttttaagtgtaaaacttgatatttaagtttttaacgcaaagttttcatactyacatatacaatatacttttctcaagtagtataaaatttttcagcattgaaccactagatgaatgaaggctaggtgatatgatattacagacttacagtagtacgtagtactgatatgatgcaaaccgaaaaggagatatatatatatatatcgaagggccgtgcgtacgagccagtaaccgctctcaactgtttcagtctccatcatctcctttttaattttctccgattaattcgtcaacaaagtgatcaatcgatcgatcaaaggcgcaacgaaacgagatcaatcatgcatgctttgacactgactgctgcacgatttgtaacgcaactaccctgctagctagcttggcgctgaagctaaatttagttgagagtttattgcatgatgactgcaagcatgtatacatgactctaatactcactttataattagttaatgattaatcttatatgactgaaattatatttatcgatctattccagttaagtactggcttcacgcgtgctgcaggacggtggataaagggaagacgtacgtacgtacgtacgtgtttattggatgtggcaaagtccaagatttagattagctgctttaattcagtgcttaattaagcccatggcaggttcactcctggttggtacagtacattaacatgagctgcaactaacaccgatggaaagcggatgatcaggaggaatgccctaaccgcccagcagaggcaaagtgtggtcgaaacctagccatttctgccacttctagaaaagtatattatctccgacaataacatgacgatggatgggcagaccaggccctctgaaatcaagtcatatactccctatatcctataaaaaaacgaaaattaaattagatgaaaataaatttgaatagatgcttgtccagattcgtagtaataagatgtgccacatccgctacgttgtttttttatgagacagatggagtacaacatatatacatatatatgcaaaataaattaaaacgagtattgaaagatgtccacttttttaacgaatgaattaaggggctgttcggattgtatccaaaataaaccttaccaaattttagcaagttaacaatattattaaaattttggcaagatttcttcaaagtttggcaacaaactaaatgtaggctctctttttttttgacaatattatcaaaaaatggtatggttgaaaatggcatcaatcaacagccccttaatccttgcagttgatgtatatcaattgtgttgattagttataagatgtgagatttgtgcaaattaaataattaagagctgagctaacacgggcagcccccacagtaagggaagggaaggttcatcattcattttgtgtctccacctgtgcctaacggctaatgactaacgtaatgtaagtgaccatgcatatatgcatgcatggacgattattaattaaagcaggagctacgtacctgtggttggttcttgcaagttggagagctgatcctatataaagccggcctcatgcagtgatgctgcagaccagcaggagctagtcagtagaagaagagacattatttgtaggcagcagctagaaattaaggacgattatcgatggagcagaagccaccagcagttgctgctaataataatcagctgctgctgatgatgataatggtggtggtggcgtgcagtaattatatgattagtggcgcaggagcgcagccatcgccgggatactacccgagcaagacgatccgatcg

SEQ ID NO: 5254 - DNA, 2000 bp, Oryza sativa
tgtatatatggaatgaaattattttccaacacatagccttttgcacactactccctccatcctaaaatatacagacgctttataaaaaaattaataatcaattcctactagttataaatataggaattagtttattttgagatgtagagggtagcttgcagctgtctagattagtcgagggagtagcaaaacttgttacatatttttgtttcctcgatgacaatacaaatcccctaatgctactactaccactttggagaaatataatatatctttagccctaataatccaacacgtcgttgcagcactcgagctctcggttgcctacctcactgcgacgtgtgcacagcaacaagactacgtgggcagctgcagttccagcaatggcactagctagaaggagacaaaaaggaaaaaaaaaagaagaagaagaacagaaaaatgaaactgctgggagaaaaagggaaaagagaaacagaccacaaactgcacaaaaaccatcaacccaacggcaacccagagaagggatggggaactgtggattcgtctgcacgtcgtgcaaattttggttgaaaatgtctagttttgaaaagtttatttagctcttaatgtttaaacttgggtatttaaccaatactgtatatatgataatctgattctctttagttaagtggagtgcaatactccgtctccttaggagattaaaagaaacggttaagcatgttttccgaccattttcagaggttatgctacggtttattttcagttttgaccaattattcaagcagcagtatcatgattcaacaggcaatgcatctagtccatagggaatttagttcgttttgtagttgaagtaatcaaatttgatgttaccaaatttcaatatttttacgagttgactaggattcaagccaatttttatccaaccaaaattgataatttcaataatatcccatagaagtttggttttttacaagttttacatagagtacaaattctacactacaaatgttttgcctatgtgggtttgaaatttctcatcaaattggttcttattgatcaaactatagttgataaaccattaaaaatgaacgatgacattaaaattaaattttaggtaaaatattatatttgtattattagtggtctataaaagccatggcctggaaaaataatatactacagcaggaaaaaaataaaaacccaaatctgtaattaggtttcaacatttaaattttggctacaatggataaaccaacaaacaagtatggaagtataccaaaatgattactcccttcatctagcattataccaacttctatatatgtatctagataagttcttatctatatattccgcacgttttaaaaagaacatcttttataatgaatctacacatataaatataccttttataatgaatctgaacgtagactatatttaaactcatatttaaaagtaatcatatttttgaaaggatagggtatagccaaaattgttatgttttcgagtactagtactactaactactagcaaagaagttactagccaaaattgttttattagaagttgaaactaaaagaaaaggaagacaacggaggccagcaggggatgtgggccccacatacgccgctcgtggtgggaccagactgtcatggacccattccgaacccggagacgccattataaatcggctcgagtccgaggcaagccgaacccggatctcatctcatctcggccggtcttcgatccccaaacccccccgccccgccggagtcccccctgctccgacgagcctcgccgcgccgcgccgatggctgtggagggccgccgccgcgtgccgctgccgctgccgccgccgacgaggcgggggaagcagcagcagcagcagggggggggagagggcgaggagggtgcaggccggggacgcgctcccgctgccgatccggcacacgaacctcatcttctcggcgctgttcgcggcgtcgctggcctacctg

SEQ ID NO: 5255 - DNA, 2000 bp, Oryza sativa
gaccatcaggtgttgggagaggacatacattgtgagagcgccgcggatgtcccttacccaagaattattgataagggtagaagcaactgaacgcaagggcacggtgaagtgaaggtcccgcactaaggaggagccaccgagcgaccctcaatctacttatatgtccaaaagagagtcgacgcgccatcacctggcacgaagaaggtggacgccataaacatgtcggacgtgccgtcaactaggtcatgtttgtaacagattaatttacttgatatgcactacaaattaaaatcttaaaaaaggtagattttacaaaactatatatttaaaatgtagtatcacaaaactacatatttactacagatttaaaatggcgtgtaaaataataatattaaggagcaaattttataaaaaaaaaatacaggtttagtgccaatttatcacaacactataatgtttgtagctccaacaaaatggtagtgataaggatttaaactatagaatctaatgttttgtgatgacttcaatattaaatatctagttttgtgatacttgatattaaatatgtattttatgataaatttactgttaaatatgtattttttatacaacaccttaaacctataattttacgtacaatagtttggttagattatgtgtagttttgtgagaaattttatttaaaaatgaaattgttatataccatataataagtggtataaaaatgcagtaaaaatatttttttaggaatgttgtattttgtagatcttaaatgttcaagtatgttaaattatactccatgctttagtgagctatatatataatctttctagttttcattggacgatgccattgactttgactatactccgtatatcttatcaagaaaattatgtaattaccatttgttttgatgttatttgttttattattaaacgtgtataattttagcatgagttatatttttcatatgtatgttcaaaagacaatgacgtgatacattaaaaacctagaggtagtattttaccctgttttcgttaaaaaaaaagccatgtaagtattactttttaattgtgacttgttgtatcatttaagatattttttaaaataatagatagaaattcggactatctatcacagccaaacgttaaaagaaaaaaagactaaacttcaaactcttgctaaccttacgcgcgcagcaacatccatcgtcatttaagatactttacatgtctaacgtaaaaggactcaatgacaaatccataagccttacgaaattcctaatgaaagcgtgctcacgagtgtaattttgacttgtgaccgtgagaattcaaatttagtaaatatatttatgcatataggaataggagtacactatcaccaccggtccaccacgagcaacactatagcaatacttgcggtgcatgctagtgagtagtgacgaagaatttactgtgtgacgtcaacaagcttacatgtggcaatacatgcaaaaaaaaacatgacatcctttgcctgcaaaattcatccgcatattccgaggaaggcccgtggctctcactttgagacatgtaattctctgtacgctcaaaatttattgcaacgattcgtcaggttcttcccttaaaattaagcgcattaatcattcgtttgttttgcttgcatggagttttggattaacactcttcttccatggtcttttctagataaggctctctaatgtagtgatatactacttcttaataactattgcttatttttagatatataatcattgatcttaattattgagtgtcagtagtacatattcctttcttgattctgtcccgtcgccccacaagtttatatctttcctccatctcttggttcaaaggccggtctttccctgcacgttcaggcagtgtgggatccatagtaacttgtacccatccatcccgtgaggccgtgatccagctcttgtttctcctttctttcagttgcatgtacacaaagttgcacaa

SEQ ID NO: 5256 - DNA, 110 bp, Oryza sativa
  misc_feature (1)...(110): n = A,T,C or G
ctttnggggggggcgccgggaacctatttaaatgsggccccgatcccgcattctctcaatkgmaytagtccccaccaacggctcggtccagtagagtttatcccccacct

SEQ ID NO: 5257 - DNA, 2000 bp, Oryza sativa
tagattaccttaccaatattcggtaattataagaatgtgtagtgtcaattcaaatcgaagctaaactttgacaaatataggttattttaatagttaacttaaactatttttctaaaaattcaaacacaatttttgccctgccaagaatagctatattaaaactcaccaagctttggcattgacagcctaatttgtatatctctatgcaattttctttctgatgggttctctcttgccagaaaatataaatatatacatcatgacttttgtttatttatttgtaatatcgaaggtcatgatcacatatgcacagcatcgtggtattcaggaacatgatacttacagtttcatatacttctttcgtctcaaaataaatgtatctagtgtaagatgtgatatattatacgttcagatatgcacaggatatgttccattctattatatgcacctatttagaatggattgagtagtttacatgtgatgtgatgtgctcttctctagttgataaggttagagagcgctctcatcggaagctgggactaaaaaaatggcccatctcaaatggatagttgatttgtacggatgtaggctaaaaaggtaaatataagcatacaatctttttaggcaaatacactcatacaattacattatcgatataatatagcatggtgaactcaccacttaaatgtatactatcctctcgaatactcctgagtgtaagcatcaaaccatgaaccatttcagtcaaaaacaatgtgttgatgctcccttcaaatactaaagcgaatgttcaaagcaatcattaacacaaacacagttctcgaactcttctgatgatatatgaaggatatattatagaaactcaccagcattccatatcaaagaatgaaagaacacaatcagttaacaatctcacgtgagtttgtcaggacatatttttccacatctacatcaaaatttgaaactcaaaatttaaacatgccacccaaaattaaatagcactactaccaatagccatgagcttgtcagatgagttgatcgctgctgtaactagctcattgggataagcaaaatcccctataattagggacagaccaaggggccattatcccttataatcttggacagaaggagtattatatcaggatcttaaagcaaaaggtgaaaaggaactattccttcgtacatcttgcattgcacactccatagattatttctgttacaaatgctaaataggagtaaatattgtgaacgataaacaacaccgttctttgaactgatggtacacacactcctgacatcacataacacggctattttttcgcaactgctcgagcataagtggcatgacttgagccatcatcgcaatagcctcttatgaagagggatagaacatcgttgattctatatggccgtgccagtacgagcccaccagtcagaggatcattgtataagcattagtacagattcttccatctgtgacggcccataataagactggaatttgcgggccgtcacaaagaagtaatctcaatcaggctgaagtttcgtccgattgagatatggtcgcacagccatggtatatcggcataaaactaaagcccgtcacggatgacacttatctgtgacgggctatagttgaggcccgattgagatgagggttccatatttcaatcgggccctaaaagaagcccgtcacagatgagggtcatctgtgacgggctccaactagaggcccgattgagataagtttattgcccgtcacagatgacactctttttttgacggccttttattaaggcccgatagagattacttgtatgcccgtcacggttgattgttttagggccgttacagatatttgttgcacagtataaataccccccaccacctagtgtaactgtatcccactgttcactattttggtgggaggctatagagggcgattttttgtcctttttccaaggaaaacagaaattaaattcccaaaaatgatcaaa

SEQ ID NO: 5258 - DNA, 2000 bp, Oryza sativa
atgttattattccttaagaaatatggaggcttgtgtctgaacatttctgaggaacaatgcatagtaacgagcacaaacattttcaagtcaaaactttccaatatcaaatatgtgcatctggcaagtaacatagtggtttacttcacatatctggtgaatatcatagttcctcttatattcattaatcgtgtgatgtttcctccactttgtcatgtaagatttttttggcaacataagttcatgttagtttggtattcatctaaatgatgtgtaaattaatttgtatatgataggtaaagggcacctctaccgtccctaacatagaaagaaccagagatagatcaacatcactatatagataatcatcgttatgccttcataatgatggtagcagttactggagattatggtatacccacgctgcacatttcttcctgtgtattcctgcatcacacttctgatgaacattttggagatgtcaagatcaatttgatccatccatgagagaacaccataagtggtgtgccaatttcatatgtttcttttaataactattggtgaagtcaatagggaacaagttcagaactttgcatcattgagcaaaggagccttgctgaacgactcatctatcattgcaaatcataattgttcaaaaaagaataatatgtgcatattattcagaaggggcaaactaagcagcagaaatagagaatgtaattgaaagttacccaatctcacttcatgtttgacctgtaacttcggacatggaattactgattttgaaatccaattatttagtctttcatccgcatttatgctaagaaggaattagagctcatgtttacattgtaacagcatttggtctatattgtaatggaaatggatgataaataacaaagaaaaacttctctgttttggagtttcccatttcttgcaaacactatccttttgtatgactaattcatgactgcacctcaccttgatgttttatttgtgtatttatcagttgtgaattgtctatagaaatcagatgtaaaaggagaatcaccaatctgtatatgcattttctccgcttgcaattggctctatacatttgtgtcaaagttctgagatctcaacctctgacaacaaaaatttaaatgcagagttcacaagatgtcaacaacagtcatgcacacccaacaaacaaagaagcatccaaagacaaacaaatatgttgctttccactcagaaggctgggttagattatatggtctctttwatttttctccggcgattttagggcttagtaaataatagcttattcgtttgattcttatcttcgctgtgttgcctttgtagtacttccaatctgtattaatgttgttagttatgtttgcccttccaatctgtattagaggatgcctttctctacgcatctaattctcgagttaggcttgctgattgtaattgggactatcattttctagcttggaaaataaagcagaggtgttgttgagcagtgatttttttttatctcaatagtacgagcacatgtaacatgttcaaacaaccctttttggggatggtaaacatgtaatccgagtatcctatgatgttcattttctaaatttctaatgtgcagaacccataacgtcgtatgttgtctgtttcgttttttaattcctcatcagcagcctacctgcactgcccgcccggctgatcattattaattcctttctcttttgccggctttttttaaacctcttatttaattcataagtcactggagaagctagcgtacgttctaattgcaggtttttaattactagtaataatcctgtgatcaattagcttcacggctacgctggagtgtccctctcaacacctgcaggagcagcactatataaaccacataccatccaatccatttggacaaaccaaacacagtacaaaacacatagtagtagctgtaattaagcagcaagcaactcacaaatcctgatctggttgatctcacc

SEQ ID NO: 5259 - DNA, 2000 bp, Oryza sativa
atgatcaaacatgtgagaaaaagtcaacgatgtcatctattaaaaaatggaggtagtacaagagaaaccagattgctagaaatagttgaagaggacccaccagcgatgatgtggcataattcaatgcttttgggaactaaaaatagggaagctcgtggacaagggggtgatttttgggctcaaattattttgggatgaccccaatctgagatttttgggagttaaattttaggcatctattggaaatgctcttaacaactagtggaccaattcaacccacttcctctcattgattgtggaccacaccctccgattccttaaaaaaaaatcatcacatccctcacgccaaaatacatacaaatggtccctttgaatcacatgagtggaaaacggaggaataggaaaaacataggattataacagaaatgcaaatgtaaaataaatgattacaaaacacaataaaaacatgtgaatgaccgtttgattgatccacaagaaaaatacatgaatttgaggagagacaaaaactcaaaggaatttttccatgaagttctacctcatgttaaactttctcaaaaacttatatgagaagaaacattccataggaatttcattggatctcatggggtattcaaagagcgaaatcctctaaaatttctataaattccctttgaatcaaatggagccatcccattccaaaacaagggatggacctaagtacctaacatatcccacctcatgccaaatcaaatacatgagtgttgttttgaacacaatctaagatgagaatttgttttcgccgctcattgaaatcatatctattgcgccatcgacaattttgagatcctcccgtttgtcattacttagttggcgctctactgctcatccctatttatcttctgtcattcctctctatcaatagtgcttggtcaacaaatttgccccgaaagacgattaaataaattttatagtgggagaaaacacatgttttttttaaaaaaaaacttcaaaaaaaaatcagcattacaattgtcataagaatgggaaaacctgcaacgtcccaaacaaggccttgcaaaggatcataaggtcttcccagcgctgatgactgatgagtgatgagaacgatgggcgatccaacgagaaatcaagggcagcagcatattccaagggttcgacttaccgccggtaaccgcgtgtttaccgtgattaccggctttatcgcggggtacggtaatataaataccgcggtaacctccttaaattcaaataaatttaaaaaataatttgaatttttgataaattttgcaccatttcgtacggttttttgcggtaaccgtgcttactgccggggcacggtaaccccgcccccggcggtttgggaaacctgggggcggtttgggaaacctgattccaactcgcaggaactcaagtatactcaacgcagcagtacagcgcgagaaaaccatgttaacagtaaatctatttatacatcgctgtccagtcttctcctatgaagtgtacagactgcgccatctccacaacacgccaagccgtgagatattctgcaatatccctctgttcccttttcatctgaactaaaaacctgaagggaaaaaaaaaaggcccactgtttcacggttgaagaactcgtcgatttaattttgtcaaatctaatctttaaattttaactattcgtgtaggagtaccctccatctctgtcgaattaaaccgtgtttttaacgtaagacgaccaatttaaaaagagtcgaagtggtctgaagtctgaactctgaattttgttgggggaagaaccgaagaggcagtgccgtaaaggcaaaagaaacaagaaacacggcccgagtctagtcgaccacgccccgcgtccgtcttcccccccaaaacttcagcaaaagcaaacgaagtcttctcagattaattctcgcgtcgtgtcagaccacgctgccgcgggggatctgccgggtkgccaggctgcggag

SEQ ID NO: 5260 - DNA, 2000 bp, Oryza sativa
gttggctataagatttttttaagacttctctcagtccatccatataataattagctctttacgattaatataggacacttgtctctcacacagagttttttggttcttgtgtctaagccgactgtaaatttacagaccgcttctcttctcttttctcctccacctcaacatttagtcggcttataacctactattatacttttatacttgctctaagcttgtgacttgtaagcttggagaaagattgactagatgcatgcatgcacagcacctgtgctagttgatgactgtcatcatgctgatggcaaaaacatctccataattgtataatttgtgtttaatttgcatggataatgtgaggagatattcaggattagcagaaagaagagagagagagaagagtcagaagacaagttcattactccctacaaaagcagcaagcagcaggtaggaaaagtacaagtcttcaataataagcctgcacaattaatggttccatgaatgcagagtggttcctagttgaaaatttatgcacacacaggaggaagggagaggtggggtgaggtcgtttttatggatttaatgcaccccccatgcttgcaaaggaacaaaacacatgcacatttatcaacccttggtgatctaagcttccaccaaatccatttggctgcagttggagttggaggatggagtactccctctttcttctccgtcataaaataaatcaaactctcgtatctagatataaattttaataaaaaactataacatccttcattaacatagaaaaataaaaataatattgaccgctggatagatgaagatacttaagaatacaacttcttgattcttgatatttaaagtccaaatttgggtttgagaaattaatttactttaagacagaaagagcaggcttgtgtatacagtgcatgtcaatttgctccaactgttgcaattaatgcaccttgaatggctctctctatctcctccaccctaaaaagaaaaatgagatggaaggagaagctagcactgttcattgtgatagtgaaagatactaataggaggagataatggactgttcatcatttcattgctatgaaggggccgggtatttggcatgctaagaatggtgattaactattggtgttaattaatttgctgcatatgtaatcatcactcctaaatatggttagatgtagctatatatagttctggacaattatactcgcctggtacgtgccggtataggattgtggtattatcgagtagtagtatacatgcaactaccagcaggatgacattaacctgtatttatttcgttttaaatacatgcttctaatagtagaccctgtttggaatgtggattaggtgtttccagttaattaaagtcatgtagtacggatgggcctaaacaagttcaaaatttgcaagaaatttaacgctcagaatttttttttagcaatcctctactttacattagcaaggatctactcaatttaaagagaaatatacatatttattaaattcttaaaaacaaaaatctcaaccgtcgttcgatttaatcagttggtacttacagttaatcaatatataatcacattttgtcacatcagtgttaaaagtttataagattcttttaagcgcattgttcacctgcacgtttccacaactgctaaataatatttatttaaagaaattctttacaaaaactgctttaaaaatcatatcaatttattttttaagtatcaaaaactgctaatgattctaactcgttttacctatcttctctaatcctcctcaaacactcctggtgtctctcctgggcttatggcccatcactagatgggcctaaaatgtaagcccggcccaactacgggatgagccaatgactacgagggcgggcggaggcccaacaaacgcaaggcagtccacaccacccgaatcccctccactcccccgcggtcaccggcggcgccggcggcgagctctcgccgacgccg

SEQ ID NO: 5261 - DNA, 2000 bp, Oryza sativa
gtcattgcaatctgccttagacatatttcaacaaataagtcagaaaaacctacccacataatctacttaccagagatagtaaaaaaaccgccttagacatatgtcttgtcaatacaattatgaacgaggtacaatattatattatatatatttacagacaattatgtcctatgaggatttcttatttaatatttatggttttatggatctatcttatgactatatctctagaattaattagtactccacctcaaacatcatgtcctagctaggcccgttcggtttatattattgagtggataaaattgacatatattatttacttaattatagagatagaataaatattttaaaatataaacttaaaaaatatcatcctaagatataagcattagtgctatgattttagacatacatttatccagattgatagctaaaaatagttatattttaggataaaggcagtaccttaaaacaagtggtctaaacaatccaatacaaggatgcatttttgaagcgttgagcgaataatccatttgcataatccagcgaatatgttgttgtatgtatcggacattgacaatattatctgtagaatatagctttaatctccaatttttatttaaaaaatatgttatatttgaaaagataatgaaatttgtgatcgtgtttggattcaacccgagttcaaatcctggttacaaatagaaacatttacgcttagaatcgacctatagagacagggtcctcgtgtattagacacaggttgcctgtttggtagagctctaactcctaaatttagctccaggagttgggtctagaatggagttgtggagctgcctaaacccagctccacctctctagttcattctatgagagagctccacctaactctgcttctattttaggtggagctggagttgaagctgtgccaaataggcccttaattaaggcacgattcataggggatagctcctgtcatcctgtgcaggggacctgcttctatggcctttcttgaatccaaatttaggtatttcttatttgaaataccttgggtaggtatttaatttcccttaaagccgagggtttctttaaaaaaagaaatgaaatttcgatattttgatagtattgtttttcaatagaatttttttttcatgttttcaatctactcactcctattcagagaagtactgacagcaatgtttaaccccaccttaacccaaaatcactaattttttgtactcaatggagtatcttgctagattttccaatttaagcmcattaattcgtacatgcatgcatgtacattccacaaaggatgtatacatgcatactccaggagtattagtgatgtcatccgcagggatatggaactgtcacttcttcagagacttcagtgaaaagtaacacttgtttaagaacagagatatcctatatccaacgtcgccgcaggtagtggagtttacagaaatcttttaacttgctagtggacgcacgacgcatgttggggcgaaactgcgtatgaaaattttcgttatcttccccaaattttccacccatatcgtgcaggtattccacagaccaaggatacatatattatgcatatttatgcacgtgattacactgcataaacaaacagttagtgggactgtaacaagacaatcaagcaaaaataggttgtgtcttacgtaagagtaataattaacacagacacagctagctcgtattgtggtttaattgtggattcctactcaaactacacacaatgaacagattaatttggagtagtagtggaatgcagtgaatataatcatgtactacagcagtatattatgcaagtagtccacttcttcagggttcaggggttgccttttacgcctgtataaattggtactcttgcgtagtttacaagcagctcaaaacacttagctagctagctcacaaaagcatcagagttaacgtacactcatctagctagggaagaagaagctaactaagcc

SEQ ID NO: 5262 - DNA, 2000 bp, Oryza sativa
aaaccgaacgggcctagctaggacatgatgtttgaggtggagtactaattaattctagagatatagtcataagatagatccataaaaccataaatattaaataagaaatcctcataggacataattgtctgtaaatatatataatataatattgtacctcgttcataattgtattgacaagacatatgtctaaggcggtttttttactatctctggtaagtagattatgtgggtaggtttttctgacttatttgttgaaatatgtctaaggcagattgcaatgacgcacgtgcatagacaattcacaaaaccatctctagtggggtttttggatcgcctctaataacccgatgtctaatagtggtcgatcatcagtttctcatcgggtgacgcctgcgatcgtaacataatgctattaggtcatgtcccattttctagtgattatcctggatatgcataaatttttgacttttaattgcccaagattgatgggtgtggcggctgtgcagtgagaaggggtcacattctcacagatatcttggaaaggaagagcgatatgcatagcacctaaaccccagctttgtgtgtgtttatgcagtagaggtttgagttatttatgaagatactttctttatccaatgctaacacactaggacacgtatcgaccatgggaggtgggacttggcattttataaaaaagaagaagagaagtttggccaagttcattcaaccatctattacagagctagcctcactatgataataatctcgacatcgtaggatgcggttcgtcacaaacactcattttcatgcttcttaggtgagcatatattataactttaatagcaaaatacccatgctttgctatgggtaaaatgtccatacttattaaaatatatatggtgttcatttgattcaaccaactattaaactattacataatgtgcaaaagtagtggtgctgggctggtgataaagccaccaccatcactattgtcttttatagtagtatggatgttatactttctttatttcaaaagtatgataccgttgacttttcacataacttggtcgttcgttttattaaaactataaatattatctattctttaacttgttttatcatcaaataaaaaatataatagtaacttatacttttacatgtttatattaaagttttgaataagatgagtgatcaaacattacgagaaaaattaatggtgtcatctattttgaaatggaattagtagttgattttaaaaacacagtgcaaggactaaatatatgtacatctttgataacttaaaaaaataataagatttaaattgacataaatttgaacaaccccttatatctttactttgtaaaaactatcaagatatttgcatgcatattcctagtagagtctagagaggctcattgctgaatgtagtactacatcgtaattaccaccatgtgaatcctttcctgttaggaattcaacgttcaaaaacattgtaagagaaaaaaagagaaaaaaacgaccacgatgggaaaaagagaaaaaaacgaccacgatgggaaaaagagaaaaaaacgaccacgatgggactcgaacccacaatctcccgctccggaggcgagcgccttatccattaggccacgcggtcacttcgtataatagctcagcacaaaactttataaactataaaaaaactatcgtacttgggctttttggtaagaaagagcccaaggcccaccataggcccaccatcttggtccagtccgcgcaccacatcgccgctgtcgcccgcggtggcaaccaccgcctccttctcttcttcctcccccgccgccggccgcccgaatcctcaaaccccaactccggttcaccgttcacctcccgccagccaaggtactactccttcmcccccaaaaccttttcttccctgggctaatcttgggcccgccttttaaaacccacactgttcatgtcttcttgttcttgccacagccaacagc

SEQ ID NO: 5263 - DNA, 2000 bp, Oryza sativa
sracsagwksrcsswrgrrrmymagmmscarmgssrmsrkmgsmskyrkcsscgkckmttrrkskwysassasgrtgskwssgsysgkgmkkrykrskrwrgrgrrgmrrsrmrwmgryrrcarsgrmaggsgrmmggksrmsywmwcyargcgsckrkkskggswgktcrrgarggsgwssgakyksgsmskrmwmsscgrsgcgrrsaysryygtsrkygtykkmtyysasrcmraymttsyswacssytwcrskrrsmmwkmmrkmrwsrsygwyswsykmwmctaykksyysrwcymyrgggwrgatrywgrgymsrmammykkmywyrgykgmkrgwwagrmmmrsmcrwskacyymrwrmwrmtrrrrwakkssrtsrrkkrkwcmrkrkykrmrgysrmrsckrarwmkrcrsgrawkmgcrgcmtcrmksygmmrwkswkrmaskykwmsrmyrwrkkkcsrttmwgktrggmmgtmgrcrykkrsgmkrkcrrrrwgrmyrmrwkryymsarytmrycarkkysysaarkarcwyrgkgyywagmwmkrykrmymykmmwwykrkyskcswyckmsyyascmksarkagakmckrskmsawsksmrssrkcrkcaskrssakryammggmtsgsrmsrwksytcywrkwgsmkstctwmyymskytyakygsywryryrawcmymwrwyyyryrsymtymawytsstrmamtgmkysgrywtswykyckcswkyrsmwyywswwwaktwkmwrryatrmmwmwyrysmkwytwctmwgywwywwrtymkmrymwykctktywywsatywtgtwaawwmaktkmrmgmtgaktrgrarkarywwkwatwcatkrwmtkgkgakwawtwmakawrkyywswmrawyyyyktrrtryktcwwkarwgswaywrmwwkgsakmwwmwkggrwgwtkywywycttwkmacgratkymccagwwamysyswtrtywmrtwrwmwassrtakrmarmmwktrawsksyaraywkmagcacctacacactacacagaaatgttgttttatttccattcaatttggtactcctatgtaactgtggatccggagaacgaatgcctagatggtgggatggtttttgtgtgtttgcaaacctgcaagcactttgagttgcccaaattcctgctctggtatgcatatgcagtacattttgatttgcacttgcaattcctacctgaacttgaggagcaagattatgtgttaataaatctttgtgcaagcattcacttatattgccaaaattggtacaaaattgcacttctttaaataaggactaccaattttgtagaactacacttttcccccaatggtttgagagaccttgcaagtagggtccgcctccagccaacctccatcgccgattcgctgtgagctatgagctcggtgatgggaagaggacagccatgagtagattgcagattcaagtcaatggatttaagtcatggcagattgacagtatcaatttgcttttttttttctaaatcggctcgatttgctttttttttctaaatcgtgctcgatttgctagtgacaccaatttgtagtgtgtcatctgcggcctaattgcttgattcatcgatcttactgattatttaatttgtttttttgttgttcaaacttttgttatggttagttaggtctataaccgagaccgaaccgaactaaccgaagaccgaattgctcggtcttaagttttgttggagaccgagatcagttttgagattctaaagatcgaatttttaaaaagatcgagaaaccgaactgaatttctcggtctaaccaaatgcccacccgtactactacacttaacccgcccactcaagcagctacgcttaactcacgttacgtaggaaaggaaattcagaaattgctgctgatatccaccgtgggggaaaacaaaaattccccgctaagcgcccaccacctgttcgacggaaaccccagccgcgagcccgcg

SEQ ID NO: 5264 - DNA, 2000 bp, Oryza sativa
tttacctccagcatttgtgaatcataatacggtagatttgcagcagataattggaaataaagatgtacagccaattactgatattaaccagtgccattttcacagggcaggcagttatgtcaaattgtcaagtgcttttaccctcattcattctagaatcataggtaaatagtatcaactaattgcatatttgcattaggtgaccattgactactgagatcctgatagcaataaaaaggaatagaggatgatgattgtgagttagtagtatccctcagcacaattcatgatacagttgcaaacattgatttaattaggataggtttttggatcaatacattggatggaaaggtttgtttgtctaagcctacccactccaacaagtgcaagttgcatctcagaggaaagtggatagaagcaaggtcacctttttctctccactttgttttttttttgtccttttgaaaacacgcaatttgcattgaaattgtgatgtggattggttaatctttgacttgcatctccccaatccttttcgtcctgtaaatcaaaacttagtatttggacttcttgctgaaaatcacatcaagccataattccttgctctttcttcaagccaagaattaacagccctaatcactttctcatgtgccatttcattaactttgatgttcttttggcaccaaaaaaaaagtataacaggtgtttatcttggtaaaaaaatcgtttttttttcacagagactcttgcagctaattggaacattgtcgtcaacttatgcccatactttacccggtcaacagacaacagctatgatatgcctgctgctgagtaatgggccccacatgtctgccattcatctcacaccaactacactacactatttccagatgagaaaaatccaacacgtaaatgactctatatcctacatgtgaacaaaatatttctacaaaatccaagatactcataattcttttacccagaaatcaaactaaaattcctcaaatatcatgcaggaatcaggatgtaataaaaaagttgttatttttatcaagcaggaatcaggatgtaataataaaaatgcaggaatcaggatattatttttaatacaacctggagtcagaattttttttttgttttatcatgtctcctctgttgcggctgttgccttcagatttattagaccagttcatctcaacccagaaaagaaaacaactgaggcagtaactttccagaagcacatgtaaagaacaaaaacatcactgtttaaaggttagtaggagcattagtacttattttttaaaaaagataatacagtattagtactctaaatctaattaggagcmcatagctttctgtactatagcaagggaagagtgagagtagcttccaagggagacytaaaagagaggcagcaactaccaccaatacttctacttcctcaagaatctctcctcttcttttctatccaagaaccgctcaaaagctcgaaccttgcgcaatctttttaaatcctcccgaccatttcctccgggtttgattctgggcagagattgcgaggggaaagatacgagcttttcttggcttctttcccctgcattgggaaagatacgagctgttgctgttcttgggaagaacagcttgggacattcttgggttggggtttgattcccaggtaatggaactcttcttggtttctcttggattccgtgcagtatttctgctgtttttagtatataaatctgtggcaaattacgctgcgcctgtgttggctttggttgtggttgcttcatttggtttcagtttgttcgagccttcgaggatttgattctgtttaggtgcagttttggaggaagttgggttagcgtgttccatcagccagtttgagaagtttttgttaattcgatgttcagattctgctgggtttattttgggttttgctgaactttattctatgtcagagaaactttgatcttcagctttctcgaatttgagcagaa

SEQ ID NO: 5265 - DNA, 2000 bp, Oryza sativa
gtaaaggataaagcaacagtcaatttgaggttatttcagaaacaatattgctttcctcttttttcttttttcgcttttatcgaaacacaccgtatgttaaaatgtatgattacacaaatagacaacacctgaccagctaaaaaattcactttgagcagaaagaactttaccttgtgattgaagaaactgctacttggcacgcccgcgacatcatttccagtaccagcagaatcataaatagaattcaattttttcccacccctaagagctcgatttttcttcagaaggcctccacctgcagaggtagcaattcatattgggaccaaattcaggaaaaatctatgtggagccacaaccaatttcaagaaaactaaagataaaggaaaattgaagaataatttcccaaataataccaagcataattgtagtagtggacaaaaaaaaggcacttaaacatcaggaataagcttggatataatgagcactgcagaacacaacaagtaggatgaaaagctctggaagttttcagtttactctcccatactcatagtttcatacattcctataaataggctatagctttgtactgtacataatagtaggggaaactttaccgatctgctttttggaggaagaagtgatcagatcattgactttatgttcagcagctgcagcctgagttgatctgcttgattttcggctatttgggggattgatatgctcagtggtggcatttcttgcaaggcctttttttcttgttggcattttcaatcaagaagtgtcctaaatagcagccgatttatataccagaacaagaatagcacatcagacaagcagacagcccgtttccttggtgaagactgctcagggttattgtgcaactttcagggtgctgacctagaggaagatgagaaaggaatcagctataagcagtacaagtcaacaaactgcatttcaattttcatacacgattgtttaaaatgatgatacacaaaagttggtataaaactacagaatacttcaggacgtcaaagattggaaaattaacttcatggaatgacatacaaactcactacatacactgaacttagctcttaggtacttcaatcaatatatgtcaaactctccccacagtcatcaaaaaacaggacgctactacggcatacacacttcagtcactcggtaggccactccgtacggcactcaccgtatcggcgttcgctactactacaggagtgacccctcagctcgcggcagcgacgaaatcgcgcatacggaagtcggaggaggcggtcgctggtcatcagcgccggcggaacccagcagcattaccggaaaatccaagcatgaaggtgtcgggagtcaaagaggcataccggaacaaggagagcagaggcggcggcgggcgggacgggaccagccggaggaggcggcggaaaccaaaccctagcggcggcggccggagaggaagcggacaggagaagagggatttttgaatcgtcgaagaggggagggagctccaaaagggcgagaaagttaaccttgtcaggtgggccccacgtcagaatccagtaggtgtaggcgggccgcctggagcttggcccattaaggcccaatcaaataatacaggcccagtaagctgaaagaaccatgggctataaatagctagctggttttcggggaataaaactccgaaccccctcgacaggttcgggaagaacacgcgttcgtatctgcaacgcgaaataactcaacggctgcatatgcagagttgaatttgaacttatatatattacatgttaatacaacttcttatattttttaaaaaaaatcatatctatatttaagtaacatacggacacaagtaaatattccctccaggactcaaaatccacttcctatatataccaccagaagctagcaggaacgggaaggcaggtcggtcatacacgtaagataggacgagtatgagagagcgagagcaatagcaaagcccagtg

SEQ ID NO: 5266 - DNA, 2000 bp, Oryza sativa
  misc_feature (1)...(2000): n = A,T,C or G
attctactctcaattttattntttcctggagtttgtaggcacaacaaattaagattttatgccaagagaatatttttgataaaaatactaataanaaccaaggctgcatatatgtgtttttttactactactagatttttttgtgcttgaaaaaggtgaggaaatgttgccaaggtcattgccttatcttccaggggaatagcttaaaaccgtgtgaacgcctatatctttatggttgagaagttctcaaagaatctgcccgcgtatatagaaataaaagtacaagactcgtcattttcacgctattttgttccaaatctatttgatgttgaaccactccttgggttctatatcttgtgagctagcgatggatactttttcttcatttcctttttataaaattgtattcattatctagtactataagatatatgtatcttttaagtaagtacacatttgcatgcatttattaatttgaactacttctatttttaaagataaatccaagtctaaaacattaaaatatgatggatattacctacatcccytaagactctcctttyccctttaatatgagatgtaatagctargatgagacttaagtcatatcctctaaacctgctaccgawtcttgattgtagagtagggcagccaggaatataatggcaactatccacaatagtgttgctgatggtgatggagattgtaaaatcttaccttacctacagagatcatgatttttttagacttggaaagaagaagagaaaaagttaatggtgtataaaaacaagctatacaaattgaaagaaaaaagtgcatatatctatatctaactggtctaatttactcgagaaagatgtgaggattcgaatgaacatctttacaaagagaatgctccaattgtgatcacatcaaatgcaatgtgaaataactttagtttcggcataaatgagaaaaggggttcgataacgaagaatgatatatgtattcagagcgcatttacactctcatggaaacaccaatgtggcaacctatgatgaatattataatcatgtgaataagcttaacatagttttaaaaaattaaattataagagaaaaaaatgccacattggtgtttactgttactattgttaccatggatccaccaccataggatgcgtgggctcgtcagtggatcatcaaaatgagaccctcactttacattttttttctcttataatttatttttttcaaactatgttaagcttatttacataattattctaatgaattatacacatttttttttcatattttggaaaatacatatttctaaaaaatatattactagagcaacttgttttaagatagtactccaagttgttaagcttattccaaaaccatgtaaataatccgcgacaataataatccgtttggcaatctaaatcaaacggcgcatataggggttgtttggttgatggctaagtttactatacctcactttgccacaagtgtgttatgccacacaaagtgaggctagcaatttgttagccacaagtgtggctaagtttggtaagaatttgagtctataacgcataggcccaatgactagtaaagtgaggcatgacacaagtgtgacaaccaaccaaacaatatactaacaaattgtgacatgtctaaggtttggcatggcaacctttgagagccaaccaaacagccccataatacatcgcagcaaatcaaatgaaaatacaactcactttttgcagcaaaccccctcacgatcacctaaatttcgaaaagatcctcaaagccccaacccttcttctccatcgcgtcgcctataaatacccccctcgccttcctctcacttcttccgccattcccctctcctcctcttcttcttctccaccgaataaacccccgcaaaaaggtggtgagttcgagagagagagagagagagagtggaaggctagggttagggttagggtttcctcctcgccgccgtcgcgtggcgcg

SEQ ID NO: 5267 - DNA, 2000 bp, Oryza sativa
ctccaaaaaaaaactgtccctcccctgcacggctgcacattgaacgcaaagctcgcgacaccaatcgcacgtgccacgtggcgggcatcttgaacggtgggacccgatgtcagtggcaggatggcagtctcctcgtcctacgtggcctcgcccgctcgtgggacgaccaaccgtctttaagaaattggtctcaagggcaagacggtaaacttcgtgactggtactggtagtagagaaattaattaactgtcgtatttcgaaaacctcaagagcacactgggcatcgtgacttggagcgaaacccggcgggtttggtgggtccggttcttcctttgaacgcacttgggccgtcggatcaaagtggtcgtgttaggaccgacggttagggacaggggcgtgctgttttcgtgcagaaaaagggtaatcctaggttttataattctggagttttgcagggtttatttgcctggtccatagtttgtgatcttttcatctaggagtatataggatttaattggttttttccgtgtttaattttcatccaaatctattcacgttccatcggactaatttttagcaaagtgtttgtttatgagttgcactattggacttcacctctagctcgagttgaatttacatcctagctacgctgggacgagcccaacctagttgatataacctatagcgaatccacgttaaaagatactactacatccgtttcaaattataagactttctaacattgcacatattcgtatagatgttaatgaatctaggcacacactacaacmaaaacctcgtatagaggcmcttttgtagaggcgttttgcaaattgcttccaaaattwgaagttttaatagcgtagagacmctttatagaggcactttaaaaatgcctagaaaacttttacyctgagacatttttwagatcagtttgtwagatttwatcctcgtagaggcattctttcggcactataaaatacgtctaatatgtaaaggcattttgttgatacattttaaactatgtagagacactttttagaatgataatgtgtactaaaggactaaatataagtaactaaaggaacaagcatataagtaatgacatggagttgagttggttagtgtattgaagattaaaatgatttaacgaagagattatgagttcaagacttgtcaaaagcaaggaaactattttattctcttttttggactggttttatatttttgcggtacaatttaatgtctctagaaaatgcatctaccatcttatagacattttataaaatgtctattcgtttgtagagacaattcaccataagacacttattagacattttttaaaatgcctctacattgttgtaaaggcatttaataagtgactctacagtactagaaaaatgtctctacaaagcatttttcttgtagtgacatatatgtctatattcattaacatatatataaatgtgggcaatactagaaaatcttataatatgaaacggaggaagtacgagctaaattagctactcaagtgtccaaaatagacaattttgatctgacaatattatttgggtaggcttttgaaacaaggtgaaacaatggaaaatttggagttatttatgcaaatttgctttgatacattgtagtgcatgaagctcgttcwaccaaysaggttttcctgttctcgtgtatctaggccatgagggaagcacattttggtagaattatgagaattttgttgtacatatatagctcttgatacgatgctcaattcaacaatatgttttcagttattgtactgatttcgtgaggatttcttatgctatattaagttgttcaagtttagtaatataaaagtgccatttcgttgtataaataaactgggttacaacaataattcatgatgatgtccaactattcctgattctccaataggcggtccctctggcatcctcaaatattagttcaataaaactcaaaatctctctgagggtgcmaag

SEQ ID NO: 5268 - DNA, 2000 bp, Oryza sativa
  misc_feature (1)...(2000): n = A,T,C or G
tagatagatagatagatattcaaatcagatgttctacaccctgatcattaggtctgtttaaactctacaagtccagatgataagatccataaacacatcattagtttttgcatggtcgctttcccctttaaaaatwaaataaaccatctagtagaaaacaacataaatgaagtgatcttctaatagaaacttgaagggaaggtaagatgtctctgtcttaccatgactcggatgcaaaacatacttcctccatcccaaaatataaatattttttagattggcacgggtattaagaaagtaggtgagaatgattgaagaaggtgtgtgattggttaaaaagagaaagtaggtgaaaaagaatggttgtgattggttgagagaaaaaggtaggtagaaaaatagcttcattttgggataaagtactgtgctagaaatagttatattttaggacggaggtagtaagcaacaagccgaccatatccatgctttaattctttccacaagcaacatacatagcccctcccagtcacatcatctttaaaccattttacatccatcaaatgctagagattgactactttatatttttcaaatgtgtgaaattccaacgcttattacaacttcttagtttaaacaacatcagtgtggtccagcacaaatattgtcatagttatccaagaatgctgcattaaaatattaattaatttcttatacgcatgtaacgtatgtacgaagtaacgttactatgaaaagagaatacttaagatccttaaataagttttgaaaatatagtactccctccgtaaaaaaaaagacaaacactgttttccgtgcccaacgtttgactgcccgtcttatttaaaaaaattatgaaaaaaaaattaaaaagacaggtcacgcataaaatattaatcatgttttatcatctaacaacaataaaaatacgaattataaaaaattcctnatnaagaacggacagtcaaagttggacacggaaacccagggtttgcctttttttttgggacggagggaagtacacatttagtgttactgtggcactcaattataccacctcgaggatcgtgaaaggattaatctagaatcattactattatattaattcatccaatagcgaagccacctctcaacaacttttgggtgacgagctgggctcgttggtgaacacatttttcttttgcataaattaggcatatatatttttttaagaaaatactcaatgtactggttagttttgtcttggctctgaaacttttatagctcctccacaatattcatcggaattaaagtgtaattttctctgctacattaaaagtgcaatcgtttttcttccatctcctttccactatatgtagtagccctcttcacgtgtgcggaaccatagtagatctagtattttatctttagtccatctaccgagccaatcacctattatatttgtctaacctagctcgggttttattttcaattcaccgatacagccaagctctaattatataattctaattatataatgtttgtctattataaaatatagacaaaaaaaacaggagagaaacaatccattatgtcaagctacctggacggcctcggcctcatagggggacatagaggctatagagctcagcatcacatcaccccccgcggaaaccaccaagttaacccagccgtccggccggcgtgtgggcatcgcctaggtgatcaggtcaatccggccgtttcatacgcgcgactccgcgagcgcgcacgagactccgagagccaacccaacgaacaaacccaacccaacccaaccaaccccccacacgcctccctccctcccgcctcctctttatataccccactccgtgtcaaaccatccattccaccaccaagtcctccctcctcacctcacccgcactctctcccgcgaaaagacttcttctctcgtcgttgttgttgtcgttgttgttgcactcgcgcgcggcggcgcggtgccagag

SEQ ID NO: 5269 - DNA, 2000 bp, Oryza sativa
tcccccctgctcacccctcgtccacctgcttgttgatctgtgaatcggagctctttccgatcgattacccgtgtggtgcgatctcgatttcgggagggtagagttgttgtctcggtgcatgatcctcaatttcaacttctttggtatgggagtgattattgttttgccttcgtgcaggtttgctctcagttttaagcgaatcataacgatttcagtagattcgttttggggatttatgtatgtactttaagcacaacttttcattttttatatttacataaattttttgaataagatgagtggtcaaacagtaaaatcccttatattatgggatggagggagtagcttatagcagaatagttgttggcatgttgctatgttggagaattcgtcaagggcacaatggtttttctcctttgaagcttgtgttttttttgcgctaaaccagggggccagataagaagtgtaaacaagatgcctaaatcctgatgcattttgctgcccatcctttttcatgcaaatactaggatttaaacattttgtctgaaatataggatagtgttggaaacatatagattgtcagaaatgtttgtttattggctgcaagggtctggttgggcagctgcaaggtgctatgtttatctcttttcttccttctctcgttgtatctcactgctttgcctccatgcatgtctcaccgacgcatacaccaaccagcaatgcatctgagattacacgaaaactgactgatgcacagtttccttaccagttacctccattaactactcgtatccacatgatatgtttaccgtaataaagtgtaaacgttagtaagggagtgtttggcttcatggccacactttactacatcaaacttgtggctggcacaatttattagacatgcgtttggttcactgagatagttatagcttgctatacttttttaatagcatatcctacatgccataaacttaattttctttttaactttgccacactttgtggctagcaatttatccaccacacttttgtggctaccacaaattacctaacgttagttgtgataaagtgttaccggcaatcaaacacaccctagatactcatcgagttttctgcagctgagttgctagctgcgctttggtatacacagtccatgggtcactttgagatccacgctggacataatttcacccccagtagaccatagcctgcacatgccatttatctccccggggcaatagtcaatctctggtccatgccattctccccgccccaacaacgcccagttgacctcgtcgcctgacagtgaggtcctctcaaaatattctattaaaactcttttagatactctttccatctcaaaataaatttaatttttcgtccatttcacacgtaccaataaaaaattaaaaaaaatttaaaaagactagaatatcccacttcatcaaattctaatgcagttttttcttaatttatctactgccaatacatttatctcttatttttcataaactctgataaaatgattactcaaaaataaacttattctgagataaatagaaaccaggcaaaaatacctctgatgaaataattattcaaaaataaacacatttagagaaatataagaagcaaaaatgaacttattctaagacgaagagagtgcttcatatcgtcacttggattttcacaagctagtttattatcggctacttctcgaaatcttaaagctatctaatcagggcctcatgccctcatctctacacatcattgggacacgccaaataatctcactcactagcttcagctccactccaagtacatctaaattaatttgccatagcgcgtagcatcggaaaccgtctgcttctccctctctctctgcctgcttcagatccacgcgatcgatcgaccactctcacgcccgccgcctccgccgccgctatatatgcattatcagccgtgacaccccgcgctgtctcctgtctccgccgtcgtcgtcc

SEQ ID NO: 5270 - DNA, 2000 bp, Oryza sativa
aaacgaaaatccttgtatcggccacaactttaaaatgaagaacttctaaacatgttttagaatatttgacatttatctccgttctttaagaaaaccaacttgcaaacaaccaaaataaatggaaataaattttccccagcttaatttggaagcctctcttcttctttttttgttataaaactagcgccgatagcacatcagggtccgaatgcagaacgacatagaagatctgaacgcaatgacaacatcgtgacaagatatttaataatagagttcagacgtagtttacatctccgaaaaacttattacgggcgctcctacccgaccagtatattatagtatatccaggtatcacggccttggaccaacattaccaccagctagcagtcatagccacattcatgctattgttatcacataattataacataagtacctttctatttaaaaaagagagcctacgacagagtttgactctactaatctttaacacgtagtataactctaagtactaaattataaccgatcacatatacgtactcttacacaaactgtaacatgttcttatctttttttttctctttctcaaccagttggcaaaaatcaaaagagccgtcaaaagaaacaaggattaagagaacggaattgctatatggcattcgaatgaaatttggggatgaaatcttacagattttagaccattggatccatgccaagattcgtgcatcagcttctctcctccaactccggcgggctccccttcttctccggcgccggcgaaaccccaactccggcgggttagggtttggggttggggtgagggtaggaggggggtttcctcggggcttagaaggatggccgtgggcggcggaggaccggcggtgggcggtggactccggcgggcggcgaggcggcggcgaagccgcggggatggaggagggcggtgggccggcgttggcggcggggtcaaagcaagggtgggattaggaggcggcggccggtggtggcggatccggcggcggggagccgccggagacggggaagacggttggggcgggggcacctcgtcatcgcacccatgaggagaaaagtgaggggggaagggaagggggatgggggagggggaggggctcgccgttggggcctcgccggtgccgctgacctttttcggccagccggcaaggcgggcggcagcgcggtggggcggtggcggtggtggcggcggcggatcgcgcatgggatgggagaaggagggtggcggcgtgatctggaaaccggggggaggaggaggaggaggaggagttagggttaaggggatgcacgaatcttaaagagagaatcccttatatgccactgaaaattgatctaatctcttatgtgccattgaaaattggctattcctttatatgccattgatccaaatttgcacaccctctcatgccactcccgtcagttgaccgtgtgttgaccgttaattctcaaggaaaaaagacgtatttacccttctgagtatagggcatgcctaacaactcagagagggcaaatatgtcytttttactggagagttaacggtcaactgacgatagtggcatgagagggtgcacaaatttggattaatggcatataagggaaaagccaattttcaatggcacataagagaccagaccaattttcagtggcatataagggattatctcaatcttaaagcacatccaatgattcaaaattcgaatgataggaggtgaaattttctgtcacatgatatatagataatccattaagagaaagccattcttctttatgctcagctgtcggatttgcctcacaccacgctgcactgcggtctccatataagacaccgctccctctcctcccgtccactatatcctctcctacgatactgcgcgctcagcacagaagaggaaggtatcttaactagcccaggataccaccacacaccgagtactgttacgtgttcacggtctagctaagcagtgatc

SEQ ID NO: 5271 - DNA, 2000 bp, Oryza sativa
tgagatgaaggagtaggtgtttaaatactactcctatatttcagggtaaatttagataacgagaaactactatattttgaaacagcaagaaatagtaataatattaattactatgtttccattcatgttcatgcacatgttcactgttcacatttgtttatcaccttctcacataggggctgcgtttagttcacatcaaaattggaaagtttggttgaaattgaaacgatgtgacggaaaagttggaagtttatgtgtgtaggaaaattttaatatgatgaaaaagttgaaagtttgaagaattattttagaactaaacacggcgaggattacacgcatggtagtaccagatttgtagccctgagaagtgaatgaaaatccacagtttcccccaaaaaagcctcctcttttttacttacctgaacttttgtccagcccctatacatatccgtattctgaacccgaaccctcaaatgcagcagtgaacacaacacagaggaagagagagagagttaagctgggctcagggaggactaggagagcagcagaggcgaccgcttgttgttgctgctgcgtttgcgtttctagggtgtaagcacgggccatctttccggtgggagctttgaatgccaatcttcaccaccatagtagtactatctcattatctctccctctgagtcctctctcgatccggttcggcttgctcgggttcgcgcaacggaaaggcgagatttttgaggggatgaagtagttgccattctgatatccttctctatctatccgcttcgacgagccgcgatctctgggaggttggtttctttctttgctttgcttcagagattggcatctcccttcctccttttcttcttcttgggctgctctttcagatatcagatcggttttctgttgaggaaggcaagttctttcgagggtgatttgttgtttgttctagatgttttttttcttgttgattagtgcttaagcatcgatctttgtgttctagattggttttgtgttcatgtatgtatatgcttcgggtgttgaagccatcaatcagtgtgtgctaatatctgttccaggttcttayctgggttcatgctttgaattggtttagtatttttttttctctctctctgcgattatgaaattttaggagttggatgttgatttttcaatatatgaacaggagatttttttkgtttggtcgtgttaagagaagtcgtaatctaggtaggtctctagtgctaattatagcaaaaggaagagatgtctttctctccagagtttaggtttcgttcaaaaattttgcgccgtattttgattgacaaggagagatgagatctgtgcagtatgtcaatcagtcaagactaatccagatgctgttcatgtcttgttcttgatctggtcataaccttgcactttcagtttctgtgatgcttcaattgtcaaaaccagcgtgttttagcactgttccaccatggcagttgttctccaacgcagctaaaaaaaagtcaattctttagtattatattgcagatatgtttgtctaccatttcagtctaataataataaatactactcgatttgtctctgtccattgaaccaaaacatattctatgaccaataattgacaatacaatactgcctgttgctaacccagttcagtttatctttcaggaatcttgagaagcctatgcaattgctggttcttcatcaaccttcgcaagttttttggttccgtttgtagatattagctaaccatagatcaattatagtttagccatcttataaacaagctgttgtgagaatttgacttcagatgggccaaggagttgcggctattcctggccttgggtctcttggaggcgtttcctgcgacaaattccttttctcctttgcgaaattctacttcaacatgtggtttctactgatccaggcatccaaagttggaatttgatcacttgtgaggtagcttctcttcgctttcgtggtttgccaga

SEQ ID NO: 5272 - DNA, 2000 bp, Oryza sativa
catattttttttgagctcaatagattaaccgatggtgaatataagaagtccaccggaactgggtgggcatgaagcttgtgttcaaaacggccaattttgtgccttccatatttgaccaacagattgcagatatgccaactatcactggtttactacgattaatacatgttcaagcaagatgaacagcttacatatgttcctagtaaactttgccaaggggacatgagtagtgctacaccacaacaatggcatttatccactttccagcctgttctgaccaaattatcttcaggtagaatttgagtgtcacctagagaaatatttttatcatcagaggttatgtaattttccgtaggaagtcaaaacagtccttatggtggcacttggatctcctgtataagaactgtaaaaaattgatattgcggtgattcattcagtgagtaaacattttagacacccagtgaaattcaacacacttcattaaagcaccttccttttcttttacactatggtcatgttctttcttttttggctatcggcatacttgtaaatcctgcttacgattcctcaaacttcatttagtacctgacttgatatttttagtttcttgattcaccattgcctgcatctatttaggagcgggagattgcacaccaaaggtcaaacaggttgatctaaagatgcatagggaccagctgattgggtcggcattcatcgcatttggcatcatattatttgtgggtttcttctatgctgcggttttgaccaagatgcttccaccatatgaaaaccggtttctgtcagcaatccaaaacgataggtaagtaaaaacaaggacagaacagatgttcagcatcattcactgttttcatagatatgttcttttactgcatagggcattgatgtacggttgcaccggaatcacctaaattagttttctgcttatatttacaggtattactgcctgctcataccgttgacactcccagtgataatcgtggctgtctatttgcattggctaagcatgaagatgttcaagcatgcatgaagcctcattctaaaagtctgaagttctttctcaaatgacaacctcattatcatggtgaccaaaaacatactccctccgtcccaaaaaaaactcaacctggacaaaggggattcatgaggttttttgggacggagggagtatattactagtatcgttctcaaagtcagcgttagacttttacaaccattaatatatatatatttttctgccaggaattcaaactatacataattgtactatcgtagaactatttgtccccagctccgtctgttgcactagaaaaaaaacagactaatttaggatcaaggcacaaacaagtgtcaaattttttttgtctatcaaattttgccaccagagtataattattgtttatagtacaaagacttcaaatcttgtgcactgccttttatgtcaattttttaccatgggtcttgcattgaatttttcttttttttcaaaaaaaacatattgttgtgctaaaaaaaaagagaaaagaaacaaaagcaatctaaatttggtagcgcgttggctttgctatgtttacccgggatatgtttgggccgtaragattgtcacggatcgggctatagagagcagcagtaattttgagttaacaaagcaagtttagagttttgatcctgtccaactaatcgccgggttaatcgggtctacacgcgtgacatgcgccgcaacgagattaccaaaaaccaaaacaagcaaagggcgggcggttcattcattcacagaagaagagggccatcactaggaaaaaatcatcatggtcgtcatggaggggagagacagtatagcctaatctaatcccagattgctagtgattagcacgtagatacatagaagcgatcgatcgaggacacatcgagaaaaaggtaaaagggagatcaattaatcgaagaagagagtttttgaaatatcgatcgatctagctatcatc

SEQ ID NO: 5273 - DNA, 2000 bp, Oryza sativa
tctagcttccagaatttttcagccactatctcgtgaattggcggctaagaacatctatgtgcaatctgtgtatcgttctgttgctgctagctagtggaaatggattctgaatttctaactcttacaggatgacctagtgcatgcttttacttctaaaaatgtaacattacaacaaagkttaacattataccccccccccccccttcattgaaaaatataagacatatttcgactatttgattttgagtttttataaacgattaatccaataatatttaattaggttctgccataacaaaatatatttttgggatttatattcggaggtactttcttatgacctaaagataagatgaagatcaagatcaagattaagtgtttcacgcaaaaacgatgtggtaataacgtgtgattaattaagttttaattattacaaacttaaaaaatggattaatctgatattttagaacaactttcatataaaaagttttcgtacgaaatgtaccatttagcagtttaaaaagcatgccattttaatccaaaagtttatcccctaattttagaggaaacgaacagggtatgtgacgttgtaattataagcgaaatagcgtagtagaaaattgtggtcgaagcatgttttggggcagtcaaaatacgtcttgtatttttgagacatttaactatttgccacttttaagatgtgtcaattaactatttaccacttgttgcctatgacatgtaggttcagtgacaaatcatttatcaccactcgtaagagattattggtatagaagcatttatcacttcacaaaatttcatgtctagactcatcctacaaaaacaagaaaactaaagatccgtcagaactgaattcataatatattcttttcttcttgatacgtaggtcaaattaattaggactccaaagtttacgtgatggtatatatatacacacacctatcagagttgtcaaatagtattgtcacaatttccggctagctctgctaatccaatgggtcaaaaatgaactttgcaacacaacagtagaaagaagcatcgctttttctgaacgctttccctttccttgcccctgctactgttgtttttttaaaaaaggtaaaaaattttaaaaagcggcaacagaccgcgtcgctaagctggaaattacctctgaaaatcaccggcgtttccacacactgtgcaaggttccttgccccaaatcaaagcgtccataaagttgagaagaaagaaaagaaaaaaaaacaaggcttagctagctagctacttaaacaaagcccacaccacaactcaaagaatcgattcccccattgatcaatcaatcaatcgatgagctagctctctttatttaccacccacaaacatcttttaatcccctttgatcaacacatgatcgatcaccatctgtccctttttttctctgaatttgaatcgatcccttctctgttaatttctccttgccatacatggcttctgcctcttcttgctcagcttaaagttcagaaccctagaaagttgttattggcttagctatagctgcttgctctcccaccaagtctacactactgtcacacactgacattgtccgtcctccatgtacatggatgcacagcaaaaagccctagcttaattagctacgtataccttccttgtcgccgggttcaccgcggcgaggcgacgtcgacgccgacaccggcgtcgccgctttgcttgccggcgaggccacctcccggatgcccctccatggccgtgcagtgaccacgcatatgcctgctcatcactttctccttgtagagttctaggtataaatgtctcgcgccattgttaccgtctagtgaaatctcgatcttggaacatttaggtgagattattgatgccgagttatctgcgaattttcatggagttttccggtgttttaattcgatggtgtggtttggttgcaggtacaaggttgaagacgacggccggcaacgacggcgacg

SEQ ID NO: 5274 - DNA, 2000 bp, Oryza sativa
gcgcgcgaaacacaaggtaaggtagaagtgttggtaacacaggctgctgaacatagcctaagatgggtttgcaatgcggcaccttataaaagttggatgaagattaagattttcatggcacgcttttcaaactgctaaacagtgtgttttgtgcgaaaactttatatataaaagttgctctaaattatcatattaatctatttttcaagtttgtaataattaaaactcaatcaatcatacgttaataccacctcgttttgcataaaaaacttaatcttcatcttcatcttcaggagattcaaacaccacctttgacatatacattataatatcctcttaaatatttcttttttacactcttgttctctctctcacttaaaacaagtactgatatcattatgaggtatgaattgagaaccaatgattaaagaaatgtaaatatgatatattagttattcaaaaccactagtttaagcttaaacaatacaaaagcatcatctaaattagtttaagagtttggatatggtgttttaaggtttaggatgatagataaacttttatccggagtataggggcatatgaactttttctttaactaattaaaaaaatggtttgacaaggttgagtcatgaaaagggaaggagcctacccttacaggtccacatgtcagcgacacatgtccttatattagcgacacatgtccttgatgtgtctcttcccgctgaaacggggtcgtcaatccatagttgcatcaaagccgggtcacaaaaggcttttctgctcattccaggtcccgtatggtagtggaatctaacgaggatatctcacaaaaaagctgatcggataaaaggcataaaactgccccttaaaaaagatgaacttccytttcgtggtgttcttggttatttaaacaatccatttcatattagcttcttattactccactgaagataataataattgttcctaaaaaagataataataatttttaaaaagaatacaatataattttaatcactcgctattatgagctttgtaataagtaactagttaagtaaccttgtctgctatattttgaaattcaaataaaaatgcacaattgcaaatatgatcttgtaccatcgttttaaactagtacatcgtattgtcataattttattatcaaatcccaccgagaatctagaaatcgtgtgtttttaattatgaatttgattaaaacctaattgtttaaaatattaagtcaataatgtcttgtgctttcaatcttaagagttttagactgattcttatatatgaaaaaaaatatgtatttaaagtttttgctatttgagaaatgtaataactgtctgttacttatttcaagtcatttatgtttagaaacacattataaatatagacgctcacaatacgtatacacttatccttaatgcacaatttgaacatctacctctatgagcactttcgagaatttaggatggcatatcttcaaatttgaaaaaattaacgtagacgtcttgctcccggtaggtacatatcctaccattgaaaaaaaataattaactataaataagagcatcaataccaactattcgctatttcaagtcatttttatactttccaattatacagtttttatctaaaataaagcatttccttttctttcgaagatgaaattaaacagagcatccaggctatccagcttcatatttgcatccatttctctcccttattttttttaaaaaaaatctgaaatagaaggtttctaattcggtagaccacatgcacagcaagtttggaagtataattataaggtgcactaataagttccttgtttcatcagataataaagtaatactaataataaagtttataagattaaataatagctctggtcagttatcaacttgtactagaagagctctataaaaggtcgtcactggctcactgcctcccctcgtccgtccccagttcgtcacccttcatctccacagcgccagaca

SEQ ID NO: 5275 - DNA, 1608 bp, Oryza sativa
caatktcaactttaattcscgttctagttttacatrgtwgggrattccgtgctaggtatacgcgagactaaggtaaaagagatggagacgaggatttttatacaggttcgggcccctgaattgtcaggtaataaccctacatcctgttggccgaagccgatattgctcttattcatgataatcacaccagtacaatatttggggtagcctctctaactgttgtcgatatggcggtctgacgatctgactcatagtcgacaacagggtagccttcctccttgaatccgtgcccggcgagatcagagatagcgctttcgtctctcctgacagtatccggagacaccgtagggtactagccgtgcttatccctgaagtcaatatccggcggcgtgtcttggcgtatgtaggcttctatgttgtggcttctatgtcgattgtattgggtgttgattctcttggttgttgattgtcccccctctcctcctagggggccttgtatttatacccataggtgtccccttgtccaagtagaactagggaactaatatggatacaatccgagtagtccttgtcgtttccatgtagaactctggttgtctttccttatccggaactcctcctatatccgcaggttgtttccttataggatatggtatgtggtaggttctgccgagatttagtcaaccactcttaggtatgtggtatccataaccctgacaattatatttctaaatctgaaaaactaatttttgataggcatatttcaatccaacaatctatcctcttaatgagtttctcggatttaatgcgtgactctccatttttccacacatgattggctacatgggcatcgagacatgtaaatattaatgaatcgcttgtttacgagggatgactagtagcatatttaaatggatgataagtagaattatttatccttggtctgtgtgccaagataaaatatgactatttagatggagggagtacgaattatcggtcaaatgttttaaagattaaatcttaaattacgtacgcgccttatattatgggatagagagtacgaggtaaggagtatttgattttcgatggaaaaaaaaacttgcgacactctcaaaacctaaaaccggtcgcctgggcacaacagaattgtgttacagaaaacgggccaatcccacttctccgtactcaacggcgaccaacaaatactgcaactctgcacgtctttccacgccgcaaaatcctcctcccctcctcctcccgattgaccaaccattcaacgctccacgtgtccccgctttgctctccactggtagtgggtccctacacgcgcaaaacatctcacgggcccacatgtaagcgaccgtagccagtagtagcatttgtcgcttcaaaccgtcgacgagaagccacgccacgtcgcgactctgtttttttttctttcttcctcctcacgactcgcggcgtcggactcctcgaacctcgggtttcttcttctcttctcgcctcgcctccgtttcgatttggggagagagagatagagaggcgatcgcatcgaggaggcgcaaaaaccctagaaggcgaaccttccggaagcttctggaagggagg

SEQ ID NO: 5276 - DNA, 2000 bp, Oryza sativa
cttagcggcattcttctgatggtgggactgagcagcattcctcatatggtgggactgagcagcagccgagttagtctgagcagccccttagggataatgtcattgtgtaatgcttggcggtaaaaaaaactttagttagaaattcttggcataaacaattttagctaggaaaaatagagatattcatcgattttgtatgtgttaagattttcagaaacagtgaaacaccatgcatgtttggtgcttttatagctttgaggggcatgataatcctagaaacaaatggattccttctcttctttttgttagttcatgtgaattggatatgatgttttggattaaggttgttgacaacctttgttcggttcaccattaattatcccactttgtcaatttccgtaaacaagtaatggatagcaaaatcgctgttatcactacattgtatgttttatctgtttgccatgacaagaatttgcgttttcccatcctaaatcgacgactgaggtagcacagaagtcttctgaatcggtgagagtctgcgattaggtgcgaggcgccgggaggagctcctgaatccaagctagctcgctctaagaatatcagaaagaactctgttttgagtaactagaacatatataaaaaccagcagcctgcatactcatgcatatataaatatacaatttctacctttatggagagaatattttgtttcgcatctatctattacttattaaagtaataagtaatagataaagagcctccatatttgctctcatggtctagaaaatcttatattaatcggagaaaaggaaggaatagagcccatgtaaaaatacaatttaaaaatagctaaaattcataattaaaaataaggaatattggaacagtagtctagagtccatactccattcattgaggtatgcaatttataactaattgaaatttgaaattaaaaaacaagaaaattaaaagtggaggtttgagttcatatatagaaacgcaatttagaaataattaaaaatcaaaattaaaagttaaggagtagtggaagaagagtccatacagaaacacagtttagaaataacggaaattggtaacttaaaaaaataagggacggttgaaaagtagcctagaatccatatagaatttagaactaattaaaattctaaataataaaaaagtagagtttatggacccacaaaagtaaattatcattaacgcataattaattgagttttgattattaaacttaaaaaatgaatttatctatttaaatcaacatttatatagaaatagaaagccgtttagtaatttaaaaaaacgtgtcgatagggatttagttcaattcagtatcttaaatactactagaaattaacggagactaaggcttgttcggtttccattttcccgtgctataggaggctattattttcccattttggcaatttccgtaggcaacttgtggttgcggtctcgtggatagcaaaatttcccatttcttgatgcgtgacgtggcctcctatctcactgcattggatggccacaatttagctagccaagctcctcattgcttctctctctcttgcccccatccatggctacgtgtactctccctctgccaccacaaaagtcgcgctttttccccgcctaaatcgtggaagatcagtgcggcggtggtgcgagctcctcaatccccagcccggccaagaattagcgggaaaggtgagaattttcttgcccccacccgcgccgtgcccccgtgccgtcttcttggggttgggggtggttccccattcggatgaactgtgcttgttcgagtgatttgcgtgtgcagatatgattttttggttttttttgttttgggctgtttcaattcactgcggtagaggtcttgctactcctagacggtttgtggttgcttcctagtccttcttcttctcctctggccagcgaattcaattctccggcgaggtcgatccgtgctcgcgcaggttggggcc

SEQ ID NO: 5277 - DNA, 2000 bp, Oryza sativa
aatttattaaaagaagactggccggctggggtctaaagaggttaggcaacaccttcaaagtgaagaaattactaccatgtttcacataagtggctagtccttttcacataccattttactttgcaaagtagtgtaaaaagttcacttttcaatgtaaggtaaaacagagtagctttcactagcttaaaaagattaattttgtccttgctttcggttaagttccaatgattagcgtggaaaacacacgagttagagacatgcacaatttatataatatatatggtggtatagcttttttttagtgctctattgcttaaaaaaaatcaaagtataaatatgttttatgatcttacaatagtgaactgattttgaaaaatatgcacggatcttataaagtgatcaagattatagtggcgtgtttaggtgaaaagggagtcttacttgtgtggttctcccggattcttcacacagatttcttcgactgataaaatcataacccatgccaaaaccatgcatatatttatgtgaattataatataatagtactttttaatacatgtaatgagtggactgcaagcaggatagcatgcaaatttatcacaaccagacaagatggaagaactgactgtatatttgtcttccataaacattgtcatttgccaatcaatcatcacctcctctggctgtatactccatgtgttgccaaacacagatttcttgcagaatctctgagtgttttcagggccagatgtaaggagcagagaggaactacaattcagagccaaatcacacaatattttgagacctgaaaactggggccttggctacccaatgagggagcaaaacgacagctcagcaatcaccatgaagcagttggcagcctctgattgggctgctccttgcttacctgtcccttagtagaaccccactatacctgtttctgtttgttcttcctgttgacagcttacttacaactgaagcacaaaggcaccaccatcattcacacccagcacacagcaaatgcatgaccccatgttttcagttgtgcagaattcatgcccaggttgtagtggcctttcagaaactgaaaccagttgagagtgggagccaatgcaatcatgaggatcgcgccaattttgcgcaatattcgcagtatttacctagtaaaattctctgaaaattaatcttgatatagtgttccgttcaaagaggtggatcaaatcctgaacaattttgttcggttcaataactcacgctgtttgcgcaaatattattcggcttatattttcttaactagtatcacaatatatcactattaaatttatattgcagattcagaaaggaaagaataatcaaattatgaaccaaaaaggtagcccagcacaaggaacacaagtacatcttcctttcctccctggtgtccctcctgcagtttccttttgcttagcacaggggggataaaacttttactgctgacaatggccggccacagcaaaagcctcttcatctgtggggttggctgatagctatcctgccctactacatacctttccatgtctaatatctgaagtcggttgagaggtgaattcagcagaaaggggttgttgcagggggcaaggtatctcaggggaaacttcttgcagcaaactgcacacggtttggcttagctgtgctgccacattttctcactggctgcaagcagcttagctagcttgtactcactactcccctatctatatatacaggcaccaactcttgtaaggttcagagttcaggtccattccaaagttgcaatcaatctgtctcgattattgcctctctgctctgagtgtgactgtcaatctgtgagcttagctagtgactggccattgcacgagaaaagaacaggttgatcgatcattagtaggtgaagtgttcttgccctgttcttttcttggtttcttgggtaaaccaactggttgggttcggtgagtttgagaacttcagaaactgtaacaaca

SEQ ID NO: 5278 - DNA, 120 bp, Oryza sativa
ggaggggggggttggcgcgcgtttgggttggggggacggtggtatggagagaggaggaggagggggaggaggaggaggaggaggggtggtggggagcgagcaggggacgcccgagagcga

SEQ ID NO: 5279 - DNA, 2000 bp, Oryza sativa
atagggtggcatggttccaacaaacccttatattaatacaaactttaatatgatacatagtacagataagatgatctatgtaaccgatagctaaatttttctggtgaacgtaaagggacctagaaagtaccaaattaatatgatatagtcgtatagacatattgtgtacctgaaatgaaatgaacatatcttatatatacatctcatagtgcaaagaaaaactattatttctacaataaaaataaataattatatcactgaacaactactctctccgtggccataaaaaaacaaatctagaatatgatatgatattttctagtacaataaatttagaacaccgcatctcgtttatattgttcttttaacatcatatctcgtctgagattggttttttatgggacaagggagtacacctcagtttcttaagacgtgtttagatctagtggtgaaaagtttcggcgtgtcacatcggatatacggacacatatttaaagtattaaacgtagattaataacaaaacaaattacatattccgcttgtaaactgcaagacgaatttattaagtctaaagaatccgtcattagcaaatgtttactgtagcaccacattatcaaatcatgtagcaattaagcttaaaagattcgtctcacaatttacatgtaatctatataattagtttttttctatatttaatattttatatattgtccaatcattcaatgtgacatggtaaaaaaaaattttcgtgggaattgaacagtgccttaatccgaaatctgaaacctccatcatttaccaaccaaatcttattaccgaaccccaaaaaagaagtctcctaatcattttcttcaaaaagtaaatagtacaaggatgaaatgacaaaaagcgccgcagcataaaagtataaaaccgcgcgagcacgcaaagcgcagctcactttcgcggcatttcttacatctsgccccctccaattcctcccaattcacgaytsgcccccyttcccttccccaccttatctccggcgatctcctcgcgtctccggcggccggggagagatcgggggccgactgatcaacctcctcctcccggacgagatcctcgacgaggtgctccgccgcgtggccgtgtccggggccaagcgggacctcgaagcgtgcgccctcgtctgccgccgctggcgccgccacgaccgcgccacccgccgctccgccaagctcgccgcgtccggggcccgcgccgacgaggtgctccgcctcgtcgccgagcggttcccggcgctcgtcgaggtgtcggtggacgagcgcatcagcgtcgaggccgccgcggccgggccctcctgtgccgccgctagatcgcgccgccgcccggtgggttccctccatccctatccttgcttttgtggctccgtacgcgaattgcaggaaatgtagaggatcgtagagatgttttccgaatcgggattatgaggagatttagaattttgggagaaggttcgcatctgtcgaaggttttgtaggggaattgggggcaaactatcgatttcttatcctgttttgaaggtagtttgatcgatttggaccttacaaatccgcatttctcttggttggatgcagaatcgtgataactgataattctcctggggattgagttgtggtatccatttgtacatagttgtatgagatctgcatttccatgacttgtacaacagctgcatgcaaataagtaatgtgtgagttttgcatatgatcagtttgaaaaaccattgctatgtgtccaccagcttagtagtgattaatgattattatacggcaatatatatgaactgatgtgctcggatgttgtcctattacatgcagttagattctttaatgaaaactttctccttgcagtagattaacatagccttgtactgatgcactgatgcgatacagatgtatgatgttagtccttctgggcgccgtaggaggatgtcccgcagctcaaatttcggagcgcac

SEQ ID NO: 5280 - DNA, 2000 bp, Oryza sativa
gtcgactatagcttcgttaactgcggcgacaacaattatctcgctgaggttgtcatttaatttgatacatgctaccaccactaataaattgttccgtaaaagttctctcgttaataaattacaccgtaaataagttcgccaaatgagatggttgcatgtatgcatagtgaagaacmaaaaaaaaaactccatgaaattacctgtctggctgtcctgtcctgcccttgttgttgttggttctgaataacagaataagcgtgttccttttgtttaatcagttgcatcttctgagctcaatatcaaagaccaatgtatgctaatgtttgcagttagtttggattagttttgtgttgttaagctctgattatgccgtcgttggattaccgaccattttaagttaatatccgcaatatcatggcccgtgtaatgtgggacatttcgctttcacttacatcacggctcccattgagagaaacagaggtttttctgatagaaatattaaatacaaatattgcactggtaaaatttcggaaaagaaatgagtttgtgatccgtatggaacggacacctgtacgtctgtacgaaatattacaacactgacattcaaccgcatctgcgtataaggattcatcttttccattttacttcctaagtactccaacatatactactcgatcaatattgttacgattcaatatagaaaaacaactcgaataaatttgaccagagagagtatatatcacaatcaaaatttcccattatttgcatgatgcaacaacatactgccgttcaagcagtggaaaaaaaatcaacaaatcaacaagaataaataatttatgatttattagtagaatttttatatccatgctatgcttaaaaatcaatgctgaaaaataattacgataaaaaaacaaaaatgattttttagattgtattttaactacagccgataagataacaaaactcgttgtctctccagagcttctcgatgcacacctgcagctgaaccagtcaacatctctgcacgctgcattccaacacgaaagccaagcattacagcagcagccaaccattctggaaatctccatgatttgtactgttcgttcgtcatcgcgatcggttcctcgcatcacagacgacttgagctgcaattagtactctctccgtctcataatataaaggattttaagtttttacttgcacagtttgaccactcgtcttattcaaaaaaaatttaaaattagtatttatttttttacttactttattatccaaagtactttaagcataacttttcgttttttatatttgcacaaatttttgaataagactagtggtcaaacagtacaaacaaaaactcaaaatcccttgtatatgagacggagggagtacttcacccagagagattattataacttgtagcggtatattaatgataaaaaataatttataagtgtacttttatataagtattgttagtgccttaaaagctgataccaataaataaactacattgattttttttaaaatcaatttaaaattaaaatttaggcaacagttttttttataggatggaacaaattaagcttattcatccatccccgatttatattcaacaaactctgaggaaattagcggataactttgatcgaaggaaacagattttgtatgaattacactaacttctccgaatctacaaaggatatgctttatctttgtccgcccaaaatctgcggccaaattagtatgcaatcagtgaatatatccacgtaatttgttcactatcacacacaattggttccatgcatgaatgcgtggaaatttcatggaatttgattttcggaagcaagtgaaagagtcatccatgactcggacgcgtcacctcctctgcctctatttaagcttgtggaatcaaaagccacctacatttcactagcagctagcaagtgtacacacatctataaattgtagtagtaaccaccttagctgaggtgatggcc

SEQ ID NO: 5281 - DNA, 2000 bp, Oryza sativa
cctctagctggcaactttcacagccgccacgggagggtcaaccaagcaagctgcgatcgtcgccgcatcctacccaggctgcgccgagctcccacctccgattgtcgacgtcctctagctgtcggttgcctccttcatccgcttgcttggccgcctcccacctccggtcaccgccgcctcctacctccactgcgctgagctcccccttcggccgttgaactgtgacgggtaaacgacatgcccacgggcacatggcacccgcgggcgacggtcatggacagtatttctttcctgtcatgtagcgggtatacccgcggacatgaattacctcgtgggcaagggcatgagtagtgcccgtcgtgcccagctgccatgacatatttggatttttttttagataatggaatataacatgccatatttggatgggcctcaattcccacccatgcttgtttacaatttacaaaccaacatcttagctccaaataaaattgacactaataacactatcttcgtaacagagagtttagtttcacgggcggagaataataataatactctgtcaactgtaaagaatttatataggagtactctggaggtaaaaggggcaaaaaaaaargaaaaataatcatgcttgtccgagcaacaactatggtacactatttcggaatgcataaatataccatgggtgactgaaattctaaaattttcaattgaagagcttcaaagatttcaacgaattccgctaagtttgcaaaatcaaatagaatttgaaagtttcggctggtaaaatatcctaccgggaccctccaataaaccctgaaattttgcgagttttgggaatttagttcctgtcaacagctgccagtgccacacccttcccttacctctgaaacataggaaattttgcaggatttccatgagaatttttagtggccaccacatataaagcgaagcaaaagtcacatggagcctgattttttcccccataatccgtcaaaattccaagcactttgtacttttttgctgctggaattccagggcacagcacatcgatctggcccttgggcgattgacaattttgcgccacatagcagcagcagataaggttttggaacggctgctacacgtacgaaccaaaaggatgaccaagaaggagaatttgaagatttttttatagtattaattatgattgttgatcgaattcgtcaatggcaaaatcggcctggctctggctggctggctgctaattcattccagaaggtagccaggaatttggaggtaggactagcatttacatgaattttcttgaactgaagaacaatcatatcttgaggtcaatattgaagcacaagttaattaggacttcaatttaccaacttatgtgcgttctagctctatttaccaactccttgcctgtaaaggtttggagattatttggaataattaataggagtattgcytgtgttgatgtgkgtaattaaccggwaacttgaaatattaattctggggtttggaacatgcgcttattgctaatgtgctacttacattcctttttttttcttactacccagtgctaaaagagtattacacgttaggtgtgtaccagtgcttcccaattactaatatacaggggaagagaagaagaaatgaagagtatatatgcttctcacttgcaaccatggaatggaattaagacacaaattcttcatgccggaaaattccacaatgcacggctctcacacccctatatatatggtcccaaagtttggtgcatactcccatctgcaacagagaaagattgtgccacagtacaaactacctcattctccatcaggtgcacaatagaagaaactaaggtaagcactacattggcacccattcacccaagatccctatttctctcttccaaatcttcctctagcatgaagataagattgtacttatgataacgaattatctttttatttatacacatgaatatttagattctcaaagtg

SEQ ID NO: 5282 - DNA, 2000 bp, Oryza sativa
attgtggatgaattttgtaggatttaaagtctataggattttttttcctatttggttatttgaaacaaaggatttgagctttcataatcctttgaaattccaaagaaatggttcaatacatgtcaacatctttggaagaaaagtagagctttaactttatattatgttttgaaaagactgaactagagaaaaatggaacacacgaatgtaagaggtgagagacatatgtctttattcctcatctcttctatagcctagatcgttgtattcgaatcagtgggtgtagtcatctctgttgccaagaagcttggagtcaccatcttcgtgggagagacagagatatgaggttggttactagtacacaaggggtatctctacacaagtacaaggtgggacgcatatgatttattttctttttctacaaaattacctcacttggatgccaacacttggactgagatttaaaggatcggattgcatgaatgcacgagcgcatgagattagctgtgtacctcataagttgcttcacatatactaggctaagtacccgtgagcggtgaatacggagtatgtggatgtacatgcatggtgaaacctttgaaaaargaaattactcctattgttcccaaaaggattcaaaccataagaatgaatttaaaccataaggacaaagaaagtacatatgaagcgtcatagaggacaaaatccagatgaattaaaatcctctatgaatttaaaccataaggatgaattcaaacttacaaagaaagtacatatgaagcgtcacagaggattcaatctttgtttttctaaaatccagatgacaacttaacctttggtttctacttccctccaaccaagtccaaatttgaagaggcctttcaataattacctgctgttaaaatgatccatccaattgtcctgttcattttgtctagacattctccaattgtcctgttcatcttgtctagacatcctctacggagagaaaagtgttttgagttaatccatgctatttgcactttagtactagcactactactagtacattgtttgaagattgtaaagttgagagttgagaggcacattttgggtggtaatgtctctgcaaattaaatcgtgattttagaggaaaatacacacggcagcatatcgttgtcgctcttgaccgtaacctatatccaaacctacgttgacccgttttgaccccccttatcctttctttcccttttcatttaattcgctctcaactcccactccccccctccctccatccgatccgatcctgcctacaaatacgccccctccaacgacataacggatcacatcaggtcatcagaacactgccaggtgggccaccgtgtcgtgtgggccccggtggtcagtggggtagggctgtctcctcctggctcctcccctgatccgcacgccagtggtgggcaggtagtacacacgacgcatctgaggagaaagggaaaaaaatggcgaaaaagtgagttggcttttcgcctcactccccctctgcttgtcttttcccgcatctccctctcaggttagggccgagaccgagatgccgtcgcggcggctgctcgccgccgcggcctccccgccgccggctgcggaggagaaggccgtggtcgacggcctgcgggggtctcacggcgcgcggcgccacgccgcgggctcggcggtgggcgccggggttgccgccgttggtaccctggtgctggtggcgttgggtctgggtctgttcgtgtggctgcggcgcgggaggaagcgtggggcgggcscgggtggtggtgcggcggcgaggatgggggttggggttggggttggggcsaggacgcagccggcgcccgcgctgccgaagcygtcsktccarccagctgaggcgcgcgacgggggggttcgcggcggggagcaagctcgggcagggcgggttcggccccgtgttccgcggcgcgctgccgaggtcggggcaagccgtggccgtgaaggtg

SEQ ID NO: 5283 - DNA, 2000 bp, Oryza sativa
acacacacacacacagaaaagttaataagattttattaattcaattacacatatgcttggaattgactaaggctcccatcggttgccattttacctaaaatggcttatttggcttattagaaaattaaaattaatttataagtaaaacttttgtagatttgttcgtagcgacttaaaagccaaaattaacaaaaattacgttaaaagcatttcaaaatcaacttcaaaattaagttcaaaaattcaaattttggcttattctttggctgtttaggccaaacgatggggctgtaatccagaggcagaagcagctagggagtagtgctacactgctgctgcttgtgctgatgaaccggttgctttgcctggtggctagcgcgtcatcgtcagcttagccgtccctgtcatctcgttgtaataaatcgtcagctgctcggccgtgcgtttacctgctgtcccgtaccggccggttcgtcatctttgttgccatgggaaacttggcttgttttgattgggcatctgcgaactggattataccctaaaaatttcgaaagaaatacgaatctttgggccggctgaaaaaaaaggaagtttaaattttgaatttttcattgaaatcttagccatttgtcgttgatgtaactaactaagaggatcatcaagagatacccaaaaatctatctcaaaagtttttttgagaatcctaaacacaacttgaggtgcaaaaatatttatatttccaagagggagatggcctaaaactgagtaacaaattgaactaccagatcagcctacgatggtcgcgatcgcctcctcctccctgtcgatgatcgatccttcatgctytcccctcggatccgtggattggaatcagaaccaaggagttgtggagattgagatatatatacggagatgataggagccagttttttttttcaaaaatccaactaattctaggacgattttgctatacatttatcgacaaatttttccccaaaaatttgacagatgtaattacagtacaattgtagtgtaattacactgtaacttgtatgcaattacactgtaactatagtgtaacttgtatgtaactttcaaaaatctctccgtaacatgtttatttcggtaaaatggaggtcgtgggaacaaattctttcatatatgtgtgtgctatgatttttttcttcctcaccaaaacaaatcgtgcaatagatctaacgattcaaaattatgtgacacttacatataagttacactgtagttacatgcaagttacagtataattacatataagttatagtgtaattacactacgattatattataattacatttgtcaaatttttggtgaaaaatttgtcgacaaatgtataggtagtcccgtaaccgtagcagcacggagacgaggaggttggaagcagaaaggacgaaaggggaatagataatgcgcgcgagcacgcgagcacatcggtgcactcctactactactaccagtctataccagtgttcttccacgttgctacacgcgggagtggcgaggcgtccatgcctccatggatcgatcgatccgaataataaatacagtaatacatatccagcacccacatgcatgtgtagcagttcgcctagatccgcattaaactagtctatctccagcaatttatggttcacggctttgaactaaataagccgcctcccgcgtgtccacccctcttgcctctgctccctttgtccacttgccgcctctccccgtactcctaccaactcttctcgtcgtcggcggcggcttcgtccggctcaccggccgctgcatctccctttgtgtcttagttagtttaatcccatttacaaatcttacgtggtgaactgatcaattattagttgagctgagctgagcttataagtagcagctgctctgatctgctcagctcgcttcatcaccttccactcagtcaatcgcagcgagaagccaagaagcactcaaccacgcgctgttcgtc

SEQ ID NO: 5284 - DNA, 2000 bp, Oryza sativa
acgtacagagtatcctcctggcatgattagtagcgtaccgactttaattaaccctttaagaataatgtatactagtagaatactgttggagattagctgacgtgtggctgtcttaaggtctccttaattatatattatggaggttaagtacagtgggatagcaaagcattgtgatgtttgcataattgcattttttgccgccattaaaaaggctgtgtagccttgacatgccgacatgtgtgaccatctaatcgcttttgcttaacaactacaattagcttatctaattttatcctccaagaaatcaatcaaacaaagggtgacagatgttcagagagcttgacatcccagctgtaaatttttgttcatacactgaagccaatacttttgagacatcagttagaaagtagaaaagaaaaaatctatcttgatgtgtggtgtttagccacctggggcttgaaagtttgatggtgacaaatcaaacggtgagataatcactatatatcctgtcaaactccgtttgatccttgcgagtatgaacagagtttcgttcagaagtgtatccacaggttaataatgaatacttttccgttcatccaatatgagaagtaattttccgtgccacgtgaatagataaagctttttgcacaaggtgacaatggaaggtagatactcacatttgtagcattgcaatttgatgatggaaggtagttttggatcaatgtcattcatgttttaagctattaattaagctgcataaagtacataatgtttcgtttttatggaacaaaataaacgtgtgagtattgtacgagaaactagtacacctaagaagttgccaaaagaaactagtagttgccatgataaatgtgccacgatttaacctatattcttagcttctgaattattatgtgcacgtttcctaagcaactaaatagattttttaagaaacattatatatagaaatttcttagatacttttcaaaatccatctttatttttttatatttaatttcattttatatgtgcctttgaattgtaataaaaaaccaaaatattaactataattatcggctgcaatctaattcgaatgtagtaaagcctctactatggatgtggttgagaatactattatttcatcatatatactcagtaatggctcaaatctaattgcaattaacaataatcatttataggtataccgtaaaagtaaacttcgatataagaaaaggaaaagtaaataaagcaaactattcaatcactagattaattcttacaactatatgctcatgttaaaaacattagattattctcacaagagttattcgatgataatacgatcgtgatgtaataactgcagatatattttaacaaagaagcacaaatcaaaacaagaaattatttctttactagagataaattctctatttcaaaagaaagaaaaggctagagataaattctgaggcaggagtatatgtatctgttgataaccaccaaaacggtggatcggtgatctaccggaggaggagagggcattgcaacagggcggcgagcgagagagagaagggagggtggcggtgaatagaaaaaggagatacgcaatcttccccgaatcccccacccctcctcatctccctccttcccttccgcctccgcctccgactcctcctctccggctctcctctcctcttcccgtcgcttccgccccctacaaatactcgcccacctcctcctcccctccccttcgcttcctcctcacctcgcctctcctcgcctcgccgccgcctcctccctcgtcgtcgtcgtcgtcgtgagtaccctcctcctcccactcctcatcccctgcttcgattccgcgatgtttggttccgtggcgaagatcgcccgcggggatcgggggagcgccactgtttttgcgattgtgattggggtttgcgtttgtaataacggtgctggttggatgcaggggggtgtttggggggattcggttgggcggcgac

SEQ ID NO: 5285 - DNA, 326 bp, Oryza sativa
ctgatatttatctgatttgratttgttaaatatggtgataagtacagagtagacaagaagatttcaagcaagcaaaccaagtgctacaagaggattagtagagtagttcttgcagggaaaggaatgtactagaaggaagtgagagcttgcttggctaatctcttgcttctgccgcttgtcctctcatccgagagaaatcttgccaattatttatatcggagtagtttgcgtggcaaaaaccaaatcaaatctttctcctctgcgctctcgattcgtcgcaatgggagagacaaagttggcaagttgagggagcgagtttggcggga

SEQ ID NO: 5286 - DNA, 2000 bp, Oryza sativa
gagggtgcagcatcaccccatcgcctcctcgccttgccactggtcgcacattgcctttgagcctccaagatgttcgcctcatttccatgtccatattccactgcctcgcctccaaggctacccactctacatcctgctgcctcatcattgccgctctcaaccccgatgccggggtgatggattcgaccatgagtgcgatgaatcgggtgcgtcgatgtcagatctagccacatacgacccgcaccctcttccagcttaagggttgtggtggccacccaactcggcttagagaagccttgccgttgtcttcactatggctgcacggattttcattggctcgcttggataatggtgaagcgggaagtggtcagaaagaaggagaagagatggggggtggcgtttgtgggttttgctcgtgttgcctccagagacaacgtggggtatgggtggttgctcagacagatgtttaaggtacaggtgccagcttgataaatactagcctcactggaagaataaaattaaatgcaacacattggatgcatcacaaattcataataccgacgtaactttaaaagtatgacatgcaagcacacaacaaactaagagtgctcttaaattaacgaggcccactcacagatcatcaaaccttgtattattattgcaccaatatgttgaatatttccaaaaaatgtaatgtaattccattatattaaaaaacttgaattttaagttacaattacatcaatatcttggtttatacgtcatttcttttacatgagacataaattggattggatgtatgaaaattcgtacatttaaatttatttcaagaattggttaccccactcatagatcatcaaacctactgttgttacataaagatcttgaatgttatggtgtctggttaaaaacatattggtttagatgtccttcctttcaaacaagaagaagaaacataaatctgattggagtgtggaaaatcgtgcatttaaatttatttcaaaataatactactttcatatataatactagccgagtttctaaaagtaatttgcaatagaaattaacgataaagttgtagttcgaaaaccatctaaatatctaaaaccacgtgttttatgatcacgaggtgtgactttttatactactggctagtactagtaacatgcaccatgcagccacatggacaaggttttttactacactagtgtctagtgcattcgcaccagtcatttgcataacttaaatacctatagaaaaaatgaaaataaattggtaataattattaggatgatataagtcgataaaaatatatgagagtaaattcaatctataattatatagaccaaaataataaactcggaccgtaaataggatttgctatttttatgtaaattcattcgataattatatagataaaattaataaactcggaccgtaaataggattgctatttttattttatttatctactagaaaaaaatgctcgtgcgttgcaattggagaatattattttaatcttattattgttatattggttaattaaggtgaaattcactttgttaaattcgcttggatatatttttcgttagaaagtcatgagctgcaattaggagtccgattagcatgtgagtttttcttaaagagatttcttatacgattccttctatattttcaaaagcgaataaacttaaaaactgactcatacacggatggatgatgtaccaaagtatcggcaaaaacatcttcaatttttataatagcagagaagagatagatcgaatttagatttatatgtttacagagtgatttaatcatcatgatatatcttgttaaatcttatcaattttttcacaactacttatcacacatttacacgcatacacttggccacttaggtgtaaaagaacagccatatatactggcaggcaatgcaggctacatctctcaacacccaaagcttgtctttgtcgcgaacacaagctaccccaactccggcc

SEQ ID NO: 5287 - DNA, 2000 bp, Oryza sativa
agacggaatatgtaatttgttttgttatagctcatcatcaatgcggtgcttcagcccgtgcccctagcgacggccatccgcttttccgtcggcgtcatccctctgcgagagagcgcgtccctcagttgggacacgcgcccccmacctccttttcgcccaggtgccgatggaagaaacccgttgcgtgggtacgggtgcttgaggcgacgccccccgagcgaggatttcctcttccacccctctcccctctcctcgagctcctcggcgacgacctggggacgaaggaagagagaggcgtggcacggtggcggcccttctccggcgacgggagagatacgcggcggtgagagggcgaaaggcaccgctcactgcgcctcagcttcctccgccggcgccgccaccatctcctccccgatctggccgggwaaaggggggggccagattcgcccacgaaggcgggttcgacgacggcggtgggscagggaggtcgtcaacggcggcacggtggggagatcggtgacggcggcgggacggagtcggcggctgcgagrasccggcgcggraacggggcgaggtgcaccaggctcgytcgccaagtcctggcgcgaggcggagaggagagctcgcgtggagtcctgcgacggcgacggcaaggagaggagagacgagaagcggaggggaggaggcgagtacgatggagacgagagaagcgaagccagtttggtagatactagagtaaatgagagggagagagagggaggaggaggaggataagagagggttagtataataaaataccttcgtggccttttaaggttagggacacttgttgggccgctagaggtatccttcattgtaggggtagttgtccggcatagagtgtcttttatttagatgcccttagtctacacttaatacttcaaatgtacagtatatccgtataagaaactttacataaaaaaactaaacacaccctgaatcatacgagcgtcagcatgcatgcagtgccttgcagaatcaccgtcacgtaagcgtacgccaccctaaaaagtcaatgctacgagccgcgcgcgttcgcgcgacgcgagcacgcacccacgccacgccacgccacgcaccgctcggatttccggtccaagtcccagcccgaaacccatgcacaccaccacggcaccacgctaccagcagcagcctagcagtagtactagtactacacccctacacgcatcgagctactctgcagctgcgcggcgcggcccgaaattacgcacaaaacgcccggaaaacggacgcgcgcgccccccaggaaagcggagaaaaaggcggcccaaacccaacgcagcagcagcggcgtcacggctgcggcgccaccgctacacacctacgctagcttccgacgccgtagccctctctcctcccsgccgcggatcccgagccaaccgccgcggtcccccmacccatctcggaaaaaaaaaattgggaaagatcccgccgcgatccaacggctaccgcytccccatccacccccccgctcgcgcgatcgcatcccatccatcgaccacgtgatcgagccgatggagctccctcccggctcggctcggctcgtctcggctaggctcgccggccacgccgcatgattgcgcgatgggggccacgtgggccccaccgctccgcccctcttccgtttgaccacggatcccgggatgacaccagggccccaccgcgtcagtggcagcggcttaccgtatcgaaatgacagaactaccccccctggcgtttctttgccactcgagcgccgtttacaataagcagcagcagcagcagaagcaagcagagtggccgctgctgcgttcagactgctccttcctcctcctcgcgagcgagaaattattaataaacaatcgagctgagctgaggcgaggcggcggcggaggmatcgatccccggcgagcgagcgcgcgcgagcagatycgccggcggcttgggggaggcgagggtgg

SEQ ID NO: 5288 - DNA, 1954 bp, Oryza sativa
  misc_feature (1)...(1954): n = A,T,C or G
gctttwtaaccsggggaacccytttyyctaannkgtacycgggrttcttagtrcacaggcgnttgctggggntcccccrggsmcacacycccmawtgggggtawacsssgggcgssbdgkgttctcgcgctsgkgkayacacgcgsrgrcccscyawwktckykygsgsgckcgggrmwcwcagtgwcagagtgckcrkwgtgmkatcscsmgwrarrwacacctrhgtwkawwawctcthtygygcccmycksrsggggggkgkkdggrwrwrwraaawakrkrggggrgagwktktwbtscccsyrawrrggsrsrgrgvgsgywtwtwkwgwgcmcccccyccsycycrgggkvwmacanctctcgcngnctngtgcyccacacacayagagggrgtgtrtgtgtrtsggggcacacacatgtgtcgagacncwywcacacacatatgtatgtgcgcagtgcgagagagtctcattatgtgacacggagggagtatgagatttgacacctctccgcctctcgagcacccaaaaggacaaaaawcactactctgttttgtaaaatgtgagaattttcactaagggtatcccccaaagtgtgtgagtattgtgagagagakatatatatatatatataccatgtcacacacttttaataattttaaaagwaaataaatcgcacacygcacgcgggtraatcacaccctktctcwctsygcrcgagatatatwtyrcacacacwtttkttacacmcccakatatatatatatatatattgaaagacgtttaacttaggtgttgtatcatatattaaagaaaaaaaatgtaaaatatgattaaaaatatataacctttttcttaattagagcatgtttgatgatgatttattcaaacttgatgaaaggtcttgaaaatcctacatatttgatgatgtatcgtggtgttaagtgaaaactaaatcattgaacctgttatagaatgaaagtatgtctaaatgtgtaaagcgaaacaaggtgcactttaccttgtgcaaagtacaattttgtcttaattttaacaatatgatatatgtttagttaaagtcataagtttgtttataaaataggattgttggtcaaactaaaacaatacggttgaattgccaagtatcatgaaatggatgaaataaaatcatgtggtactagagggatgtgcatgcttgatttgaagacatagggttatcgaaataggtttctatacttctacattactactttagaaggacttcaataacagtggtagtgaawttgccatcmaacctacttctattwaaagttttwacaagttacacccttaacatcttaatagtactccaaatacatagccatatataaaattaatgtgataacatattctatggataatatgtttttatttatttttaaaaatattgtgttatttttycttttatctgtagtaaagaatgagcgtttagttagggtagcataaatgcgcagtaacaaaatcaatacagtagagtatgtagctatgtgtagcatgcatgttttacatctagtgtgattgtcttaatcttattacagagcccagtctcacgttttacatcttctccatctccacgtattgtgtgcaacaaaaagagaagttatgcttgctctaaagtcagcattaaatcagtagcatcaatacagagtggagtagcatcaatacagagtagggccatctgacaaccagtaaatgtactgtccaccgggccaaccccatcttcttgacctctatataatctcacacattcacacatctttcgctcacacaaaccaagctccataccgctgcctacatctctggttagtagccaccaaggtccaaggagtaacacgctccgtgagagaccgaaatccagggagcacaaattgcacatttgcaccaagcacactcgctgcagctgcagtgac

SEQ ID NO: 5289 - DNA, 1623 bp, Oryza sativa
cgcagaacragagcgattgattgaacattcgttgcatcccttgtttcaaaatagttgtcgagaattcaaattttgtccccaaaatcttgtcactttagggtaacttttgccatatcaatcatttaaaattttctccattctacccccaactatcatcttactcccaaccacatattatttagggcctgttcagattagagccaaaataaaccttaccaagttttgccaataccaaaattttaaaaagatggtaatatttccaaaattttgacaggatttcttatgaattgaccaaatttagcaacaaactaaatgtagatattttttgacaactttaaaaaactgatatggttgaaaatggcatcaaagtgaacagtatcttaatagggacactatagtcatttttgctaaagaatctataatcacaattattgtgtgggacggagggactagtaactagcgcgatcatgcatgcaatatgagttgagtgctctctctctctctctctctgcatcagctacacggcgccgcttagcatatatcgctgcaaccaattaaaacatctgtacgatgagatcatgtcgatcttgtgcggtcgttgtgccacctgcatcacgtacggctgcgccaacatgagccgtaataacgaagactcgatcgattcgatcgacagatagcgttgcaggcagcaacaaatgttataaccacacgaccattaacctggatttggttgatctgcaataacgctggacatgtcccgtgcagagtggttcttgctctcagctgacatgccgcctacggcaacatgattaatggatcgtctctttttcgtatcttttcaatctttctccaatcacttcctctcaaacactcctggttctttttcacatgttcccaacttctactctctcgtttttcatgcacgcgtgttttccaaattactaaacgatgtgtttttctgcaaaaagttttctataacaaagttgctttaaaaatatattaatttatcttttaagtttttaactaatatttaattaatcaagtaataataggttgcttcgttttacgcgcgcgcgtagaagaggaaagttctcaactctgcttgttcgaagacaacctcatgtaaaatgaaccagttgggcctctcgcgtcgtccccacggaggcgacgtggggggcaacggaaaccctagttgtcgttgccaccaatccccacctcctccgtctcgccgccgccagaatgagccgccagaaaccgcgcggtgagagaggatggcgggcggggtatggtttgcctcctggctctggcatggagagcgggaggtacaaggtggcgatggagacggtgcggcggcttccctgtcgagctcggcgaccgagggctcgtcgaccagagcggagatggagctaggcggggtgktggggggggcaggtgcagccagatccacttgcctgcaaccggatccagcggtccgagggaggggcsaggcggcgaggcggcgcctccacattggatatagccggcagggctgcgtgggcgacggcggtggaaggcgcacgcgagcgacggtggccgtgggaggccagctggaggcctccgcggcaagtgggaggccagtgcgac

SEQ ID NO: 5290 - DNA, 2000 bp, Oryza sativa
  misc_feature (1)...(2000): n = A,T,C or G
cctaatttactatcacactcttatcgagttgtgcatcggtaagtagtaagttgagcactattggtgactgtggtctccactgggaccgccttaactcccatatgtacrtccatgttatacttatagcaacgtagcaaactatgttattcatgcttatgcccttcatgaaaggaaaagagaagatggatgtgatcaaaagaatgttttttttatgttttgagagtagattcatggtatagagtagacaccacgtgcttatggtgttaaacattatgcaatttgaaaatgagcgaagttgtaattcgacggtactaaaagagaagatggagatgatcmaaagattttttttttaagttttgagtakatccyggtatagagtagacaccatgtgtgtttatggtgttaaacatttatatttttgacaaacatctatagtttagcgcttggtttattttcaatacttattgttgataatcacatgagacacctttactaattcgaagaatatatttatttttttcaaatttattaataataamtaatrtgtgggagtatatgggagtttttntattttttngtatgatactatatacgtatrwttttttyggttctatcttttttttgacacgatggctttattcytttwccgtacgtatgtaggttttawtgttccttttcaatcttacrtacttacyttttttttggcgaacctattctctctcgtatgtataggtggaaagtattagttkggttytatatctaatctaacggtctaaataatggatccatcaatttaagtgaaaatcaacggtatagatatagatataatctaatggtctaaaataacgggtccaccaatttaaatgaaaatcgacggtgagattaaatagtaccacgtggcggtttaggarcgtttatagrawtgccacgtatcgtcttgagagtgtttgtaggtcgttcaatagacttttagtatatgatagatagatagatagatggcgtaaggatatcaagatcgagaatggccttgtaaaatacgggcctttagtgggctaggagcttatggtggagtatagcaatatgggcttctgatacaaggccctggagctcgcttggtgcttaatcatccggctatgctatataagcaagctctttgatctaaaaaccagcttgagaaagaattatttgcattttagccggtcatgttttggtactatactagtataatttgaacaaaaatacacatttatatttgaactctctaggctattcccctattacatgtagcatgacatcagagtcaaaacagatacgcactataaatttagtttcatcatatgcaacaaatgacattatacatagcaatgacatcagagttaaaatgaagagaacaaaaagaaaaaaaattcaaataacctccccaaaaatcaaatccaaatcaactggctctctagaaagcaaccctgttccttaagcaacttccctttgtcttcttcccagcggcccataagtagtccacatctccactctcttgaccacgaaacggcccaacacccaaaacccccgggcccacatgtcatcctctcccccaaccctagcgccaccggcattccgatccctcctacccctggccccacatgtcagtgacccgaaaacgcctcagggtatatatacccagctgtgcctaagccgggcacacgccctctgaccccgatagaaagggaggaaaaaaaaaagagaaggcgaaaccccaaatccgccgcgatggccgccgccgccctcctccgccgctgccggcggcgcgcgccctcctctccccggcgctctcctcccgcctcgtcgcctccaagccccactcgtcgtcccccgcgccgccgccgccgccgtcgaaggcgggggcgaacaccaagacgttctcgatctacaggtgggatcccgactcgccgtcgacgaagccccacctcaaggactacaaggtggacctctccgactgcgggccg

SEQ ID NO: 5291 - DNA, 2000 bp, Oryza sativa
ttacggttgagggatgcaaatgaaactcaacccataaattggaggacataatgtgaacgttttcctccaaactattatccatcaaatgggcctaaaaggataggttggtgtggtgggttgggccgtgatttgtatggactttatttgtaagcgtgtgggccttggctgcgttgcaccggagacaaaaaatccaaaagaagaaaagggtttaatatgattgggattgtcatcccttgggtgggtacggattggattagggaggggagcacaatagaagacaagagaagcagcgatcgacggcgacgcccctggaaggagcggaatagaccaccggagcttcctccatttttgtcagtctctcacctcctcttcagtcctcactggatttggattggattggtttctttctgctctgttgcagctccgttgtctatggtaggtaccttttggacggaggttttgcatttgcctagttactagtaactgcataattaacaggaggagtactaccaagaatgcatactaattattcgcgtgatattttgtacgtttaagtttagagaacccgggattcgaccagaccatcagtccactctctctctctctctgcttcttcttgtgttgtgcttgtgcctcctcattattaatatctgtactccatattctactactgcatgctggagtactctggtcatggagcatttgacatttgcatccaccccgatgagctgagctgctccattaatatactattcctcctcaattagtcattcactacatacatacagcaaaatcctagcaccacgacggcggccgcatttgtatgaaatcgatagatcgtctctctctctctctcatccaaccaaccacgcacagcgactcagcgagcgaggaacaactagagcttgatgccagtgtcgcggatgatgatggagtcgaatacgatggccaaggagatggccgtgcggcaccacctccttccggggtctcctcgccgccgcaccgcacacaacctctcatcttcctccctccgcaaaagctccgaagcctccctcctccacaaggttccctgcgccgccctccgctccctcctcgccaatctcaacgacgtcctcctcaccaccaggctcttcctcctcttccccgccgtcctcctcgccatcgccgccacttacctccacttcggacaggtaccctcctcatccatctctctccaatttacgttgctcgtccattcttatgacaagccacaagcatgctcatatcaatactagtactaggcaaggaactgtggtcgataatcccagcccttttttttttttacggatgcgcaaaagaattacacgtcaatatattagaagaaaaaagtataattacacaacacaatcagccagaccggcttatactagagtaagagagaaaaaacaaaataaaaagctaaagcttaaaaaaactacggggctaaacacaaaaaaactccaattgttggccaagccctataatccctacccatggcgcccatcgtatcgttaggcagtgaaggtcgtgagtcttagctcttgaacatttatgttaccgcaagataaactgcatttgtctcatgggtttcaacgatgtttggtttgttcgttagattcgagataagaaagatgtgagtagtgcgtactgtgtcgctgagaaatatgtttggggccatgttcatcaagagatgcactaaattacgtcaaaccaaagtaaattaggagggtattttaaacttagcataacaggtttttttttataattttccaaaaaaaaaaaacactccaccaacaacacatgacgaatacaagatcgagccggatgatggcgattagattaatttgtactagctgagtgcatgtgctcgcgcatgtggtgaagttgcctgcagcctgtgaaaccctattaaaatacaaacagatggaatcatggaattgcaacaattaagcaagttgacacttgacacacccatcacatgc

SEQ ID NO: 5292 - DNA, 2000 bp, Oryza sativa
gagccccggggatgtaggcttcggctgaacctcgttaacaaatatcgtgtgttcttgtgttgtcatctggcatgtcttaggtgatcaatgactgaagcgatcgggaaggttagtcagttttaaagcgtcctagcagtcccttaatctctctctcaatataagtaaacatatgcaccttatcaaaaatttttcgatgaaaagctgtcatacgaccatacgatcctcggatggtgtaaaagtgggatggccttcttccctcttacatattacgaattatcataaacactttcagcccccatcgattggcctaataagccaaagcaaaagcaaaaaaaaaaaattgaacatgattttaaagttaattttaaaatattttcaacataatttctttttagcattggcttttaagtcgctacgaataaatatataaaagttttacctataaattaatttttaatggtttattagggaatatggacaatcgatgagaccgttttcagattgaatgatttttataacaaaaattatatatataagtttgtgatattttttaacacatctttttaataattaactcgttcttttgcactctcgaatattatcacaaaatcagataatatatcatccattcaggataaaatggactgagcctcaaactggataaatgagatcaacttctatagtaatgggtgagcgataaattcacatgtcatgttttatttttttattgtaatgactgcaataggtccccatcgtttggcttatttcctaataagccaaaacggcttattagaaaataaaaatgaatttatgagtaaaacttttatcaatatattctttgtgacttaaaagccaatgttgaaaaaagaaactacgttgaaaatatgccaaaatcaattttaaaattaaacttgaaaattcaaaatttgccttttttttgacttattaggccatccgatggggctagtagcgtcaaacatatttcaccttgtacctcagtcagtttttatcatcatggcactacttgcatgactcagagattggagatttgtttttctagtttattgggtcagtataaatcatctgtcatgagaagtaaaggtctagggccagtttggttcatggcctatatttggcttaccaatttatgggacacataaacagtaggaacacaaatttggtttggatccaaatatcggccggcctgaagagaaagaatcggtaacgtcattgatgggagccgaagtgcgggcttgaaatttgaactcctacgcaggctttggcggtggcacatcgaccatatgtattccacgctgcacacaaaagttggcaccaaaccaaacctggtttagccaaaaattggcaaggttagttttggcccttaaccaaacacaatttggccttgtcaaatattggccatgctaaattgtacctttggccaaatattggtaaggtccgttttggcctcaaaccaaacttgcccctaatttaaaggctattttttagaatatatggattttcaattacattttagaaattagtaaactctaactagattcttaaaaatgtcctctattgtgaagaagaggctctatatagaactttcgtgtgtgaagataatgattttcaacaaaatagagctgctcaaaacttccagaaaagagaagaacgctcaaaaaaggaaaaaagaaaaaaaaatggagccatggacacgttgctcatgctgcttaactgaatctgcttgctttgcctgcttcgttacacaagaactcgcggaaatcccgtcccctcccaaaatctcaccaccgactccaaatccatccacgaatctcttcctcactccaactgcctccccccgccgtcaaaatccaatctttcctctccactccgccgctttcggcacgccctttcaaccccaagatcgatcctaccccccaccaatccgatccaatccgcagctgggttccacgaattgcaaaggtctaggcgtggattggagc

SEQ ID NO: 5293 - DNA, 2000 bp, Oryza sativa
tgtcatagatggaactatggaagagcgttttcccaatcagccttgaaaaatcagctaaatacctttctggcctccatagtgtggagccgtgtcccagaattcttcacgcatctttgagagttgtgttggtgttattgcctgagtgtgcttccaaggttttggctttttgagcttcttactgttctctgcattaaagaagaaggttcaacattacttattcattctaactcatgtcaaagaaatctaataaaaccttgctaggatataaatgcatatcaagcaggattctagttccaggaactgttctgcaataaggccttgttacaacacgacttatttataaacctacattcatctactgtgaatagatgtatcataattttctgaacaaaaaaagcagattcatctttggctcttcactaacttggcctgtatttaaagtagcaataccaggcaatccaactttcgaaagaagtataaccagtgctaaaaaaaattgaagtttcattagcgagcagacaaatatcccaagtgtgaggctgaaatttcacagatgagtgtgtctttctgtaatgttccacctaataaagtatctataactagataaggtgttagaaattgatcttttcgataagcaagacaagatttagcmattggtgaaggcaaagtgcttaatctgaacaaacttttgattattctacttcgagaataatctgtcactttatttctctcatcatagacaaatgctacttttgcaacatacaaacaaaatagcttttctcctttaagaaaatgatataaccaccaatgctcttggcattcagaatactggtagcgttatctctccactaaccaaatgtgacctccatgacgtaggaatttgcactactcactctacttgtatcagataccatccccacatttcgatacattaattccatgagagcactgtcaatcctgcaacataccattactagcagcagatttgatacactacatcacagtaatgagtaatctacaggtgatactaagtttcatccaagtcaacagttctactgcagctggatacttgcaagacgcttaaatcgacagctcaaagtactatcggattatcagttccggtcacaattcgatcaataaacgagaagactaatcaacaatagaacgaacaacctactcctagctaacaacagctctggaaacaattgatctcggatctcagaatctgagcagaaaacaagaacaaagacagacaaacgaatcgaagcatcaaggaagagagagtaagagtaccatcaactttgggagtggatccagcgcagcccatggcgacgacggccgatcgatcagacgctcatgtgggggggacgcccttccagaagcttccggaaacggagccggatttcgcggcgggaaaagccgggtgtagtagtgggagacsaggaagaggaccgtggatttaataagggttaataaagtggacgagtaggagtaggagacggcaaagcatcagcagcagcagcaaattcagcggcatacgagcggcaaagccagtggaaaaaggggaaaaaaaaaaagaaggcaactgctgctcaggtgacgtcacctacgcaggtgaggtgtcccgccacgtcacctgccgccgcgggcccacgtatcctcccccgcctagacctgttccacgtcgcgacggggcacagatgtcgctgccgagtgggccccacgccggtccacgcacggggatcgcgcctccctccgcttcccgctcttcgtggtcccggttcagtggaccaacggaggctgacatgtgggccctacatcccagccggtccacgtcggttcacagcaccggctcccccttcccgtcccttcccgtcgtggtgccctgcacgcatcctctccgccatttttccgccgcatctggagctctaaaacccaaaccctagccactgcgccgccgccgtcgccttcgccgccggcccgccgccgccgcttcagcc

SEQ ID NO: 5294 - DNA, 2000 bp, Oryza sativa
acaccgaggaaggtgctccatcgaataggaacccaccttggatatggtgttgcttgaagtcttaccgtctggacaagaacgatccctggggaagcagaaggtatcggatttttggcacagagatcagggattgaataggggagaaagatttggagcaacttggaaattactgtgtacagtggcatttgcttgtggtacagacacgcaaattgactgagttgtaacagctaggtgacagcctttcggttggtgctactacctacaatgttactgtgatgctgttagcatttggtaatgccagatgatttattttagtttaatcaaatgaattatatgtatcacataaaacttttaattgattttattaaaattatcaactggcataaacagaatttcctctctcccaatctggaaccctaatagaacaactctttcaggaatttgaaaagaatactagcagcaattcagtactcttcttaacttaaaatatactacctctgttttatactccctccatccctaaatgtttgacgccgttgacttttttaaacatgtttgaccgttcgtcttattcaaaaaatttaagtaattattaattctttttctatcattcgattaattgttaaatatacttttatgtataatatagttttacatatttcacaaaattttttgaataagacgaatggtcaaacatgttttaaaaagtcaatggcgtcaaacatttagggaatgagggagtattatttaacactttgatttttcttaaagccaaacttttttttatctttgaccaaatttataaaaaatatatattaatattttccacataaataaagaaactatcaaaataaaaatgctataaatgttgctatatttttctataaatttgattaaaattttattaggtatgattttaaaagaatcaaagcgacttataatatgatgaagtggagaaagtagcaatataggttcagattgaacacaacctgaactacgaatttaggtaagggacatattcaaattcttaatgaattcagataggagaaatattcaaattcgtagtgttatatttaggataaagggagtaaataacagtataacttccatagtaatagagaatttttcgtaatctaaggctggaagtaatgtcgaagacaatgaaaaaaaaaaggctaaaagcgatactagtactaactaaatgcccgtgctttgctacggttaaacgaaaatgtattaatgtggtgttcatctttttgctaaagggaatgttcatcttaatctaatttttttgtgtttatccatttagatttgaatctgttttaatactaagaagttcaagtggtaacttgcaaaatttacaatggaagtaggtggggtgacagattcactgccaccatcgttaccttcttttaaactactccctccgtttcaagttataagatgttttaactttcgtcaaagtcaaactgattcaggtttgactaagtttatagaaaaaaaaattcgatccaagataaatttattataaaaatacatttaattattaatttaataaaaactaatttggtaatgtaaatactatatttgtctataaacttagtcaaatttgaaacagtttgactttgactttaaccaaagttttataaactgaaaacaaatatagataaatgcaagtagcgtccacttcacctctcttctttcgacgcggatgcggccgtccactggataactcacggacgtctggggaaataactaaccccccgtgccgcctaaacaacggctaacgtccaccccaatccacgcgacgctatacctcgcggttctcccacttctccttcctcctccataaaccgcgaaagaaaatggaagctctcgctatcggatccgcacctccccgcccgccgggcctcgcactcccacccctcacccgtcaccaccacctcctcctccaccgctccaaaaccctagcccctcgccgtttcgtcgccgccgcgccc

SEQ ID NO: 5295 - DNA, 1345 bp, Oryza sativa
  misc_feature (1)...(1345): n = A,T,C or G
gggsgraaggtawtamasccwawrttkggggcgtkwgascccgngckgaacmgggttktsmcagtwtycggggmcccgkgsccctwgggaktccyycwkkkwgytmccaaatwygatarttymarwacacgkgatccaaatggggaaataytagaatgacttacattatgaaacaaaagaaagaatatagtataacaaatctggatacctttatatctaaatccattataccaagttggtcgtgtcacatcccccaattagattgggtcttgttttaagacgtgaataaacactaagttaattagtgtgagccctccttcaatagatagaaattttcctttccaactatggaagagatgcatatgcgtgtccaaacaccaaataatagtacattagcccgggagcaagccattggagcatactccctccgtccaaaaaaaaccaacctagaaagagtttgtttagattcgttgtactagaaagggatcctttaaggttgtcttaaaaatacccaacctaaaaaagatttgtccagattcgttgtgctaaaagagaaccctattagacttgtttttttttatggagggagtacgagactaactacaaaattttcagtctagacaatgaccaagcgggggggacatatgtcgctggactcaaactccacgacggaactggcaaacagacgacaagatctcgaccgaatctgatcgacactgggtaaggtcaggaagaacagtcttactcgtcttttttctaatccaacttaagctcagtgatgacgccaactaatctggaccgtgtttagttgtttaggtgtaaaaattttaaagtacacgggcacacatttaaagtattaaaacatagactaataataaaacaaattacatattccgacggtaaactgcgagacgaatttattaagcctaattaattcattattggcaaatgtttaccatagcaccacattatcaaatcatgacgcaattatgcttaaaagattcgtctcacaatttacatgcaaactgtgtaattgggtttttttcgtctatatttaatgctctatatatatatatatgcccaaacatttaatgtggtggaatttttaaaagtttaaaggtagctaaaagcaacgctggttgagttcgtggatgcgacactgccatctcgaactcttgtgcactcctctcgctcgccacacgaaacgccacaccactaacagataaaaaatagctggccaattgccacccattttgcctatgcgccatagctgagctgagctagagctctcactacagctagctaaccgagagccacacgtcggtgactcgtgacctgtggagcc

SEQ ID NO: 5296 - DNA, 2000 bp, Oryza sativa
gatgtttcgtgcttcgtgcgatgcggagtacgtgtgcgcccgtattttcgggagaaaggaaagggcacgaaaagaatagctgggccggaaaagtagttagatttttttttatccgagttctgggccggcccagaaacttggtccacggggctaaatgtgatacgattttgctatatatttgtcgacaaattttctcctaaaaatttgacagatgtaattacagtacaatcgtagtgtaattacactgtaacttgcatgtaatcacactgtaactatagtgtaacttatatgtaactttcaaaaatctctttgtaatatgttatttcggtaaaatggaggttgtgggaacaaatccttacacatatgtttgtgctgtgatttttttttcttccttaccaaaacaaatcttgtaatagatttaacgattcaaaattacgtgaaacttatatacaagttacactgtagttacatgcaagttacaatgtaattacatataagttacagtgtaattacactacgattgtactataattacatcwgtcaaatttttmggagaaaatttgtcgacaaatgtataggtggtcccatgtgatatatttggtccgatataaagtgtggtcgcgtacggtaacagtgagaagggaatttttctactacgtactacatcsgtcccaaaataagtacagccgtagatatccgtgcccaacatttaaccgtccgtcttatttaaaaaatttgtgaaaaatttaaaaatatttaatcacacataaaatactattcatgttttatcatctagtaacaataaaatactaatcataaaatttttttaaataagacgaacggttaaacgttgaacgtgaataatgtaaaactacacttattttaggacggaggtagtwaaaagatgggtatgcaacttgagtacgtgcttgacataactgtgatgcagtccaagaacttgatcgcgaaggaccgagatcctctgagaagaccgtgactttgatccattatcagtcgtccgatctacagtatctggtgaatagtaaatcaaagcagtagtttttacttttttactgtgtctacagtaaaaaaactgcagagcaatgttttgcactgtaacaccagattcattttactatgtttatcttccgttcgcttccaaagtcagaggagccggatccgattggcgaatgctgccaacgatcctgacgttgttgacctgacctggcacgacaatgcaaatccagtacagctgctgtttcagatgattgacgacaagccgattgcctttcccttatctgaaaaaatttggtcagatcagatgagtcatgaaatggatggatgcatagaggtcggaactgttggatttgtctgacgctgaacgcgatcgatcgatcgatcgagtgatctctcgaaaatgatgccccgtacacgtaggacttgtttactttgctactattttcaacattaacaagttttggcattgccaaattttagtaaggttgtcaaaattttagcaaggctaccaaattttagcaatattttatacgtacttactaaaatttgacaacaaactaaatgtagccactttttttaactttgccaaaaaaaaagtaaagttgaaaatggtagcaaagtgaacgagcccgtaaattactcatacgtaatattgtcaacctaggccttgtttagttacaaacttttaacttttcaatcacatcaaaacttttctacacacgtaaactttcattttttccatcacattgtttcaatttcaaccaaacttccaattttgacgtgaaaacacacccctagaatggcgatgaggacgaagctgatgtggagtttgatggcgacggagccatcgccgtcaagcacgcaaacttatctagctgcgactcctgatgttcctggccgtgatcgagctcctgcgttcttgcttaatttgagtggtcggatcggctactgagctggtgcggcggcggcggctaatcggcggc

SEQ ID NO: 5297 - DNA, 2000 bp, Oryza sativa
gctatctctaggcaagccactagttgtgtcatgtggccgttttttgggtgagcaccattagctagaggcatcaaaagataatactagtagtatatacttttagcagtggagtcctaatgtcctatccatggagtgcaaacaagctagccataaaagctagtgcatgcttcccttgagaccacctccaccttggtctaattattgctaattactctttttttacacgttctttaaggcagttccaaccctctatctagaatggtgtctatgacattaactatattgccatgtaggacttttaacttatgtgacactatattaattaagagagagagtgaagagaggaagaaactgggtctcatgcaagacagcttcaacacgagaacctatatactagacactatcaagttttgcattgggagagaatagtgtctttataatagatgaagaataaatatgattgatagagaagagagatgatgtatttattaatggcccactttaagaaaccatgggttgtagattgtagtttctattgtgatgtcttattgacatggtaccatagacactgtttatggacactatgggttaggtctgcccttaatagcacactttcacattggtctaattattgctaattactcctttttaacacgttctttaataacacactttgactatgtttttaataaatatgaaattagcatcaaatgaaaatatatcaaaatctaaaattactgatataacatgtataatacatggtatagatatagctagtacgtatggtcattagtcaagggctatcgagtttgattttgataaaaaagcatgggacggaaagagtaactaacataaatatcctcatgcactgcatcatgattcagcctgcatggctcacttgtgacgtgcatcatactccctcgtctctaaatatttaatttgacactattgattttttaagcttatatttgaccattcgtcttattaaaaacttttataaaatatgtaaagtatatatatacataaaagtttatttaactaatgaattcaaatgatataggaaaaaaawtaattacttaatttttttaataagacgaacagttaaacatgtttaaaaaaaatcaacgacgttaaatatttagggacggggagtatatgccaagtacttttagatatcataatcaacttttgaacatatatttaatcattctttttattcaaaataattaccttttatcgataaacatgacttgtaaaattttcatatttccacaaattattatgtactatataagatgaatgaccaagcgtatacatatatctaaaaattaacaacatcgtctaactatcaaacatcgatgtgagtataatctagctagcccttttctttggattaacatttttgccgatcaagctatcattgggcacattaattcacaaacgatatacgtatatccacgcaacgaaagatttgttggtgcagttagttgtgcatacccgtctcgttcagtttcatatcaacctcacgtcatgcccggatcggatcgatgatcacaacacctacatatacaccactctgccctttacgcccggggaccatgcatcatatcgacaacgacgacgacgtggcctccatctgcaccgtcggttgcctcatccaacggccaagattaaaccacgtcacctgcatatgcccttcttcctcgccggccacacacagttcatccaaccacttggcaccaatgcacgatcgatcgatttatacaaatccaccaccaccaccatcgccgccgttatccacttcatcaccggccactctgcctagagcattatcatcgatcgtcgtctacctagctagcttcacttgtgctccactgcaaccagtacaccacattaacttaattcacacctagcttagctcactatatagcttagcttcgcttaagcttaagctgatctcggagaagacgtacatgatggtggtggtgatgaggcggcgg

SEQ ID NO: 5298 - DNA, 2000 bp, Oryza sativa
tgatgcatcacattcaacgcattctgttacttgaattcaaaatttcaggtcattgagcttcttactaaacaacctgaactatttgacatggtcaatctgcttcagctaccgacaattatttatggtccaacctcaagggctcaagcagcgcctactgaaaaccgacacaaagccgagctgcaccaatcacatttgcaatacagcataccattatctatcaggcgccgtactacaaaacaatcgcattgcaacgcatcggcctcccaagtcccaacgaatccagagcaagcaatcagagcaaagcaaaaatcgtcagggaacacgcgcgcgtttacccttgctcgcgctgatgaggaagcagccgtcgggcgtgacggggctgtagaagaggtccaccaccggccgcgagtggccgtggcacacgagcggcacccccgccttcttccgatccatccccaccccgcaactccagaccaccaccacccccaaaaccctagccctaccaaccgcgcggcggccgctgctgcctataaaacctaacacggcgccgcgcggcggaggtagcgctagccctaagctccgatcaaacaaaaaaatggcggaggatttagggagggaatcgatggagcggatctgcaggcggggttagattggttttattgtggtgggtaatcacagcgatgggggacggagagccggggggaggaggggtttatatagcgcgtcggagatggggtgctccggtcgccgcgctccggtgggagtgggagcgtcgaggggaggaggaagacggacggggatgtgtgtgtgtgtgtgtgtggaggggaggttgttttgtggccgttggattttgatccggtggtagaggggctgtcttgttccttgattgaggacttgagctagggcatccgaatgggacgagactctcctgacttggtgccactgacacgtgggccgccccacttttgatatgttctatatgtcagtgacactcaactgcagactgtataaagttagagatctgttttcatcggaatgggatccacgataaatagattaaaatgagaggaaaatgtaaagaccgaaaagatacgtaaaatttggtaagtcattagcgtacgattagttgaatcctgcacttatgctcagcctcaattacatatgagccaagcttttccttttttgtgttgctcctgcttgagctacattaccgtgctttgagctatacagaaagagaagggagagagagagacttggaggaagaagaagagggtctaaattgaaccaacatgtaaagatacctagcctaaagtgaaaagtttgatttacacctagtccaagatgcaactacggtaataaaaacagacccaagatgcaatttactcttaggccatgtttagataatgggtttgggatatgatttcccaccctcaaagggtaagtttcaatcctagccatctatttttctcactccatttcatcctatccctctattcatttccatttctcaatcccacctcttataacccattatccaaacacaccctctatcgataacaagatggtccgtggtgactttgcaaatcttaagatatgttaggcacagtctttcatagatgctcatagagagtgtgcgcgcgttataagcgccttcgtttgtaccatgttttatttaaaaaaaattgcctaaaaaaagattttattttctcagaactctttgtttcgtaggagcagtatttttgtattgtgatccaatccaattccgaattccacatgggccggcctcgcggcttcgtttgcagcgagttcctcaccctataaacacgcagccacacaagcagagcacgagggagaccaacccagcaagcaagcaaacccaaacccacccawcttcgctccgcggccgtcttcttcttccctttcttycaccgcaagaagaagaagaaaccccacccgagccaagccccacacacaaagcgagcgactcggcggcggcggcg

SEQ ID NO: 5299 - DNA, 2000 bp, Oryza sativa
ttggccatttgtcggagcatgctactgtccgggagcagatgtccctagccactccctcgctacatcccgacgtcccgccatccatgcctcgttgcagcccagtactgtccgtctactagccaccaaccgctcgagccagctaccatcgctgttgcttgccagttcggtgtgctggttcggactcctctacccccgtcgatcactggcatccttaccggatctggccgaatggcccagttctaggcagagatcttagagggagggataaagagccctgctcccaatgtccctggagttgtccaacttccaacgtccacttcggcggcgatgacgcgagggagaggatgcaggaaggttgtgtggtggtgagttagtcgtgttcgcgcgtgtagcctctggagtgggagcgacatctagcattagctatgtttgtcttggctgtcgaaagatcgttgtgcctatagatctcaccgttttcctaaactgaaccaaccgctcttaaattttaatttttaaaactttaattttagagtactttgaatgtagttttttaagcgttaaggatatgcatataaaagttttaccagtaaattattatttttattattaataaattcttttggtttataattagctctcttaaacaaccgacgatggagctacgattatagaactcgatcagatacacaaattcgggaatcgttcattagtatatcacactggcggtacggtagtgttgactacatgcaacctcgtgcaacacacaccacgtattatattagtatattacctagactatagtttgaaacgaagtgtgatgaagctaggttgacttctcgctgttgatgttctgcccccggccacctgatgattaatttgatattagtagttaattaagaataatatcacctcacatgcagagctaggtgattattgatgtataggccacatggggtcaccgttcccagagatgcgcgcatgcaattagaagcaacatcaccggagtcagcagtgagatcgagcaaactagctagcaaattactcccttcatccctaaatatttgacgcagttgacttttctaaacatgtttaaccgtttgtcttattcaaaaaatttaagtaattattttttttatcatttgattaattgttaaatatatttttatatatacatatagttttacatatttcacaaaagtgtttttaaataagaataacggttaaacagcgttaaatatttcgggacaaagggagtagctgagatcgcgtgcgcgcatgtgaaccaggatatgtgcaggattcatttttattttcagactcttttgaagcgcagggattctaaaactatagaaataagaaaacaaataggaaaacaaaggtttgaatcatataattacttaaaatgtgtttcgatggcacagaaaaagatataaatattgaaattatatgttatttcgagttgagtagtaagagaaaagagaggtgtggctttggaattatcatagaaaacaaataacacgaagtacgtacgagctcatgtttaaaatccttaatttggaattggagcataggaatgaatccaacgggattttaatttgcaagcccaaatcttaccaaccaaacaacctcttcataaagaaaaaaaagcctaaaaattaattaaaatccttcaattttcctttgaaaatgctttaatacaaataagtctttattgggttcaggtgatagacagccacatgtaagtgataaaatcacctgcctttgccttccaagtagacgacgaaagaacctacgcatgcgcgccacccagccactcactcagctcgcgcgctggagtacaattactaaacaaaaactcaaaaagcgagggcggcgtgagctacaagtatacaaggtgggggcatcttcttcctcccgctcgcttgtcttctcctccamgcgcgcsacgccgtcgggctcgtgaccgatcgatcgatcgagagagaggtcgctcgatcaac

SEQ ID NO: 5300 - DNA, 2000 bp, Oryza sativa
tcttatacgggtaggaacctttgcattggtggacttcgagatgaatttccttaacgtatacagagaatgtccgtacacgcgccgatgtacaatattgtcgtatagcgtacatccaagggtagagggtatatcttatccgtaaccctgacacatccaaatataagtcggtttttaagttcgttcgcttttgggaatacatatccgtatttgagtcgggttttaagttcattcgcttttgaaaatacaaaaagagtcgtataagaaattcttttaaaaaaaactcgcatgctaacttaacatgattttttagaaaaatatatatctaaatgaattctcacagtgaatttcagtgaaaaaatagtttcacctgttgcaaagcacgggcattttttctagtaatttaaaaaaatcactaaacatattttattttatcatgacttgataacttaagtattaattgtattatatggactaaatttttatataggacagatcggtaaaaataaatcagcttaatctctactattataaaaattgaagatatttttgccggtactttggtacgccatccgtctatgagtcagtttttaaattcattcgcttttggaaacacagatccgtatttaagcccgtttttaagttcgttcacttttgtaaatacaaaagaaatcgtataagaaatctcattaaaaaaagctcgtatgtcaacttaagacgatcggactcctaattgtaactcatgattttctaacaaaatatatatccaagcgattttaacacaataaatttcatcctacctaaaccatataacaataacaagattaaaatagccttcacttgttgcaacgcacgggtatttttgtagcctatttaaaaaagaaagaaagagctactccagtatgctctccgattgcaatccaaagtggtttcaaattagaaaatgcctttgcctcccactcttaaaaatgctcttggctttataccagctagcacttccaaaaattgcagatctcggcgtgaccacgagatagatttgcggctcagcgtcaacagtcaacagtcaacagtcaacacacacaggcgcacatgcaaacatgcaatgcgcgtcattctttctgatatgaagcctgtgctgaacattttcttttactcgtctggttgactccccctaattcagtttcagtcttcacttcttgcatatctggactacttttttgtcggccatgtactggactatgcagcattctcatagtgccaaattcaaaacccatttgatgatttgaagttggcatcattgtatcgcatcgcgtggtcatgcttttgcccaaatctgtgaacatcatgaaattgatttcctgttggaaaaagaatatcagattgatctcatcagtgcttaaatctttggcatggattaagttttccctttggagataaaagcatgatatattggtccaaaaaatggaagaagtctccaacaagcagcgcccattgcattgatgtcgtgaaagaacttccactgaactgcaaagttttaaaaaaaaggggttctctaaaagattaactcaactggaagttgctggaagagatgtcaaacatatttcttgaatagtttgcacatattattacgcagtcaaaacgatgcattgtttaggtctgaccaatgagaagattattaagatcgaggttaacccactgtcagttcttaatacagactgattaggacgtgcacccacaccatgacgttgacctggattctgagagctgaacacagaactgatattgtctaaaaaatcacagaactgatcatagaactgatattgtctaaataaaaaacacagaactggtctggcttcgaaacattgcatcacagtcgtcagaatcgatcatattccttacaaattccagtcctccactaaccttccctttcttcactgtcctgtccatcatgtctgtccttcttggcttcctcctcctactctccctgcaccctccgacgagct

SEQ ID NO: 5301 - DNA, 2000 bp, Oryza sativa
ctgcatctgcatgtgccggatcaggtcgaccggaaagctgtttgcatagcaaattcagtagcctatagccacctctttgcccgtgtctgtacatgtaaaaggatcaactcgatgcacgaagctggcgaatcataaacagtaaaaaaaacaaagggaagtaagcaacacagtaattctacagacctccagggctccctccagtttgctaggaacatcagggtatagcacttagcattctttgtgcacacctgtgtgtcggccatgtctcctagccggcttagctcatgacgacaccgagtcagcagcatcagcatcagcagcagcctcggataccaagcgcgagcccagggacagcaaagggccgagcgcgcgcccaaagcgggcgaggggagaatcagcatcgtgtgcttaaagacctgccctttcttcccacatggacgaggggagagctaggatgcctcgcctttgtttgaattgctttcctggagatttgaagacagcaatggcagtgtgtggcaagagaaaaaaaaaggaaagccctagaggaggaggagcatgatgtaagccgcttttcagtttttaggggcaaaggcgacggtagaggcggatgagaggctctcccctctgccgccatgtcgtctgcttcgttatcctggggaagtgtgtgtgagtctgtgtgtgcctgcctgcagatgccctggtttcgcactttctaggattccttttcgggaatttggggggatgatagaaatgagaaatccatttggatgcctgcgcctgcacgtctgcatggccagtcggccactgcatacctgcagacttcacatcaggaaatctgcagagaagaagactagaagaggcagataggcagtgcctagatagaggatcagattagtgatgctgatactctgttgctcaggacaaaacaaattactaagacaatacacgccctgatcgttgaactgacttactgaactcgcaccattcttcttccgttccaagttccaacacagcaattttcagtagaaccaatcatgaactgatcaacagtgttcgttcgattttattctcacatttccaccgctgaatggagcaaaggagagataaagtggaaaagaaaaaaaaaagtaaacgcaaaggctcctatcacctcatctcctccatattctcgccatgcaaaaccagcacacgtacgaacgcacacgaacgcccgagagatggaggagaagaatcgcaaccccgcactctgtttttttcatcctctgctttgcgctttctcctcctcaaatctcctttcttccctctctacggtgttgcaccgcgcgcgcgaggccgcgaaaagctcccctttgtacccatctttcatccccccacgaaagcctactaccacccatcctccccgtagtagccaccaccaccaccaccaccatggccgttctctgcttcctcgaagcttctccaaatccagccgtgcaccagcacggcccgcaccccgatggcccgggcgtatgcccattccatcgaacaactccggggcgctctgacctcgcccccccgctttgccgctttctgacaaaattccgcgccctttttggtggcggcactgaaagagaggagccgaggtgagggggaggaggagaaaaggcggggaggagggagggtgggtgtggccgaatcttggcatttctagggattctgatgaggagctcgccgctttgcgatctttttgccggggaggcctagctcgtcatctcctccttaccgggacgtgtccgttgacgagaccgaccccccttttcctgccgccgcccgtggggagaagcttccacgctgcttcctctcctcttgcccccgctatttatagccgacgtggtttctccccagggttttacggcggttttgttcatctcaggtgaactcaactcaactgaagtctggtgcagtgcagggtagtgtagtgtagtgtagtgtagcttgttgattcgagctgcattgcgctg

SEQ ID NO: 5302 - DNA, 2000 bp, Oryza sativa
agtgaggagagagagaggggtgacaaagaagatgggatgaggtgtaaatcattaacatgtgggactcacctactgattcaagtatgtcaaccgtgattaacctatcaagttagcataatccgctttcaaaaaccatcaaaagagataatttgtaccaattttcaaaaattaatgagacgttatggtaattttatgattgagggagacgatttaatcaaagagtaaaagataaggaaggagggagacggaacctttgctttccttgctcatttcggggctaagggcagtcccaaccctccacctaggatggtgtctacagtattaactacattgtcatgtagaacttttagcttatgttgcactatattaattaagagagagagtgaagagaggaagaaactgggtctcatgcaaggcacaacttcaacacgagaacctgtgcactagactgggagagaatagtgttttcataatagatgaagaataaatatgattggtagagaagagagatgatgtatttattagtagcctactttaataaaccatgggttatagagtgtagtttctattgtgatgtcttattaacatggcatcatagacactgtttatggacgctatgggttgggaccgacctaatttggcctgatacacttgtcctacctaggttgcgacgaccacggagacaagcaccctctgcatgttgcacacagagacggaatcaacggcaatcacggcgatgaacgtgagaccacgtccacatgtcgcggcaaactagcggaatgaaccaataaactattgacggtacaaaagtgaagggatcgcggcacctgttcgggccgggattcagctcatcagctggctccgccgagtgctcggctgctcgctgagctgaggcatcatcgagacgtacgggtacaaaccgcgacaggtcctcacatctggctgggtcacaggcagaccggttcgacttcgtacgtgcacgccgcacgcgacgttcctgcttggctccggtacgaggagaaaatctcacgtcaactcgatcaacgtcgagccaccgacccccgtgcgaacacgtcgttattagcaggcgtgcatagataatactcctactatggacttgttctccgtgttgcttatttatgttagtcaattactctttagcttttttattcaccgcaatagatggaagcctggacgagtaacaactaacaactcatgcgcaataatcctcatcgatttgttagcaaaaactgcttgattagctacgcattttgcttcgttttcgaccccacatcaattttccatttttccttcacaccggaaccatcgcgaaatgccgaaatcctcatgaaccctctgctctgcttgattcaccgagtcatcaaccgaccttgcgcagttgtgctagctagcaggagagcaccctgcacgaacctcacatgtgtgggcggtggggtcacccgaccttgccaaacaaaacgtctcatcggcacatgcgtgggcccacccatccatcccaagatcaaacgccagcctgatatctgaccgtccgttcctgccctagctagcatcggacggctcaccccgtgtctcgccacgcggcccgaagaagaaaaaccctaccgtttgagcagtctccgctccacgggcccactcgtcagtgagaagtcgcccagttaatcatcgcctcatcggctccacgctcctcgtctctctcggccggcgtcgctttccacgcccttttgttcaaaaaccacacagtttttttttyctttttgagtttttattagcaaggggaaaacacggagacgaaggaagcagccagcaagctgctgacgcacgcggcgccgctcccccagttcaaacccaccaggccaccaccaccttcccccaaatccccagctgtgtgtgtgcacgcggttttccaatcgattcttcttcttcttctacctcgcatccctccccccaaattcccgcattcgctagctcctgattcggcc

SEQ ID NO: 5303 - DNA, 2000 bp, Oryza sativa
agcacgtcgcagcagagagagagaggaatcaatcaatgaacaaaaagctcaccctgtggacacgtgtcgggctctggaggcccccaagcgtycgcgtyaccaatctcgaagcgggcaacgcggagcccatgyttacagcytggcaccggtagtgacgccagccaccagcgcagcgcgcgccgcttgstcgctctgcggcgcaatctgtgaccccacctggcagtgamacggggcctccgcgaaacgcaacggctaaaacgtggaaggccgcggcggcgtygcgcgcgcgcgcacgttgggacgtcggggagggaagcggccaaggccaaagacgtcgtcgtgggcagcagctggtgaaaaaaaaaatggccttcaaaattcgaagcggcgacgttatcgctctctcgtcgtgagcggggcgtcgtcggctccggtggatagtcaacggtcgacgcgaggatagttcaggagcggataatagttaagaaatcgttgagattttaccggcgttttttctcccagagatggttgcaaacgcagttgatttattaggactttaggtatatatatgtaagcttttcctttttctcgcgacatgtggccttgtttctgttggccgatcgtgatcagcgtgcacttaccttaggaacgggtttttgattttgggattaaaaatgtccttgatcagtactacacatgttctcacctttttagttctcatttctgcacgagttaaggatagtcaagatggttacgatcgcaaggtgagtggatcaaccacactctctgtcatgttaacatcttgctctctctctcttttatttactgtcaaggcgccgtttactttgtaggggtcgtactgttcatatttttcctttcgtgcatttgacgacgacttctcagcaataactcgctgcctgaacgtgtagtgttaatcatgttactcgcctacaaatggaaccggaactctggaagagaaaaaaagaagtatttgcgagaaagaagagtagctggaaatttgatacggtcgttttagggttgaattgatatcagatcctaaattctctctccaaaccccatactaattcggcaggatatctttcacgataagtactttcctgattcatctccttatctcaattaaacgataaatatctcaaagaaaacgtgttgagcggaaccagattaaaccgaaattcacaacaactcccaaatgtcgcgcgaaatatactccattttttcttgttagtacggaacaaaaacaaacacgaaactggagctgactgagctaaagagcagtaaaagaagcgatccgcttgacggtgactattacggccgctgccgcccagaggcaccacctcacctctccccttccacttcgctagcccgcttggcttctcagagcctggaggaaaaaaggaaggtgggagaggcagcagaggcgaggcgagggagcgagcgagcgagcgcccgaatccccaaaatcgcagcgcgagaataaacaaaaccgaagcggcagcgggagcagcagcatcggcggatacaataagcaaggggagcagcagccacgggcaggagaggagagtgcgcaggcgtgcgggagggaggaggggggaagaagaaaatcgcctgcctgccgccgcggtggtgggttggtgggtgccgcctcctcctgctgctgctgctgttcccccattacctcgccccgcttcgcatggattccccctcgcttctcccccactccacccgccgatccaccggccggggcagcgcgaggcgatgccaattgaggtgaggtgaaaccgccgcttcttccgtcgtcgtcgcgtgggttttttttttctctctttggtgctgggggatacaacaacctggcggccgcgctgccgctggacgacgccatcgsgcgcctgcacggcgtcttggggtggacgaggcccagcagccgcggcggcggcggtgggaggaagaggtggccgcgcgggggaaaggggagcgcc

SEQ ID NO: 5304 - DNA, 2000 bp, Oryza sativa
tgccactcggcccgtgggcaaaaaaacgcccagtagttatcctgcaagtgtactgtgtgtgtgagtgttttatctagagaagcgacgtgttaggtgcggccggtctcaacgtgcgtgacgtatccggtgggatgagagcttgcgtacgttgcatcatgcatatagcaagtgtgtaataggatatggcccggtagtaatgtagtgtagtgtagcgtgggatgtgtgcctccatgcacaacaacaattatatgatatatatagcagtctgttagcttattatgtatgcaatgcccaacaatacgatgattgcggcacggtgggctagtggcaactatagagcaagtggtgccactccaacacagccatgttgtctatttactgacacaagggcccatgcatcaaaatggaatcagaaccacataactgttgtggcatcaacagtgtgtccacaaactgccccgaaagaaaagaaaaagaaaatgtgtccacacacagttagcgacggatagagcggtgccactagtgctagtggcgctctaacttataactgagtgcatcaacgttaaacgatgcgacagtgacctacctaatcggaccaggtatagctgctgggtgcagaagatcccggctgccgatggcaacctcagcggctgagccgacggaaactcacagtcgatcagttatttttatttgaccccaaaaggagaccagcctgttggaatcttccatgaacgcaccacttccggcccaactccatttgccattttgcctggtttgggtctgacttgctatcgggtcggagcaatcgtggatcggagccggaaccgtctagctagtgatcagcacgagggcgatgaccacttcggctgtgtcattaggcatgtgctaattaatagcccgcggggttkaaccactatttatccatttgaccctctgtctttttcacactatcactcacggtttcttcctcttttattctcagaagtgtggtaaactttgaagcaactactcctatacctatatagagcctttctccacgcgttgataattttggccattcctaatctgcaaacagatcatctactcgcaggaagtaacctaatatagtaggataatacaagtatatagtcttgctcatcatctcatccaatccatgccacaaaaaaaaactgactgtgatggtttgccagtgtcccgattcagatattaggtgtcaaaatctgaacggttgcgtagttaatctcttaacccagctccaacttggccactccagtgtgcgggcggaagtgtcgttaccggggcgggtacgctttgcacgccaaacccaaagccacccgcaacaaccgacgacgacgacgaccgcttcgccacagtccacaggccacggcgcgcgcagcctactcagtcctcactctccccacctcccacgcagccacactagctccactcaacttgcgcttccctttggcttgccctcccatccccgtgtcttcccaaccacgttgaccacgactttttcgttgtggcctcgcctcctcctcttcctccactccaccacccacccgcccggccgaaccagccagccagcaagccaagcccacccaatcaccccaaccgcctcactccttcgccgccactccaccggtctcacggtcgctgccaccccgtccccacgacgacacgcccccacccgtcaccctttcgcgccccgccgcgtgcgcgcccacgccgcaaccacctcgcttgccttgcccccacctacgacgcaacttcccacgtcttctcttctctcctcctccgcacactctcgctcgcgcctcaacccctccccactgctttaaaactacctcacatctcactccctccactccgcacaccacaccacaccacacagcaaccagccagctgccacactagcttgaggcgagcgagcgaagcttagctagcggatataacaagtcgtcgatctgcttgctgcttttgtgaattgcggtggaagc

SEQ ID NO: 5305 - DNA, 2000 bp, Oryza sativa
atcaaccccaagtattttctccagctatgactaaccgctcctccaacaaagatatatcttgcgtatggatgagggagtttatcgggtgagttgtagtcaatgtgctcaaggttttttatgtactgaagaaaatggtctggggtgatgctgtagggacttcccctgcagtggtatacttgaaaaaaaaagaaggtttgggggtggtttaaattgcaacaaagacaattatttagtccaaagtaaaaggataagataaagggtgatctaaaagtgatactttgataataaaaaataactcaaagcacaatttattcaattgaaaatattagctaaatggtggtccaaagtaaaatttataaaatggagcccaaaaatacaatccgctcttattaaataaagttgtactacgtttagactttatatgatatataattagtcttttatatgttataataattacataattaataattattattttgtaatagatagaaagtctggttttatctaatatgttaagtaaatttgaagagtccacaatagttttatgtttaaattgacacattctaaatacaatctgcggtacaacataattgtgcactcgatctaatcaacatctatatttttctttaacataggaggtccatcaaagtacccagttagtatagaagattgctaaattgatagatatacacacagatagatagatagatagatagatagatattccctccattttatattataaattgttttgacttttttctagtcaaacttcttttaagtttccccgcaaaaagaaaaaacgctttaagtttgatcaagtttatagaaaaaaatatagtaatattttcaacacaaaataaacatattatcaaaatatattcaataaaactaatttggtattttagatgttactattttttttataaatttagtcaaacttaaacaatattgactaaaaaatcaaaacgacttatatgtaaagagtatatattatctttattagcaccacgacatgcctctcatgatatagaggatatatagaaaaagaaaaaaaaacaacctgtcttctctcaatggagataaccatggtgcgaaaaaaacaagactcaatagtcttgtcgaactaataatcctttgtatttgtatatgggcctagtcaatctgaattaattcatactagtagaaaactctttctatgctgttccgtctgtctcgtgccttccgaagagttttctatgccgtctttatgtcagacgatgatgagttgataacgtgaaagcctctaaacaaaagcccttaattacgcgtgcagctgactgatgtcacaacaatccgagaattattctcaaacctacttcctccctttgaacacggtacagcgaatactcttcttcgaaatgtctcaaatttgtctccttttctaaccaaaccagcatataaaagataaaactacaaaataatcacacgggatttatcgttaacaagtagccatcacgagggataatcctcccagcttgtggctaagaaaaaacacccgaccaaccagtttaatttagttcagaattctgaccgaattttgacgagaccacggccggacacgcacgtgcacatggaattcacgaggattagatcgaatttacatctttccggcgtgggagtggatgtgcggcaaagcgagaaaccgtcaaattgaaatgaccaaagcggtcacgtctcgaattctaaacgaaattcaaccgagtttattctcgtttttgacgcatgtgttgcttgccctcggcatcttggcggctctgtcagagattgaattcggcagttcgttggatattttggtcagcttttgacattttcaggtgctgctccctctatatattcagatagaactcgctgcagggatatgcttagttattggcttattgcagaaaggagcaaaaactagggagtgggagaaagaaagggttttggattctgtctgaattcagagattgatcgag

SEQ ID NO: 5306 - DNA, 888 bp, Oryza sativa
cccacctataaatacccaccccctcctcgcctctcctccgtcaatcgaaccccaaaatcgcagagaaaaaaaaatctcccctcgaagcgaagcgtcgaatcgccttctcaaggtatgcgattttctgatcctctccgttcctcgcgtttgatttgatttcccggcctgttcgtgattgtgagatgttgtggttagtctccgttttgcgatctgtggtagatttgaacaggtttagatggggttcgcgtggtatgctggatctgtgattatgagcgatgctgttcgtggtccaagtattgattggttcggatctagaagtagaactgtgctagggttgtgatttgttccgatctgttcaattagtaggatttagtctctgtttttctcgttgatccaagtagcagcttcaggtatattttgcttaggttgtttttgattcagtccctctagttgcatagattctactctgttcatgtttaatctaagggctgcgtcttgttgattagtgattacatagcatagctttcaggatattttacttgcttatgcctatcttatcaactgttgcacctgtaaattctagcctatgttaattaacctgccttatgtgctctcgggatagtgctagtagttattgaatcagtttgccgatggaattctagtagttcatagacctgcagattatttttgtgaactcgagcacggtgcgtctctctattttgttaggtcactgttggtgttgataggtacactgatgttattgtggtttaggtcgtgtatctaacatattggaataatttgattgactgatttctgctgtacttgcttggtattgttataatttcatgttcatagttgctgaccatgcttcggtaattgtgtgtgcag

SEQ ID NO: 5307 - DNA, 2000 bp, Oryza sativa
ctctcttgttttatctttttaaaatatatttatagctggtttatagcttgctattgtaactgctctaagtgcttaaaaatcttaaaaaagctaagccatgcatgaattaatcatgatgcattgatgcatgcgttgttctccgaaagcgacaacacaacgctagcttagagagataccagtattagagcaagtttaatggtatagccagctattagctttaaatcatttatagtcaatttaataaccgattcatacaatagttacctataaacgtatactatacaaattataattggtactacaagtggctataaatctatagcccgctgctgttctctctcctattttatattcttgaaatatgtttatatctggcttatagtctgttattgtactgagagtagtactgagaaagtgagatgatattttctgctcctttttatgttcgaatttcttaaatatgctaagctcggaattagcaacaattatttttaatacatcactctacagtagtgtgatcatgatagtatccaaggggcacattgttagcattcagtattgttttagctagcgtgcaggtgacattaagtttcaaacgggaaagcatctctgctcccgcttaacctcatgtccagtactgtgtgatcatgatgctatcaaatggctcgagtacagatgaagtgattgtgaaggacgtgtaatgcctattactagtagcaacgaacattaatttgctgatcaggagctacgtacgggtttcaagttaatgcagtgacgtactgggagtgctaccacacctgtccagatcctgagagctggaacaaaacagttgctggttccgaactgatcatggagcgagcgagcatgcatgtgcgcgccctcgtttggaagtcgagatcagaaacgaccggacaaaagcgccatccaacgcatcaccatgaatgaacaagctttgccgtaaaagttgaaagctagcaacggcatggccctcccatggttgctgcccgcatgccgtcgtggcacccctcgaatcccgcgcctgcaccgagtgcctgaccacaacggaccacgtcaccactgctcgtacgaagaagcggagaccacggcccgggtcgtctccacgtcgcccccactcagcagcagcagtggcgctgcgccggaaacggagcccgaggccgcgccatggcgctggctcttccaccccggcatgagccgagctccctctcgcgcttgcgcctctggatccgccgcgcgtgtccacctcgcccgccacgcggccctcacccccgcgccasgctccaaatcgggcgtacgccatcgaccatctccgccattcgaaacgccgaaasgaaacctcgttcatccgccggctgttcgcggcgtggtttgtttgacccaacactgtttttccggaatccaggtgtgtraaacgtgggtttggttttggcgcggtttgggtcaaaaacacagagggcttttgcagttttgctcgctcctgtagaatctcgtttccttgcacgtaagccgcgcccttttgccttgccgctggttaacatttgtccccgccgcagcgggagcgggcgcccccacacttcctcgttccactctctccctccacgtaaaccccttcctgggccccactcccctacctaatggtcccaaccatcccaacgctacgtggacccattccacctaagcctatgtcactgaaaacatgggcccacatggaccgcgcgcgagagcgtaccggtggaccaggcgcagcgtggtctctctcccggcccgggatcccagacggcggccacgccacgcgccaccggcgatctcgtccgtccacgtcccacgcggcggtggcgcgcatctggccgtccgcgcgcgatccgacggctcgggttgcttctcctacctttcgccgtgggcttgtattaaagcccgcctcgccctcctcggcgagcctttccctttgattcctccgttgctctctctactacgcgtgggac

SEQ ID NO: 5308 - DNA, 2000 bp, Oryza sativa
taatgaggcggaggttgtactattgaaagctgctttgacgtacgtcgttgcgtgcgtcatagtatggcactatggtttatcttggtgtttgtcacgcttggagcggactggttaattagcagtctagcagtgggctgatgtgtctcttgatgtgttctctttcgtcatgtgaaggggattttctgtggttgtagcgatggaacacaatctccatggccactatttcacaccctcaagcgattgctatgtccgcgccgctggccaccttctccatcattattaggtgaggccggagatgaacgagaggcagcactgacgctgctcctcgtcgtccaggcaatggccgcggtctccagacaggtttctcctgcagcgtgcgctataccccgatggcacacgcgcgcgcttgtgtgctccttatccttttcctctcctcctggtaaatgcccgtgcctgcaccctcttcctctgctcttcgatccccaatggcacggactcggacaccagcatggtaatggcagcactgagtagcgacaccggcaatggggcggatggacagactcgccagtggtatggcagacggacagattgatcgctgtatgacggcccgatcttaggtcacaatattttggacggaggaagtagctatgtaggattagatttgacatcatctgcgaatctaaacaacatgttcagcttcgtagtgctaggttacgtcaaatctagttcaggttcatagttgttggtgatgttaatccaatacattttagaacggaggtaatatttttgagtttgacttggtgatgaaataaatttaaagcctgattctttaattcaattctaaactttaacttgctcatttttcgttagcgtatttttttaacttattaaatggtgtatttatttcaaaagttttctatacagaagttgttaagaaaatcaaataaatatatttttttcaagtttaaaatagttaatacttaattagttgtgtgctaatcagctttctgttttgacatgcgctgaaaatctggctcagtttggagcgaaggattcaaggaacgcagtaggtgcccgtcattagcacgtgtttttttagacaagtcccaaaaacmacagtttgggaagacaaagcgtagaggttacaacagatcaagtgattgtagggaggaagaaattacatgtttccagaccgggattatgaccctgtcttcagcgttgaaacgcacagcccaaaacttgatctcgtcttggcattttctcaaagctgaacccagcgaaggttggacgttccgaaaaaccacatcaatgccggtgaacccagagaaatatctttgctgggtcattagcacgtgttgctagcttctactttcttttgggagaaaagaaggcacaaggtacgcgtcactgatcagatcatcgacgcaaaatgttttaccagcagctgagccaagtaggactacgcaagcacaggatgatatactctctgctttactctgttttatctgaaaaaacacggatgtggattttcatccctcgaggggacatccccttgttgtttgcatgtcatctaaatagttatcaaaaaaattgaaaaaaattgacaacataaattaatacgaaatatatcactccacaaacatgcaagaccaaattcaactcctataagttgcaacaaaaataataaattaaactgaaaatagttatggcacattcgcaactatatttgttatttttgttacaacttgtagaagttcagtttaaacttgtatgtttgtggagtgatatatttcaaattaatctatgttgctaatttttttcatatttttatgactatttaggtgacatgcacgaaaaacactgcaggccgaggcaccgactatatatatataccgtgtgactgcgtcctcgatacttcttcccaaagagagcgagccgatcgagcagaagagaagccaaaagctccaatcttcgaaacgtgcgtagaacactcgatcgcc

SEQ ID NO: 5309 - DNA, 126 bp, Oryza sativa
ccccccccccaaacaacttaaccgcraagacctaatcctcgtcggcccgtcggattcaccagcgagggagtttgcggcggcggcggaragcscgagggaggaaagcgggggaggtgaccgccagcg

SEQ ID NO: 5310 - DNA, 2000 bp, Oryza sativa
ggggcggcgggggccacgtgcctgtgcgcgcacgcgggcggcgactttggttgcccccacggatgcgaatgccgcccagaccgcggctcgggacgcacggatcgtgatgcgtcgcccctgtccttgcgcgggtcccacgacgcccgtgacgtgctcccacaacgtgccgctctacgcacccgcggcgggccccgcgagcggcggctttgatgccttttgtttatgggatgggaacgaggagacttcgcagtccagtacctaaaccatagcaatatcacacgacgatccaataacgtttacacaaaattaacgtgtttttgggaaacaaaaggcagaaaattaaatctgcatcattaacaccatttaaaataaattgagacattactttttttcccatgagaaaaagaggcttaactaatacagtattccacctctaatgacttatcatcattttcgtcaaatgcaacacaacacaatcatcctattgtcttctcaatctcaaataaactactggcggttatcatttgccatcacctaaccacttacattgtgttcatttggtttcattagttcaaacattaaagatgtttttttcaccgatatatgtctgtatctaattcatcattcccctaatttcattcccattgcactatcttcggcctcttcgttgccaatgatgcacaagctattaaagagcacggtgttgttaggcaaaacacaaaccttggcatttgttgttgccattcgccaccacatatcacttgtcttaccactaacaacctatgttgttctcttcgagccccaccatgatactctatactaatagtaaaaagtagtctgaatcgttaatttcatttgatgaaatggtttaggtctatttatactaacaccttagttagcagtagtagaaacatgtagagatactgttgttcaaaagaatagatgcggatagatataatcatcatttaacaatgactaaaccttttttcttcttttttggattttttccatggaatattagcgatgccaacgtaatggatgatgatagatagttttagatgggraaaaacatwaataatagttactcataatcatgttattgtaaattactaatttacctataattagttggactctagctctagcctttatctaaaagttgggttacctgtgaacttagagtgatcctatcccagttctttaatgaatatttttagctatcgcttatattagccgctacccttgtttctcaatgaatatttattcgattacatagaaaatacaaacacacatacattcctaagcatttaacgacaatccaaaaccacaaaaacattacctaatgcattttaaaagaggcatgaacctataacaacttcttgactgtactaaattccgattcggaatttcactaacatgtacgcacctaatggtataactatgcacacacaattttaccacagtatagtcttgcatatttcaccgttttgttgtcgtcaattttaaaatacctgaggatataattttggtacaatccatccgtaagaaacaagactacaattcatgaaaaataataataaatgtatatttcctttaagtaaaaacctctccggactaatacaaacacatttctcctggtttcccgtttgccggggctgaaatgcaactgcactctacaggttcactcacgcgcaattagctggttttgatgggtcaggaggaaaaaggcgcctgccgaattgtaatgccgccacgctaaagacgaggggcggcggcgcggacagtcaaaccgctccctgactgcgccgagttttattccctgccgctccaccacccgcccgctcgcccatttcctctccctttttaaccccccacctcctccctcctataagtccctctccccaacmaccccctcatccgcaacaccgcagctgcacccgcatccgcaccgcaccatcagcgcgcaccaagaaagaaacacggagaaaagaaagatcgcc

SEQ ID NO: 5311 - DNA, 2000 bp, Oryza sativa
gcgcccacgcaccgcgccatgcgcgacatggcgcggcgccacggcccgctcatgctgctccgcttctgcgagctccccgtggtggtggcctcctcgccggacgccgcccgcgagatcatgaggacgcacgacgtcgcgttcgcgtcgcggccgatcgggccgatgctgcggctcgtgttccagggcgccgagggcgtgatcttcgcgccctacggcgacgggtggaggcagctccgcaagatctgcaccgtcgagctcctcagccaccgccgcgtccactccttccgccccgtccgcgcggacgagctcggccgcctcctccgcgccgtggcggatcaggccgcgtcgtcgtcgtcctcgccggtgaacctcaccgggatgatctccgccttcgtcgcggactccacggtgcgcgccatcatcggcagccggagcaggcaccgcgacacgttcctgcggctagtggaggacgggctcaagatcatgccggggatgagcttgccggacctgttcccctcgtcgcgcctcgccatgctcctcagccgcgtgcccgccaagatcgagcgccgccgccgcggcatgatgggcttcatcgacaccatcatccaggaacaccaggagagcagagccgccgccgaagacgaggaccttctcgacgtgctcttgaggctccagaaagacatggactcccagtatcccctcaccaccatgaacatcaaatccatcttgatcgtaagtttcttccccgaatccggtaatttcccctcgtcaaaaacgaaatctcttcatgtaattcgctcgaatccaggaatkttcggcgcgggcagcaagacgtcagcgacgacgctgcagtgggcgatggcggagctgatgcgtaacccggcggtgatgcgccgggcgcaggacgaggtgcggcgagagctcgccgtcgccggcaacgacagggtaaccgaggacaccctcccgagcctccactacctccggctggtcatcaaggagacgctccggctccacccgccggcgccgctgctcctgccgcgggagtgcggcggcgcgtgcaaggtgttcggctacgacgtgccggccggcacgatggtgctcgtgaacgcgtgggcgatcggccgggacgcggcggcgtggggcgccgcggcggaggagttctcgccggagaggttcgagcggtgcgagagggacttcaggggggcggacttcgagctcatcccgttcggcgccgggaggaggatctgccccggcatggcgttcgggctggcgcacgtcgagctcgcgctcgccgcgctgctgttccacttcgactggaggctgccgggagggatggccgccggcgagatggacatgacggaggcggccgggatcacggtgcgccgccgttcggacctactggtgttcgccgtgccccgtgtccccgtgccagcgcagtagacagctggtgttatcttatctaagccaatatgagtaatcgcaattaatggcagaatttaccgataatggccgtctttagattattttttttctaaaaaggtcacatcgaatgttggacacatgtatggagcattaaacatagaagaaaaaaatcaattgcatagtttgcatgtaaattgtgagacgaatcttttgagcctaaatataccatgatttgaacaatgtgatgatacagtwaacatttaataataacagattaattaaacttaataaattcgtcctgcagtttacaagcgaaatctgtattttgttttggttattaaactatatttaatattttaaatgtgtgtacgaatacttaaaaagatttggcccagcaactaaacacagccaatttcatgtgagcagtagtcaaatggtctccttgattaccgtcattagtcaaaatcgcagttcacatcatcacatattcacatggcgcgaaagattacgacacgctaccaattaccaaacccccaaacactttcccccctcaaagccaaacaatgattgaggcagcc

SEQ ID NO: 5312 - DNA, 2000 bp, Oryza sativa
ttaaagaacgcgaacaaagctttgcgcctcctttcatcgaagggcaattttttgagttgaatatggtaattgcgagagcaaaggattttctcaatttgctgttaggtatgtgcttcggaagacatttatgtttcagagggatggtcttttttgtgcttttatttgagatgaattggctttcacatcccaggcgcacaacgggcatatcgatgagcatgaaactgtacaatacgaatgtttgcaaatgtaatatgtatggtgcgtcagtatttgacaattctttgggcatgagtaatttcttatatggaatattattgttcattacttctttgctaaagaaaatgggaattgttcagttaaacccgttgacatgaattatttggaaacttagcaaccaatcaaatgaggatggcatggacatccggaggtttgcatccacatgatgttaattttacttctgacttcaattatttttcaactcgtgtaatattaatttgtactccatctgtccctaaatatttgatgccgttgacttttttaaagatgtttaactgttagttttattaaaaagtttaggtaattattaattcttttcctatcatttgatttattgttaaatatacttttatatatacatatagttttacatatttcacaaaagtttttgaataagacgaatagtcaaatatatttaaaaaagtcaacggcatcaaatatttagggacagatggagtaatattattgttgagcggtgttcgcctggtatgtgggcgcaggagttgcaaaccagcatcagtgtgtcacttaccttgtttgccgttgagcaaaatttgctaagatgaaaatcatatctgaaaaacccgtaattagctaccaaaatcttcagctcaatttccatttgtattatacagcatcaggatatattatgccggcggcggctagatgatgtctacaccgtagggttgcatgtgccggccgcaaccacccacaggttttatctgatgcggtgaaggtcagtgtgaggcaggcgccattgcaccgaccgaaacacacgaacagcgacaacagcaaacagatactagagcaaagcccccacaaatttaactagattggatatttagttatgctgtgtgttcaccaacaagcgcgggccgagcgacagagacatatgctatcctccaacagtagcatagctatgtactcgctccatttcagtttaaaagaggtttttgacttggctcacaatcaaactactttaagtttaactaaatttatagcaaaaagtagtaacattttaaacccaagataaatttattataaaaatatattcaattattgatttgatgaaactaagttagtatcgtaaatattactatatttatctataaacttagccaaacttaaaacagtttgactttgactaaagttaaaacgtcttataacctgaaacgaagagagtatttttaaaaccacaggaggggaaaagagaagattgagaaaatacgcaaaatgaggtgagccattagcacatgattaattgagtattaattattttaaactttaaaaataggttaataagattttttaaagcaaaattcattttttttaaaaaaacacaccgtttagtagttcaggaaacgtgtgtgcggaaaacgaaacaaactctctctctccggctgccgaaggcagcctaacaagtttgaatgtttattatccattttcagtttttttttaaacattaaggttttactacaccagcgaataatctttttataggtcgtataaattgataacctcatacataagtggatttgcgggttagccacttatgttcatcagtgaataatctttttatacatcgaataaattgataatccgatatataagtgaatttgtgggttagtcgttgggtgagccaccacccggctctgccactataaaatctcccgaggaagatgacgaggagtcagtcaacagttgactagctgttcgattcggcc

SEQ ID NO: 5313 - DNA, 2000 bp, Oryza sativa
tgtcttgcattcagttagtattaatagcctcttagttgttgttgtatcactgtcttatggtgactggtagctcaatagtattggagcaactgtacacatcatatgttgtgctgctttgatttttttttctgacttgatttccaaaccaaaaagagcagactaccaagttgcctagcattacagacatttatatttagagtagtgtagtagagtctagagaaagtcgtgccaggaaaatcctttgttcgtactcccaccttaaataggcaaactctacttggaacttttttattggatcacctgttactattgacaaagtgacaactgacttaacagaattaccataatgtagtaagataattgtaaacttttttggtttaatcccttgcatctattacaacagactgttattcatttcaatgtatcagtatctgttgggtgatcagctgtgagaaattggaaacagcttgtcgtaattgaatttggtagaaagaattgcatcatgtcattttagagttttgtctagtctcctactttcaagcctttgtcggcaccctctgaaaagacatcgacggttttcttacttcgtcaggagctgtgtctagctgttgctgttatgtgtaccgattggttatctgtgagcgggctgttgggtggaagctatcacgagctgcacaaccacacaaatatattcttttttgatttgataatgtattcaattgctatgcagacaagaaggaatcatgcattgattggccatgatcaaggtcttctttcattaggtaaagccaaaatggagttactatatacttcctccgtcccaaaatgcaagcatttttaaggttggcacgggtattaagaaagtaggtgagaatgattgaagaaggtgtgtgattggttgaaaagagaaagtatgtgaaaaagaatggttgtgaatggttgagaggagaaggtagttagaaaaatagcttcattttgggacaaagtactgtgctagatatagctatattttgggacggaggtagtactaatgaagcaatcagtgaccgtccatggtgattgtcggaatcagatcctgagttcatgaaactattttggtctgatgcaaagttgcaaactgcatcctttttttgcgtgccattggacacagagcaaaagtattattgcagtgacaatattacatggtttgctttgttcctccactggagatgagctgaatgtgcgctgagtttctgtagtggaatctctgccggcatcctctcacattttgttcatgggcatggcaagaacaagttggctggtaatagtgcctattttctattcgaagtagtgctctcgttgctgtttgtttttcgaacaagttgctctaaattgtgacgcaaattttcgttcgatttaacttcccgtcttgttaagcttggccacatgatctgtcactgtatggaatgatgcaaagctgctgctgatgctgtatttctaacggcgtgtttgcacattgggctgtttgacctcaaacaaatggcacgatcctgtccccttatgaaacagtctcgatataattatgaattttgaaatatataaacccatgccataaacaagccattagtcaaagaccggccaaaaaattttaaagacttcgatagagtaattagcaagaactacagttactaacctctaagcacgacaaaaaggacagaaggggaggggggggcatagagtcgtgggggcgcaaacgagatccggatctcctgcctctatcagtatgacatgtggggccacctcccgggtcgacagagcctgcgcggtgggtcccaccgcctcgtccccgtgccacccacccccgtggccgctcacgtgggctctcctcctatttatttgcacaagtcttcttcacgcctcgtcgcaggcagaaaccacgcgaggcgcgcgactcacctgccgagccacgcgtcgcgcacgctgcggagatcgcctcctcctcgccgccgccgccgggggga

SEQ ID NO: 5314 - DNA, 2000 bp, Oryza sativa
gaagtcaaagtgatcttattccgtttcgtggcgaggtgacgctatgggccttgtagcataaatctgggcttatagtgatgggccgtatatgagggatttgtcggcccatagaataaggaaagggaaatatacaggttttttctttaaaaaaactggaaatatacagttcaacctttgttgttactgtacgctgataaacagtgaaaaaaaacgaagcaatcaaaagcattttgtaggtgaaaccctttcaccctttgcccgtttgtgttgtgcgcttgtgccacctcctaccagacacatcatacacagaaaaactggcttattgtctgcttagatcaacttgctgcggtaaattttttggtataagttttgatggaaaaagatttagcattgcaattttataagttagtatttagatgcatggtaaagttttgccattaattgctgccgcctctcttatgcacggggcctgatttttttttcttcagattactatcaaatgacaaatgccaacttgcctactttttacatttattttgctaaaaaatgttctaaaacggtaaaattttaatcattttagaggatctaaaccggcccttagctcaatgctaaaccaagcacgcacgtgtagtgtaaagcaccacgaacgcggtcgatgtgatctcccatcgtcccatgcctgatgctgatgcctccctccatcacacgcttccgctgaatcgcactctgatcgcgccccgtccacaaccacgagccgtgtcccgtgtacgtgcatccgcgtggagcgggatgcgggagcgcaacgtcgtaacgcgcaaagaacggggcgcacgcacgccctggtgcaccggtgcgcgggcgcacagctgccgcggggttggcacgcatcaacgggccggggagtcgtcgtcgtcctcgcaaagaaaaaaaaatccccaatcatttcgaggtgatcacctaccaaatcatcatcacgggcctgtgcagtctgtgtcgcggtgtatgtgcgcgttactaccggtttcccctccgctagtaatcaccgattttccccattgtgtcacatgggccttttgctttgtgatacggtcaggtcatagacaaattcacaagagccaaaaaaaaaataaaataaaataagagagagaaagatgggatagtgaaagacgagatggatatrggtgcggtttgaaaaaaaaattaactgcctkgcagcttctcctaaaattaaaaactctctaaatgatttagtttttgtctatattctgataaaatgtaatggtagaatctaaaaaattatatagaaaaaaaaggtggaaaacacagtatttcgctaccaatcagctgcttatcataattttaaactatctaaacaggccgtatgatcatgtatcctcgactgcagatagggcaaacacacatttgcataactccatcagcaagtgattagattagcttaattaataccattttcattagtaggaaagttgattagcttccttaaccaccactgctaagctcagtcacctggctatagaaaaagccaataccggcagctgcctctgactcgtctcctcgttgctcctccctaccctagtcgatctccccttcgcctcgtctccccgtctcctcctcgcgagctcgcccgcccgccgcctgcgccgagcaccgccgatctccaccccggcgagcagtagcggcggccggcgtcctgctgcatcccgccggtgagctcacgtcctcttcctcatttctctccacccgcgccatttctctttgcacttgaccttagcttctcttgtagatgtggaagcttttgtttcggccttaagcttggtactaatggcggtttgtttgcagagaaatttgggggttcagctgaaccctctatgcgcgacgatagatccgcccttggggagtagggaagggaggtgaggtgaggtgaggagataggaggagttgagaaggcgctgattgttgggaggaggaggaggaggagg

SEQ ID NO: 5315 - DNA, 2000 bp, Oryza sativa
tttattttaaaaatctaagttaattctattcctatcatttgattcagcataaaatatacttttatgtatacatatagttttacatatttcacaaaaatttttaaataagacaaacggtcaaacatatttaaaaaagtcaacaacgtcaaatagggaacggaaggaatatatctatagagatcttgctatatactcccttcgtttcgaaatatttgataccattgactttttagcatatgtttgaccgttcgtcttattcaaaaacttttgtaaaatatgtaaaattatatgcctacataaaaatatatttaacaatgaatcaaatgataggaaaataattaatataattacttaaattttttgaataagacaaacggtcaaacatgtgctaaaaaatcaacggcgtcaaacatttcgaaacggagggagtataattaattttgtatatactccctccggtttcattttaattgacgttttagacaatgacacggtctacaagatacatctttgaccttatttttctattataatatatataataaataaatgcatgtttacttttttatagtattttaaaagacaaatctatatatgttgttctagttcctttaaactaaatatttttaaagttattgatagtctaagttataaaagtttgacttcaaccttatctaaaacgttaattaaaccggagggagtactgctagaaaagcattggaacccatacagtgcaatccgaacaagacaaagacacaagaaatactctatatatcttgcatgcatgctgctgtacgcctgttcgatcgtcgtgatcaaatcgactaaacaattcgatcgtatactatatacagacgaacggacggatacatgtcaaattaaatgtcagctgcaattgttaggttgtagccagccctcaatcgtatacatatatactccatccgtttcgaaatatttgaacgccgttgaactttttagcacatgtttaaccgttcgtcttacttaaaaaatttaagtaattattgattcttttcctatcatttaattcattgttaaatatatttttatgtagacataattttatatattttacaaaagtttttgaataagacgaacggtaaaacatgtgctaaaaaatcaacggtgtcaaatatttcgaaacggagggagtatgatgtagtatgtcgcccttgcttggataaacgaaatgaaaaatataaaatcatatgcagactccaattaataaacataaatttgtcagatacgtgtattattgtttcacgtagtacaaaaatcgcaagctcatcgaatggggcttgtcactcacctcatccttccagttgtgttgcatcgcagcaccagcacacaggcagcagtagcacctcgatccatctaccattttatttgctgaaaagttgaattttttttttcttagatttgtacactactttatgtctcacactaggctctatctctctccctggcatgaatgccccaggttgcaggcctcttctttccccaggatttcgttagaaaagccccagtagcacacggattaacaatctccgatttaaagtcagaagagacttggtcactgatatgcgagcccactacttctagacccacatgtcaatgaccacgttagaggtacgtaaaatgacacatgtgcctcttcatacgctctcttctctcctctttctctcgcattgttttgttttgtttttaattttgaagcgaaaagagggagggaggtgcaaagaaaggttaggaaaagggacaggaaaagagggtcactgatttctttatgccccagctgctggagccctgccggcctctaccatctccatatataccacctcactcctccccttagcttaacacaccacacacacccacactggcagcagctcatacacatagctagctcagctgagacacacacacacacagtgagtagttcagctcaaagctagcatcagcagcagagctaattaacaaac

SEQ ID NO: 5316 - DNA, 2000 bp, Oryza sativa
ttgtcgactaatttatagcaaaatcaataggcgtaaaagagatcgactaaaatctcttgacaataaacttcctcaataagaatttgcaatggttccccctccatgaatgaaccatataattaatctttatttggtttcgacaaaccacacatacaaatattgtccataggcgatccaagatattcacttcagatattcggactcgtaacataaagccataatggttcccaacaacaagaatggaagtacactcctatagaagagctatattgatgtttggagactgttagctgactaatcagtgctactacagatatttcacacattataactgggctatatgctgatgggttatcaaggacaatatactggaatggtattttaatttagtgcgtaaatattaaacgaatataaactttttctatcttgtattatactccctcctgttttaaaaaatatatgatgttttgaccatttgtcttactaaaaattttggtacaaattatcatgtctaaagtatctttaataattaaacaagtcataataaaatgaatgatactacatgattttttttaatgagatgaatagttagatgtgttattttcaaaagtcatatatttaggaaatacaagttagtaacattcaacattttgattaatttgtgttgcatagaaaatccacccaccattctaggacatttaacttttctatatctgtgaaaatgatccctcatctttcatcctactcaaagcacagacaccttgacacatacttccaacacgcccatgctggcaagcaatccctctctgtttgctagtagctcagtaccacactgtaagattgaagtagagatgcgcagatggccatcacgcagagtcagcaattactcagcaagaaaaggttcttcctaattaaggttgacttctgaagggccgacaactttctcattttacgttagcatacttctcgatcagctaaaccaaggtttctcaattttttttccaaaaaacgtcatatcaaatctttggacgtacacatacatggatatatagattaaaaaaaaaccaattgcacagtttatatggaaatcgcgagatgaatattttgagcctaattaatccatgattaaccataaagtgctacagtaaaccacatctgctaatgactgattaattagccttaatgaatttgtcttgcggtttccaggcgagttatgaaattaaaatttttcattcgtgtccgaaaacccattccaatatccggtcaaacgtccgatgtgatacctaaaaattttcttttcacgaactaaacaccccccaaaatgatggttcgaatgggccctaaggcttattcaagctattaggctagagcggttagtgactcgaaacacaggagagataatcagggacatgattaattgagtattagtaactaataaactttaaaatagatttatttcggttattaaaagaacttctataagaaaaaaatttatataaaacggactgtttagcaattcgggaaactttttcaacatattctctccgttctaaaaaaataaacgtagaaagagatgtaacatcttctagtatagtaaatctgtactatcctttatctaaatttgttgttttaggagggggttgagtttttttttttgacagagagagtaagggagttgtcgtcccaaaacgtagaaacttactcaacataacactttttggtcagaaaatgccttaaaaactctacagaatagccgggaaaaacggttcagtccaaacacggtagtaagcctgccatagtcaagctcgcctctgctccttcctctgctgcttccccgcgtctccttcttcctccctataaatcatgtcagctagccgttgcattccaccaagcaaccaaccaccaactaactcgccatccaaccacctccaactctagctccatccgcggcttggagctcccttcttacaagtcgatcgatcgagtagtcgacaagcgca

SEQ ID NO: 5317 - DNA, 2000 bp, Oryza sativa
ctgagcccctccgtttcatactatactgctcacgatgagatacagtaaccgcgcgctttgctatagctgcatgttctgctttcgaattcgctgtgcacgacggcgatctctcatctcccgcggctcatcccgcgaggagaaaaaaaagaaggcgaggataaccctgtgacgcatgcgggcaaacatggccacacgtagaaacagtctcgttacttcgttcaccggtgatttttcatttttcatgctttggctgcctcacaggtcgtattctgctcactgttgcatggttaatgtcgaagcaaacggggaggtttgcttttttgtcgagcagtcgttgtcgccccttgccgtcggaagcatggctaattaagccaagatgacagccgtagctagctccgctttgtccctgagtgtttcggaagcattcgctgtccggccacagatacacacacttgaatttgctcatattggttaaaagctggaacgctttttgcaagggtttcaaaaatggaagggaagaagacctccgttgttaccgatccaaataccgtctactagtttattgccggctagaagctagaaacgtgtaacaagtccatctcacagctgtgtaagtgtaggttaggctttggcttttgatccattgatggcgttgaaggttggcaagagaacgttgaaattttaacgagaggcttctaacggtagttgcaacggcccacgtattgttgacattttcgcatttcaacgtctcgagctacaggaacgatagcgtaaactacacttattgagtggtatagacataatcgcacagtgacacacaaacatcacgcacgcaaaatcacggcatattgttccgcagctaggcgctgcaaagacagcaacaatactatactacacagcttcgttaacacgatctttgacggtctctgaaacagtgacagggacagttcagaaggttgaatcctaaacacatcggttttcggagctcaggcaagtctctagcaaaaaaggaaccaaacagaagatgcctagagggaaagcgtatgtgccgcagtgattttcttgttaaatcacactgctaatatggcttgatgttcttaaccgtttaagattagagcctcattatttggcttatgatttatatgccaatattaatatttgaattctaaaacttgattttaaagttgatttaatattatttaaaatgtaatttttatattaacttttaagtcgataaaaacacatatacaaaattttaattataattattttttaactattaatgtgccattatggcttataataagaagtaagcaacaaataagaacatagattattaacccaattattagcacgattatataataaaataaattaacaaatagcctggaataataataatcttaaaaatacagtagaaaaaatgtagtaatgttttgtgagagaacttatttttagatacttgaccaaaataatccagcaaaaaaaccgggcagactgtgagagattagagataagacggcgccacggcggacgccctttccgtcctttttctctcgcgcacacgccgttagacaaccggagcggcgaccagcgcagtcaaacccccccctagccgtccttccccacaccggctcaccgcaccgccgcgaaagcccaaaaacgcaccggagaacccacccaaaaaaaccgtaagggccccaccggtcagcgacaaatctcgcacacgccacggcgccacgtgggaatgttcccccaccctcgtcctcgtcggcccaaggctaaaagctaccgccggctacgcgtccccagcgcctccctcccgtccctttaccgttaccattaccaaactcgtcacagttttaccgctcctctactcatctcctctctctcttctacctcacttcaccaattccttctcctcccatctcccaatcccccaccgcggcgcccaatgcagcacaaaccctagccctccctccccttgatctcgcgcgagc

SEQ ID NO: 5318 - DNA, 558 bp, Oryza sativa
gcctcgcccccggcgcggcacgccgccgccgccggtgtcgccgtcacgccgccgccgccagcgtggctgaaatagagcaagggcaaaatagacttttcaaacctctgttagtcyccgttartgccgaattccatccaaagtggctcacaggtaaacgaaagtttgtgtcatggcatacaggtaactcaaaacttttycgtggcacacacgtaagctccaacttttttaatggcataggggtaaaagactcgtattaagaaccactatgcacaagctgggttctttggtggttaagtatacatctgtcccttcttggctggtacagtgaacccccaacttcatttcacctgccacatgaatcctgaaatgtagcgttgatatgatacagaaagctagtcacctgcaacttacaaatttctaaatcttctgcaacttacaaatttctgaatcttctccaatctgcatgcacacttgaacactatgtaagggtgaagttagctccatctccacaagttcaggcacaactgcaaagtgcaaggtcaggtcagctcatcatca

SEQ ID NO: 5319 - DNA, 2000 bp, Oryza sativa
gtgtttgaccattcgtcgtctattcaaaaaatttaagtaattatttattcttttcatatcatttgattcattattaaatatattttcatgcacacatatagttttacatatttcataaaattttttgaataagacgaacggttaaacatgtgctaaaaagtcaacggtgtcaaacattttaaaatggagggagtattatagataactattgtatgaattatctattaaattgactagtattaaattgactagtagttgacttgttcttagtactactagaactagaactagtcacttgagctggttttggggtcaagtgcaaattgtcggataaaaaaagggagaacattttcattatccaacagcgtatccccccttcaatttagcttggttatgctctgcactctgcactccaaattgttgctcttttggtcttctccttaatacaaaagatattcgtgtttttctgtattcacaagaaataatttttaccgttctgtcacagtttacattttaaattgccacacggcttcgaccatcacagaggaaacatgtaaatatgttttggcctgcagatcttggtgtttagtaactagtagtcctcgttggattgaattttgggaacagctatgtagtctattggtatatatcccaggttctgaatcgacgtttcacgaagagacttgtgaactgccagtgtagtgtagagtgattttttcgaaaaaaaaaaactctcaattcctttttacttgttatcgttgactcgtactatcactaataattcttaagatctttcaataaagatggcatctcatggtcgcgcgaacgcgcaactccgagtggctaagtacatatggaacaaattcaccaaacgtccctcaactttagatcgagtttgtatgacatctctaatctctaataccaaaaatctttacccctaaactatacaaaaccgtgcataaaggaacactttacactatacccatatactagattcccagttaatcatagaaatcttcttgttctttcgttcaaggaaaacaatctccttattatctcagaataaaataataataagacgatttcttctcatatatatatgatttgcatctgtgatcatattaggttgtgtttagattggtccaaagtttgaaatttggttgaaattggagacgatatgactgaaaagttgtgtgcgtataaaaggtttgatgtgatggatagttagaagtttgaaaaaaaaaactttagaactaaacacaccatgagggaaatcaaatcaaatactacgtactgtatttcgtttatttaaagattagagacattgcttcgttggactaaaaaaatcatgagagatcgattgcttcattagctcaaagtttcaaacccacacgaaaaaactcccaaagtaaataaaaaaacgaataaagaaaaaaaccgacacgaacggattccacgtcacaatcctcatccaatcctctcacatcgtaaagcgtgcgatagaaagtccgcggatcgacacgtcatcatgacgagcaaacgaagctcgacacgcaccgtttatctctcccatcctttcctattaacccaatgacatgtgggaccagaaaatgcaaaggaggttgtggccccacctgtcagtgagatagtgggtcacgagaaggtagttagtcaaagaaaggtaagccttatctacacatcaccatctgcttgttgccacgtcaccccatatctcctctcgcttccttgccttcgctgtcttaacagtaccaaaattaccaaaaaaacgcccacagatttcttcattattacacagatttcctcagaattcggaggttaggggcatatatgaaaatattagttttgttaggggtcaatctgtgagagaggtcaaccttttgtgcccataaaaaagcaacgtcctaacgtaacggcaacgaccaccgcttcgctttccgtcgcgcgcgcgtttcgtcgaacaccacgccggcgaccacgac

SEQ ID NO: 5320 - DNA, 2000 bp, Oryza sativa
actaaacccctyatgcaaaaaaaaaaacaaagcgataaattgacgtatgatcaattaaatatcattatctaaacacacttaaaaaaataatgtgcttttaaagcaactttttwatattycttttttccaaaaacatgtaatctgtcagtttaggaagcgtgtatgcaggaaactgagtgagtggatgttgggacttgggaacctcactagacaactcggccttagagcaagcagtaaagtactataagctgactgggtaggctccaatatatgtcacatcatttaattcatatgtggaagagagagaactaagtgggcgcttattttaccgcccgagtccagtgtagtttttcacgtgctacttgatagcagattgcttttggtgataatataacacgttttgtggggccaacccaatatcatccaatctcgtgagggatcgtgctagtaaagtaagattgaaaaaataagagtaaattacacccacgatacaagaaattggtaggtgcgtgcgatttagtgcaagaacttaararatgagtagactggtacataaacttgataatcatgtgcattttagtcaaaaacatttacacatatcttttattaatcctagtattataagcttaacagctactccctccattttacgttataagacgttttgacttacttcaaatttaactaactttatacataaatatagtaatatttataataccaaattagtttcattaaatcaataattgaatatattttcataataattttgtgtttagttgaaaatattattatctttttctacaaatttggtcaacttgaatcagtttgacttcaaccaaagtcaaaacgtcttataacctgaaacatagggagtagatcattggctcatggattcaattttgtgtctttgccatgttcataacctgaggtaatggatatgtcgattaatcgaatcgtttagaaattatgttatctgcatacacttacttttgataatcatatatctttcagtttcaaaatgactgattattttattattataactaacaaattaaaaaacaatgtagatccttatcgagatgacatgagtggctgctttgtttatatggcataaaagtattgtgtggaatattgatctttcaaccaaaatacacacggtagccaagtttttttttttactgaacgcactagccaagttgtgcacctatatgcttatttttcacgttttttactagatcgcacccacctatcaagttcatgtactgtagacgtataaattactttaaaaaaaaaagaaaaccagcaccggaagttgtgtatgattagtgtgcaacatattgctgtaggctgacatggtccgttttaccgtcggcacttaactgtattactgatcttgctcttaggttgcggcgagatcaaaagttatacttccattttgtaaagaaaggataattgccaaaaaaaaagaaaaggaagataatatcggatggtcacctgggccgacgtatgttcatcggagagtccgtcagccttgtcaaaggcccggccccacgcagttccgaacttcactgatgggttgaacttgaaccctcaagcccactagtttcggccgtgacttttcctctcaaaaaagagaaattaaaaaaaaaaagttktgccgtgactgcagtccaccggcgtccccgggcctcgcgggcggccggccgcagcgcagggcggttcggccgcgcgccgcgggcagccacccgccgcagcgcgaccgctcgcggacggatcccctcccctcccctaatytcgccatgcctttccccaccaccaacggccccccggggccttcccggccccgccctcaccctagccagcgccacgccgccagtagcggtagcattagccgtagaggaaggctaggacgcataggaagaacaggaggaggaggagggaggaggaggagaggtggggggtaggaggacggaggaggaggaggcaggctgcccgcg

SEQ ID NO: 5321 - DNA, 169 bp, Oryza sativa
aawttttttgggggcccccaaaggggccyccgggggaatccgaagttcctskaagawtycccttttaaggtccatggggkgaaagcgsccatgtkggggkaaattkgccgsctttgcggcgaaaagytyaaggtgggccgcggggtaatccgcggcggcgcggtcgcgg

SEQ ID NO: 5322 - DNA, 2000 bp, Oryza sativa
cagactggcgatgatgagagtgatgaagaggtatttcctgcgtttaattgttgatcctacttatcatgattccatgatctgacttatcaatcctgtcatagcttggaattaatttgtttgtatcggataatcttcaacttcaggatgaagattttgtggcggacaaggacgacagtggatctcctactgatgattctggagaggagggttctgacgctagtttaagtggaggagaaaaggaggtaactcattttactcacgcaatatccctgatcagtgtctataatgaatacatcatgctaatcaacattactattccccccctccaaagaaatcttccaaaaaggaagctagtagctcaaaggcgcctttgaagaagaggaagccaaagggtggggatgcggcggaaggctcggagaaaagaaagccaaagaaaaagaaggatcctaatgcccctaaaagagcaattgcaccattcatgtacttctcaaaagctgagcgagctgtaagttcctttccaccctgcactactgtacagaaattccctgactaatcctatgtgaaacattgtgggaggatctctctctctctctctctctcacacacacargcaaagaagggagcttacgatcgtttttcccaaatgcagaatctgaagaacagcaatccggagctggctaccacagagattgcgaagaagcttggggagaggtggcaaaagatgacaggtaacattctttgatctctatgctcgacaatgtccatgctggtcggtcaagtcctccgagacctccgtttgaaccatgtccgcttcgtgtaacttgcagccgaggagaagcagccatacgtcgagcagtctcaagttgacaagaagcgctacgcggaggagtcagccgcctaccgcggggcggctgccatggatgtggactccggccctgcttcggactgaagagaagagacctgaattgcattccagattacccttagtctaggagggcgacagacaggatacggctagtggcatctctatttccatgtaaataaaacttatgagttatctggatgtaaataaaactatcgtaggtatctttcgagtcccgttctatgagtgtcttatcgctttatcttagctatatatatagatagcagctatagtatagtagagttcttcccgccatttatgctggccggataacttaccttcacctatgtagcagcaataagcatgcttatctgcttagttaaattataaatgcgtgttctagctggagaatcacctctgttgtgttgagcttgtggagttgcctgtgcataacttgttcgggattaattcacatatacttgctaggtttaaaatcatgggtaaatacatttatgaaaacaagcgtatcagtagaaaatttgaagagttaacgagacttgtccttagacaatgtgtacttggacttctgccaaggagcatactctcacggttgtttgcgggagtttcctggaatcgaaagtaataagcatatactgtaaacatagagagattatgaatgcaaacacattcaagtggatatcagtgtatattttggtaccgatgattcttttttttggggacagtgcccccctctattgccatcggagtgggtaacgttgtgggccgagatctccctccattcccggcccatgaaaggccttgttaaactagaccgaccaacccaacccattactccgcttggaatggattcgtgttcgttttacctccgcagattgcggcgaccggcacagcgactccatccgaccacccctcctgccactgacatgtgggcccaactcaaccatttccgccccctctctctccctccttccccaaatcagctagagtggtcggctcgacccctcctccacgcctccgcctccgcctccgcctccacgacgtagcccagggcggctagggttcggtttcctccgccgccgccgccacctcctcctcctcctcgtgcgcggcggcgacc

SEQ ID NO: 5323 - DNA, 2000 bp, Oryza sativa
tgtaatgggagataaccgaaacaacagttatgattcacatgtgtggtaatactctctgctgattttcccatgttacttactattaacttgttttgtatcttaattgaattggcctgtacaatactgctattattttcctcaggggccctcttccttctaagaacatattggggagatccattttccggtattggcctcctggccgaatagggagcactactactgattgcctcatccctgagacaaatccaagctcgcttattgatgtcaaactggcaaagtagaagttcaggcattgattattgcagtgtgaagtttgcgcttcatgtaagctcctattctttaatattccctctctcctggaaattcggaggaatatttgacagcaggccacgtagaaattagaaaggagaacacatttggttctccttgatgtcacaaagaatgctagcaactagcatgagcatagaaaccattttgtttcaaggtttctgcgactctcgctctttgttgtatattaagactgtaaggatgttgccttagtgattcgcatcaaatgattcttcttgtacatcacgttttgtagcaccacgtgtgtatcatcctcatacagtgcttgacaaaagatgtgtaacgcgttgagccggcagttcacttcattgccttacatgttgctaatgctgacagattcttcagaattcaagttactgccatccttttggtctgtatgaacaattgctcccccgtgtcggtgtactcatggatggcatataaatatttaggtttaaagaagtggattgaaaaatatatattggttatcaacaatacaatttcccaaactatatatgatgattctatgagcagggatcctgcatatttttcagacgggagaaatctgaaatctgtgcaacctatatatatatcaatccatccacgcggcacgtcccttcaatatcaacacggtggcgtgcacaatacacagtcgcacagaagaataacaaacaaattggtgggtgttagtttccctctactgactgaaatcgcttgcttgctttagtttagtcgcgttggcatggaagtaaaacccatatttagtcagattagattccctcctcacgcagcaattggcaaatgcttggttggttcgcaaacgcactactaagagtgaataaacagtcactgcaacatggcccagcagcaaattaagcaggataaggccatcatttcgatccaaaccggccaaccaagcaagaaaaccagcaacacgtctcgatgtcatcacatgtacatgatctccagcgatatagagcgcgcgcggcgacgagtcacgactgcaatttgcgacgcaagaaacctcctccctttagatcgcggcaacacatacgttatctctgacaaacaaccgtgaaaagaataatggccgtttcggtagatcgatctccaattgacgatcgaattgggaagaagcacctctaaccttactgctccctctgatgtggtgttcactgatatatagactcacaagctatggaaccgatatgccaaccactcaaaaacagagaaaagtaaattagagattcatgagctgtgaaaaataattaagggccgttttctagctgtcctattcatggatatgatcaattggtaagtgcctgcaggcacctagccagagactatcccgccgtattatttcgaccaaattctccaagcaaacatgggaagatagatacgtactcctacgcgtgtgccgtggccgtacgtacgtgtgcctgcatcttcaccgcaagtcatgcacatgcgcatgtgcttcatcctagcctacgttgctgttcccgctcgccacacactttcgcctttctgacttacacgcgcgtatatatacacgcagcacgtctgcaccggccgtttcaccattcctcgaacaccatcatccacaaacacacaagtacatctcgatcgaagctagctagactagagcacgcacacgtacgatctcgtcc

SEQ ID NO: 5324 - DNA, 1860 bp, Oryza sativa
aaaggcccytaaccccaattcccaagggggggggggcagagggggagagtacgtggcggcggaggaggacgccggaggaggaggtggacgaggcggcgaggatgtggcgcgcgccgagcgccgccgcgcgtcgcatcgccatcgccatcgccatggtggtgggggtggagagttcgcgaggaagacgacgaggcgggtggcgatcggaccacctgttctgttcggatcagtggcgctttgtgccgtagtattaaattattatatgggggagattttgtaaatctttttgtataaagtttgagtttttgagctggtaaattttggaattatttagtactccacgtcattcaaatttcaagtgatcaaataatttgggaaattggaagatgatggaaagatttactcctatttatgttgttaggctctctctctctctctctctctcgctcgctcgtttgaagcagtatgaacttggagaaattttgctctgtttcatttgaccaaagctttatactcgaaattgattgatctttggaagaagtttagtacgacacgaggtgacgagggaggaaataaatttgggccatcctttagtgggcttcatggattagaagagttgggccgaaaaaaaacggggccaagatataccgaacatgacaatatgggcctttggtatgtccagtccacaatatcagatccatggacttttgggctgattgtgcgggttgtccttactttctttggaatggaatcaatatcattttccttcaatatcgttctctattattaattgaagatgttttcatcggtattttggtatgtcatccgtgtatgagtcggtttttaaatttttgtatttttgaaaatacatatctatatttgagtcgtttttaagatcgttcacttttggtaatacagaaggaatcatataagaatctcgcatgctaacttaagacgatcggactcctaactgtagctcataattttctaaaaatatataacaataatacgattaaaatagactttacccattacaacgcacgggtattttttaagtaacttaaaacataaaaaagagaagatcgaacatataatgtatagagataataaattaactaagtataatatgtctatttatgtctatgcaaattcccgagacacaatatcaatgtcaggttaggcactggtatacccactaaggctgtgttcgctggagcgggttcctaactggaacgcgcacgaaaaacggaacggtccattaacacatgattaattaagtattagctatttttttcaaaaatggattaatatgatttttttaagcaactttcatatagaaactttttttcaaaaaaatgcatcgtttagcagtttgaaaagcgtgcgcgcggaaaataagggagataattgggaaacctggggtaagaacaagaacacagtctaactctacaaatttatgtgttaaatattatgtagtatgtttgcaaacaactttttaagaataaagatattctcaagtctataactgaaaaaaattataagaaagtccattgaaaagtataagccatgtagttgtcaatttataatctgtaaaatacttggtcattgagggcctccggatctactaaattcatgtttggcgtcactttaacccacctaaatgtgcattcttcttatgccagctctctctcactattttatcttctcaatttttctttctttcttgccaccggtccaccaattgaaacgtactacattagaaaagtaatttagatccatcatatttgtctaaacgtgttctaagtcgatgttgacaactccacttcatttcaggtttcaccgcacttgcttttgttaatc

SEQ ID NO: 5325 - DNA, 2000 bp, Oryza sativa
cccaagctgatgcacatgccagggccaacaagcgtatgtaaactattctcaactgtatgaaatattaattctctattcgcacgaaaaacgagaattaattaattaatgtggcgtgaaacacgtgctccatttgctttttccattctgcagattggaccgtggcggttggaatttgccatttctgggaagttgcgagagtatacgttgtactactcctactacaacaacatatacacgacactggccggaacaacaagtagcactgtctgcatctgaagtctgctagatttccatgcttacgtatttgtcaaaagtcaagtgtgctggctgtgtgcaagtactaataatctactaccagtattcctgatcgcatttttttctttgttgtgtatgcatgtagtccatcgatcgcccgctgtttggtcagtaatataatctactctttggaactgaaaagtatgtactcaatttaaattttgtactagcgcccgtgtgcacgttgtttcatgggcgcaaaacttgacctgcgcctaataaagcaaagactgatgaaaaaactgtttgcgcctttctacacgcaacgcgatcacagcgatttgatttgtcgtaccgtaactaattttgtgcttgatctctgttcatcacttcagtagggtgctgattttttttaaccagctgtacgtacttatggatgcatataattaagctacaggagtaaccgaacttttctaagcaatagaaaattttgtggaaaaaaaaagattagacacctggaaacaatacattcctttgcatggtgcggtgtatagtggtggtgtattgcaggtgatttgcatgagatcgacagagcaaggtacattgcacgctgctgtcttcctgataggatcgttttcttcacgttattgaaatacggcgcatccggcgtaattcctctgtcctaagaaaaaacaagatactttttctagtataacaaattggataagaaaaactctcatcaatactagattggtcttttgtgaattccctccatccacagaaaaatgaatctagctaggattggatatgatacattcatattcatagtattagtccgataatatgttgttttttataggacagagggaatatgtattatcatatcttgtgcaaaaaacaaaaagtagtagtctagtctagcatccaccgttccacacgatacggactcatcgtttcgcttattcgtcgaataagtcaaacggtatatttgtaaacgaaaaataatttgtgaataaaacttttatatatgtgtttttagcgatctaaaatcaaagattaaaaaataaacttcgatgaaaaaaatctcaaatccagttctaaattcaagattaaaaatttaaattttaactgataaatataagtataagcgaaaagataagaccttatatgcaactggccgcctacttggcaaacagaaagtacaggttcatcccactgcctgcctacttggcgcatgcccaggtcaggtgggtcgaccgtcgacgccagccaagtactcacgtcgcgtgcgagcaaatcgagctgcccacaccaaaaccacgcccgttttttwattttcaaccgtcttttgcaagttgcgcccgcgcgaaccaacgtagcaacaacatacggccgctgcgtttgcgtgccgctgaccactggactaaaagccagcccacacaggcagaggcagccgcatgtttgctttgactacgcacacgtacacgacttgttcactgccatatgcctctccccaaacgtgcgtgcggcgtcgcgtcgctctcgatcggtttgatttctctccatccctaactatatatgcgccaccgcgtgcgaggctagctcatcatccatccatctccctgcagctacgtactgtacttgttagcaatcaatcccatcaaatcatccaccgctcgctgctgctgctacgtactatacagcttgattaattaggttttacgacgacggcaacggggacagat

SEQ ID NO: 5326 - DNA, 2000 bp, Oryza sativa
acacaaaacaaacatattattaaaatatataatgcaactttagatttaataaaattaatttgatcttttagacgttggtattttttttaaaaaaaatgatcaaactttaaaaaataatttactaggaaaaaaatcaaaaataactgataatataaaaatgaagagtgaagtgcatgggcggtctctaaatttgttcaggtgtgtcactaaggtctctgaactctcaaaataaatttttgagtctctcaacttgtcttatgtatcatataagtccaaatgagctctaacccgctttgtgagaagacgtggaataccacagtgatggttacgtgtcagtgggatccacatgtcagacacatagaaaaaaatgaaatttaaaaagagaggagggagagagagagagaggagaaaatgatgtttttaaatttgaaaaataaatgaaaaaggaaaggagaaaaaaaatatgttcttaatttttttctatatgtgactgacatatgggatctactgacacataggcatcacgatggcatgccacgtcagcacacgtagagggttggagcccatttagacccacatgacacccgagataagtacgacggatccaaaaatacattttaagagtttatggacgtaggtgacacacccgtacaagtttatggaccacccatgcactttagtctaaagttttttttgagaggaactttactctaaagtgaacagagtatatcgcaagttattttggttttgacttttgcggatagctcaattccaatgatttatggattaaccacgcaaaacttcaaagtacggcagaatgattccgaaggtaaaaatgactggtcatacatttctaatcagtaataagacatcaaaactcaatttaaatggcacgtgccagttagtggcgacgcatgtttttcttatgtaaattatcagagggtatagacgtttgactaaattagcatgcttgctattcgtatgctgccgaagggaaactcttagcattggaattcagggcacagaaagcagtacatcaccgaagaattcgaattaggagggctcctcaggattggaatggttacattcgtttcatttatccgttgaatctctttatggatcgctccaaagtgtaaatagaccaaatcgaatcaaaccattgaaaccattcgattcaaaatgactcacatgtataaatgatttaaattgtatatatacttgcttctctgtatacaaaatttaactaaatctagcaagttatatattataaacgtgagtttaaaaattttgagtccaagttttacatacatgcatgtactatgaattcttgacctattagtaatgcttaaggatcccaaatgtataaatggctcaaatttttacaaagttatttttcattataacaaatcatccttaaaagaattaactgaatttgacaagtttttataatagtgtaaaagtgagtttaaaaatttttagtcagagttttgcacacatgtaatatgaatttctcggtttataaataatgcaactcatccatttgaacatcgatgaataacctataaatataataactcatggtggattaaacatataaaacaatatggatcaagaaactccatagaaatggtttaggttagatccatatcttaaccgttccggacaaaaatcaccatcactatattataaattcattgtccggcccgacacaacaggatgcattcatggatgcgtgcatgcatctctttcaaggttcacgtccgccctcgtgctactttgacccatgactacttctctctcacgcctttcttcgtccatgcatctacggatctaccaactctgccacacaaatatatatacaaacaagcattgatgcatgtattatatatatgttcgatcactcccacacaattctccaaaccaagagcacataacgtatccagggcagagcagcatatcgatcttagaattagctttcagttcacgcgcatcatacaaaa

SEQ ID NO: 5327 - DNA, 2000 bp, Oryza sativa
  misc_feature (1)...(2000): n = A,T,C or G
cgarcgggcgaagcggcggctggacgarccgggcgctgggckcggccgcaaccaagccagtggcgagctgggcgcggcggsggctgggcgagcgggcgcggcagcgagtgggcgagccggccggcgaggcggcgaaccgggcgcggcggcggcccagatgacgacgtcgacgaggaggacccagatgacgacatcgacgaggtagcggttcggcagcgagccgagcgcggcggcggcagcgagcgaccgattcgtttttnttatttttggtatttttgattccgtgcggacgtgtttgaaagcacagtctttgtcataaatcgatcaccctccgctccaaatggctctatttttctcctagaaagttcccgaaaccaagtttatcagcttaaaactgaagaatctactcacaattttaatgtagaactgaagaagcacaatttcctttaatgacgaggaccgtttctttcctcactctccaggtgagatagctgatacgcccaacattggcctaaaagatgtcgccggggatcggttgaagctacactcttgctctgcctcggtctcccgtaacccgaaaaggttggttcttcccctacaacccctacctcttcatctgttgacgaatagaggacgacaaagatctctctcgcaaagaagcaagaaatgtaagaatgaaacaaggccatggaaagtccgaatatcgtggatggacgttggaatcggccagctggtaatggcttcgatcttcgtggggtcagtcttgatcgagatgctctgtatgaagttcttgaatttgaaactgcctgcaagctggtattaatctcaatgagagagacttgttggtcaataccgaaagaacctacttatggtggtaccaccgtttccggttcggccagggggcttcgaagagtgaataagttcgcagtgatgtgtaattcaatatccttaccacgcttagaataaaatacaaagaaagatagaagggtataacacaaccgcacgggataatcgattatcccgtgtggttggaccgcccgcatgcgaaaatgcttattttcccagacgattggctccaggcggaccggacaaccgcacggaaaaatcaaaatgcccgtttggaaaaatcttgaaagtagtagtgcttagtgagccatatgcgaaaataaagctcgatttttgcagatggactagatacggtgtggttgtaatctataggggtccttgtatagaaatatcgttttattaagtatttagaacatgattttccaatcgaaaataatatagatacgacgttgttgttcgaccccagtgtatgatcaaagcaacgataaaaacctcacaaacgatacatgatttaggccgtgatgaatcttggcatgcgtctattagctgtgcccacgccgtaacacggtcggacaacaatcggatggcatcgttgtacgttcagcaaggttcgattcaaatatatacttgaccacgaggtgaacccgttatcataacttttgtcaaatcccgttgcaatgcacgggcctgcccctctgctagtaatattagagaaaggtactagaaaaacatacgtattataacacaaaacacatatgaagcgcactctaccacgcaaccaagaagcgacattaataacaacaacaacgttatttctaacacttgacccctgtgtgtcggtggccgggcgccccgtcgcactccggtcgacgtcgacggtcgtcatccgacgggatcgtaatccacaacttacggcaagctagtccggccggtggagcatgcacccagctgctgatctcgccggtcaaacgttgagctcgcacgtacgacgtcgcacctcgaagaacgtacggacctccgtgaagcgactccctcaccaatcattcgcctctactatataaaccccatggcctcctcgctgaagctcacagcctcctcgatcacacacatctcctctaaagcagctcacagctcaagagaaggagagggcaaca

SEQ ID NO: 5328 - DNA, 2000 bp, Oryza sativa
gcaacactaacactaaggttcgttcttttctgataaataagatgcatattctacccctgattttcgttagcatgcttttttaatactattaaacgatatatttcgtgtgaactttctatatataaattgctctaaaatattagataaattcacattttaagtttataataattaaaactcagttaattatacgttaatgttttttattatgccataacttcgctttcattcaattaggttgtgctttgagatacacttgatagtgtggtggcaagggatgcgtggtttcaactctgattttccgtgttcaatttccaacgcactcacaatttcttcttataaaaatgtttggagggacgtttctcccttcaaatctccttttttttaattaggttttgcttttttatgggttattagcacataattaattaattattggttcaattttttttagattaatatgttttaaagcaactttttctatataaaactttttttaaaaaatgcattgtttagcagtttaggaaaacgtgtgcacgaaaaacgagaaagtgaaggttagaaacctcaacataagaactcggccttagatactaacaccgcctaacatagaacaactcatggaatagatatgaacgaagcatttagaacggatctagctcttttttttcgcattgggatctctaggttgaagaataaggtggtttttggatccagagactaaatttgtgttcttgtcacattggatgtttggacactaattagaagtattaaacgtagactaataataaaactaactgcataaatgagagctaattcgcgaggcaaattttttaagcctaattaatccataattagcacatgtttattgtagcatcatataggctaatcatggattaattaggctcaatagattcgtctcgcgaattagtccaggattatggaatgggttttgtcattagtctacgtttaatatttctaattagtatctaaacatcggatgtgatagggactaaattttagtctctggatccaaacagtcactaaggcctgttgcctgctctagtctgattcaactttcaacccaaaaagaatagaacagtaaaataaaatttaagtacccaagccaaatcccagaagaccgggacaatcagggattgtatggtttgaagctgattttggccctgccaatattttgctagtgccaaaatcttggcactactaaatttagtagtatagaatttatgctaatgtgcgtaaaaattgattttaaaccaaatattaagacagtacttttgaagttatcaaattttcagtaggactaaaatcagcttcaattcaaacatggcctcaatccatccccgaaaagatgggagatgcatgtaacttagactgtaaattcacatttttcgtatatgaagcattattaaatataagatgcgtaacttggagtactatacattccattatcttaaaaaaaaacacacacaacattgtgtgtttccataggcaaaataataattttcttctctacctgcattaatttggttttgttttaagtgagacgagatgtcacaagtatacttcttgccgttcaaacttttgagactattgtgaacaatgacaatgtccttgtgcaatctatatcggtcatgacgtcgtgtgtgtcgcattgtacatgattatttatgtttcaagaaaattttagacgttagtcattattcaagtcagagttctctaggccaatgatgtgagagaacgacaagctgggaatcaaataattacgtttgctgaagtattgcattaaccaggctaaaatttgtcttagtcgttaacgatgagaccccggccaagctggagtataccaaccaacactagaataacagtacacgctagtagtatatatgtgcagtgcctgcaatcggagaggctgcatctcgtacaccgctgcatctcgtttccaccagccgatcgatcgacgaacgacgacgtacgacgac

SEQ ID NO: 5329 - DNA, 2000 bp, Oryza sativa
tctcctctttcttggagcaaaagaggtaaaaaaattaaatccaataacaccaacaaggagcccgaagcgaggagagagagagagatggcgctcgcaatcctggcgaggaggcgggcggcggaggcgctgctgcggcggccgctgggggcgcsggggtttcggcgctgagggcgtcgtacgcggcggtggcgggggaggagagcgacgtggtggtggtgggcggcgggccgggagggtacgtggcggcgatcaaggcggcgcagctggggctcaagaccacctgcatcgagaagaggggcaccctcggcgggacatgcctcaacgtcggctgcatcccctccaaggtgaccacgacgatgctctccccctcgtccctccccctctttttcgatctcctctctactgtcttgcgggttcggttgaggtggatgcgattttagatctacgttttccaaccttattatttcgggttgattgatggtatctgctggtagggcgagttgttgcgatgcgcgttgaattgaaattctggtcgtgcggaggatacgcgtaatttcgaggagcattttgcgctgtgtggttagatttgagttcccttgttaatattttggcatgaatggtctgcatatgtgtgacatctgatgtaatttggtgtttcaaatttactgtcaagcatttgaattatagaggagtaatgccttttgtgcaatatgctgcataattgtagtcttttggattcttaatcttgtacccgtccatttgaaaattcctggaagacacctttcctagagtgttgttaaaattctgccaactcgatggttgggtggttgccatccatctaataaacaaaataatcctaaattgatggcacagcatcgtcctaatctgataaacaaaataatcttaaattggttaactggtgtaaaccaataggattaacacaactgatgtgttatggctcaacagatcgttactaatcaacaggtgctgcatatttcgttttcatatggtggcacgagtccttactgtatttgaacttttcttcttggcatcattttggactttgtttgatgccgtgggctattttgaactgcagtttggttgccccgaggtgtcattatcatgatactttgtaccgtagttatattgcatccagttaacagttagtttcttaattgtcctttttcttgagacttgtttctttactgttttatgctatgcgtgagactatcccttgcacacatattatgctatacgtaactaacttttgagcttttaacagttctgcgcctttgaccttttctaccatgtctatgagagtttgcacttggttaaattcctattcacttagataactattatttgtttgtttgcaatgaatccaagtggatctaagttcacctgtattacattgcagtatagtgttatcagataagttcttttggcaccagaatactgttcctgtgctaaaagttgttgatctctcactttctgtgtgatcaggaactaagcaaacttatcccatcctccatatagttccattatttggtttgggctctttcaatgcttttctttggttcattatgaaagtagatgcttgttttatttttatacatacgtgctgagcatcttcatgtgggactaaacatcttgcttcttatagctcgatataagagttatgctgtccttggagtcttggaccattctccatgtagaggaatattttcttttctggatataagatgaacacttctatcaaagatctaaactaatcactatagttattttatatgctttactgcagatacataagtacataactattcgcattggtgacctgtctcgatagatgtgcttttttgggaacacttctaacttacacccatgcttctaatctccaggctctgttgcactcatctcatatgtaccatgaagcaaaaagttcctttgcacaccatggagtgaaattttccaatctggaggtagacctcccagctatg

SEQ ID NO: 5330 - DNA, 1008 bp, Oryza sativa
atttatatttatatatttaaaatagaatcaaaactgtagatccaagaaggatatcggtaatatcattatattagaaacaggatcggtggaacgaaatctatcaatattggtcaaaaatcaaaaattcatgtcgaaaacaatggagtatggtatagtcacacatttaactatgcatgaagatgactttttaacttcattcttacattgtcacactccacataacaccgttacataatgattaatgatatgataataagttagacgcacaatataaataaagttcaataatacttcaacatcgataagttcaggagaccaaaatttagcaaagtccaagtgccacatcctagggctaggagcgttttccccttgaccacttctccttcctaataggctacaaacctgttagactttcttcatttatgggttcccgatgggtagggctggctaagccgttaaagaatttttgaaattttaatgaaaattatcggacaaatacgactaccgataaaatggtcggaaaaacctccatcccatttccgctaccatttacaaaagatattaacattaactgcagctagaaatcttgtaaatttctgtaccattttcacccctcacaccgacgcaccatatttgcttctaatccacgatgcatccatccatcccatcaaccgtcgtttttcatcaccagtatgaaaagggaaaaaaattgcattatcacacacttaattgttagtcttttaataaccttgattaacctaggactagccactaacccaaacatttcctttcctggtaagctcactgctcacccgtgtacgctgacgttcgctgcattccattatcctttttaaggattcgttcggcaaccgaaacgaaaggaggagagcccgagacgaaagcaaagcaagcgagcgccgccctcactcctctcacacactgcaccacacgcctaaccaaccacgcgaacgaagcgcgcgcgcgctgacgtcatcctcctccgccgcc

SEQ ID NO: 5331 - DNA, 2000 bp, Oryza sativa
ctgagtctgttttcctcttgcctggcctgagcaaacacgtaatgtcattagcctgaaccaggcgaccaaaatcggtcgcctgagctccaggcgcagtatcgctaagaaaaaacgggcggcggcgtcgcgcgaagacccccaccgccaccatttttgcctccgacgccggcgtgtgagtcatcaccaacatgctaaacccaccgctacgtaaagcatctcgccccctgccgctgggctaagccctcgatgctgtcgtctcaaaggatttcacgcacgaagcagtccggccgccttgctagatctgcagcctcgagaagatgccaccatggctgctagcatttgattcgttgatagtaagtgctctgcgtgtgtctgagagaaatatcattgattgaatcgctttacatggctgggagaaatcatggaatatttaatttggtgcatgcttggatttgaggatttctttcttatttctctttcccctttttccccattttttccccatggatttcagttgtcttctatgatttgtgtctgcaattagcatctacactaatcatctcaatttctcaagaccaaccgtattggctctaacatcagtattagcagtaataatctcaagcccaacatcagtttttcctctcaggcaggagtggcaaaccaaacaaggaaagcatcaggcggcctggccaggcaagcttcatgagcatctcgaatgcctctcaggcatacaaatttctcaggcttggtgctcagggtagcaaccaaacagaccctctgtgttctcacagctagctcaatcagatcatcaagccatcattatgattatttctgttaaatatcgaactgcatacataaaccaatagaatgtcggattgggggttttctcttattagaactccattgattcgcaggataggaaaaatatatgaattgaaatggtatgattctccaattccacaagaatataaaaaacacaggaaagaagataggaactatttgatagtgccataggaaaaacaaatgaaagtttacaaagagctcatactctcttactgttttttcctatgaaatgcgaaacatagtaatgcaattctatgtaaagtttcctttctttccctacaaatcaaagtgacagagaggaaaaaattcataggaatttgaatgctgcgaaaatcctttgccgatcctatgaatcaaaggacccttataaaaaaggggacttcggtaaagcaaactctctacctcctttagcacatgcttagttaagttagaaatgagttgtactgcttggatgctccgatcgaaaacaaaatagtggagccatgccagtatgatcaagtatgagttagaaggtcaaaaagaaaaagttccgaacttcaacaaaaaagtagccttagcctggcgcaggaatggggctaaacgcatttctttgaatctaaggtgttatggaatcaattaatccttttcaatatcgggatacatggatggatatatctttatccatatatctttcacaatcaatcacaaatacttaatttggtcacgaaacaaagcaccgctttgcccaaggaagtgaaggtagagccaagtgccgtgtggtgtggtgtatgcacttctaggcccttcccgtgtactagatcacccagtgcttcgtgtactacaaaccctctgccatctattatagtagggctatttcatcaattatctatttgcattaaacttatttttacttagctatgttcactagtttgtttttttcttttcacaacttaaaaatgtttctttattgtaaaaatattatggccaaaacatttttgacgtagaggttggttttatatccatcattgagaaaacatatatttcccacaatttaacacatttaccatatcctttgaagcagatatgaacaaaatctacctggtgtggatatctttgtatgcactgcggatccacaatcagagccaccaagccttgtcatctctaccatcctatcagtt

SEQ ID NO: 5332 - DNA, 1019 bp, Oryza sativa
  misc_feature (1)...(1019): n = A,T,C or G
cntgacayggcgcagcttacgcgcaygcgcgcgcggcgcgcgggcagagcggcgaagagggagagagagagagagagagcgccggggagggagggggatatttnccgagagagattnggcccatttgaccccgggggaggcaaaatagacttttgcggagggattttgattttggaaggatttggattcggaaatgagctcgacgatagatcggggatttgagatctgaggtggcacggacactagactacaagaaaagaaacaaatttcgcaattagggtttttaagagataattttcccgctaggcgcgacgacggaacgggcgctacaactatattatgaggatctaatttaattcggttttacaagttggagcttaaaatttctggtattgtaatttaggaatgtcaattaaactcaatgtttagatgacaaacgacaagtagacttaagctgctcatttacgctgctgcaatgaaggcccgaatttcatcaaagggcctcatagactgatcttgggttcaatacaaaaggcccatgtggagactgaaacccaacgtagccggaggcgcacgcacgccgtggccggagctgcatgagacgactggtgatctgaatgaatgccggctatttaagtcaacaaatctgctattcaagtccacaaattaacaacctgtcatgcaaatgatcaccaaatccgtaattatgtccaaaaacacacctcgtatcacggaaatcaccaaatatatgctactagtactattcaagtcccagctgtagattttgaacagtaacttaaattccacattcgtctttgcctctcgcgggtaccgagcccgacaaataaaagcagaaggaatttaatctttcctttgtaccactgtgccgtcgacctgccagccacaggttgcagctgcctataaaatagacagacggcaagttgtacacacatatccaggggcgcgcacagtgaaggccgcggccgcgctgctgttcgatacacacaatcggcggcgac

SEQ ID NO: 5333 - DNA, 2000 bp, Oryza sativa
ttctagaagttccgccaaaccgtcagcggctttgctattgtactcctctacggctcacccgctgcctcccttcttattggcattgagattttagaatcgaacatgattatcgttgggtttttttactttttagaagttcaaaacctttaaaaattggacttgtagttttattttttataatttttagaagtcccatcaaacgatgctacaatgcccctctacagcctgtccgccgccaactctttattgacattgtgattctaaaaatcgaacataactgtcgttggaattcattttttattttctagaagtcctgtcaaccgtcggcggctctacaactatgctcttatacaccccgcccgctgcttctcctttttattatcattgagattttaaaaattgaatatgattatcaatgggttttttttttactttctagaagtcccggcaatcgccttactcgtttgcttcatggcctgcctgacgtctctccttttaatcgtcattaggattctatttggtgttttattaacaatttttatatctcatatcaaccgccaccactctacttctttataggcatgttacttaatttatctcgtcatgtgttttagatggtcttttctttcaatgatctttatttttatcacaaattttagttatttataaattgtattcctaattgatatcttatttttatttttctaatttcagaattttttaaaaaattttagttaatatcgtattgtgttattttaatgtttttattttttattttcaatttcagttgtttcaaaattgtattcctatttgaactctcttttaatttttctagttttagatattattttattttttattctaatttttaattaatctcgtattggattcttctttcaatatttcttatttttaattttgaatttcagttatttttaaattatacttctacttggactctcctttttcttttttttctttttctccaattaatgtgggaattatttttattctgaattttaattaatcttgtattgggttattatatagactcttattttaatattccttatttttaattccgaattcagatatttttatattgtattcctacttggactcttattttcttttctaattttagattttattttattattattttgatttttgattaatctcgtattgggttcttatatggaaacttattttaatattccttatttttaatttcgaatttcagctatttttaaattgtatttctacttggactctcctttccttttttgattttggattttttaatttttatttcgaattttgattaatctcatattgggttcttatatagaaacttctttcaatattgcttatttttaatttcgaatttcagctatttttaaattgtacttctacttggactctcctttttctttttttttatttttctccgattaatgtgaaaatttctagcccccacagtgaacatggtgtctcctttcaaagctgttttaataatataatagatatatgatcagagccgaactttgtcacatgctcatataacttggtcgaaagcgtcgagcccattatttactggccgtctggccctcatttggtcctgttattttggtaaagcccaaagtccagcccatgaactccagaaagcagcaaaataccgtgcgccagcggctctagacctctagtcaaagcgaaagccaagcggaggacgtatcgaggttgttgcagagtgctggacttgscccgccaagccgaagacaaaacgcaccgcggacgtggagcaacacgcgccgcgattcaggctccccacttcgtccacacatcccgcctcctcgccgcttctttaaactccaagcggccaagcccaccgccaatcactcatccaagtatccaacaaagracaaacccacccccgccgctgagatcgaatccgaccttaattttcacctgctcgctgatctcgccggccgtcgaccgcc

SEQ ID NO: 5334 - DNA, 2000 bp, Oryza sativa
gcatggaggagctttggccatgacaatccaccaccactactatcccccttccccggtgcacttctccttgctcatcgctccctagccggccatcctgctactcgtctgaagaggcaccagagctccgcccttctccttgctcgcggctccctgatcaacgtcgtcatcctgatgcttgttgcaaggggcaccagagcttcgacggccagcatgcttccgcctttcatcctctagatccgaggtcctgaaggttgaggccgaggccgaggccttggtctctagcaagtgagcggagcacgatgagatcgggaggaggaggacatgagatggagagagagggcgaggccttggtctctagcggacggggcgtggggagatcgagaggaggacgagatgcagatagaggcgttgtgtcgtccggcagataagagaaaaaatgggaggatggagaaagaagatatgactaacatgtggatctcacgtctagagatattttagtctatatgataatatcaaacatgatgataatagcatagatctaatgaatgggcaaaattaaagtagtatggatccaattaaccctttaattaatcgtcaaccaaattgtcgtctagtgtaagcgagggtagagcccatggagtgacgatgcaggtggtttccacgaggtaggtggggcccaccggtcggcctaacaaaagaagaaagagtcgaaagcgtgccacgcgcacaagctgccaagacggaaccatcatatcggtgcacatatcattggcggcaatgcgtagttgacacctggacggctcaacataaatccatgtactactggatgcatgtgtcgtcatcgtctttagtacagtatgtgaagaacaaattaaagccgatcgatccatttgttttgcttccatatgcatgagtttatccacaccacacgtacgttgtggtcccccctgcccactggtagctagctgacgtggagccacgtacgtacaattataattactgtgtatatatgcatgcgccaaggacaggtcattagcttcttgcattaccaattgtccttgggtggtactactacgtacgcggagtaatatttgttttagtatatcatgccatggttaatggtttgacgatattctcttctcatggtatcttatcttcgccttataataaatttattttgaatgtatctatattcatattataaaataaatttattttggaatgaagatagaagacgattgaaatatatatttgtatggctctttcattgtattaccttcatttgccactgattaattttacaagagttagatttgactttttgaattatttgctactaacttcaataacatatgaagccatagagagtactaagaacaatgtcattcttttttgaaaaaagataaatagtgaaactttgcaaataaatagtaatccggtgacaaaaaatgcaacgatcaaaggaggtagcaagtagtacaaccctatgtcaaactgaacttacgactaaatcgcttggacgctgaaatttcaagttatttaatctgacatgcatggttaagtgtcaaatgtggtccagtctttggtactcacatccasgccacctactaataactagttaattgtctattgtgcccctagttaattagctctcattaatcaattgctttgtagtaatscatccaygcacccacctctctttctcccgaacagcaagaagatgagccaagcccatggcgtctataaaagagagccctaccccctccatctcaaaaatttcaatccttcctcttccttagcttattagcttccttccttcactagtgccagttttcctcctacstaatctaagctagccaggtcgtcatcttcttccttcagctcacgctgaccaaacaccatctgttattctgtttgtttgttttttttwaaaaaaagaaaaaaaatctagctaggcgagccgattgaaggagctgagcatgccgagcagcggcggcgcc

SEQ ID NO: 5335 - DNA, 2000 bp, Oryza sativa
catggcatcgttagttgttcccctgagaaaaacatatgtatccacctggatatttacaattttttgtttaccagaaagtaaatgatgagtataaccctaatcctctcattttagtcttcattttagataagtattccttattgaatgtaaaactgaagttacactgatgcatgaatacataattattctatgggattggttgttatttgtactactgagtactgaccattctctcatgatatatgaacagagcatatgctcctagcaagaaatgtggcatgggtgagtttattgtcttgctttcaccatgtatggaatgtggcatgtgagtttatactctttctttcaccatgttgactttttgcacatttatagaatcttttggtatgatgctttttgtcgattcacatgttttattaattattaacgaccagctgcataggaaaactgaagatgtacatggttgaaaagcctataacattattactatgttcatttatctacaatcgtttggatttaagagtttccaggataatttactaaggtggttatctctggtaattagtttcttgtcttcatctactccttttataccagaaaaaataattattggatgatgataatatactaaggcctactgcagatgttgtgactaatattgcacatcttcagtgcatgcttctctagggtggacactgtttattcccgacagttcttaatcacttagaaatagagttatggaattcagcaacatatgtgatttgatctgaaagaatcatcaaagagttcatcttcgtgtaagcttatattataaaagattttatgccaacattttatctttccaaaacgtgtcttgcacgtgcacgattactagtcaatcttaaaattgttagtttattttctgaatgtattcatagagataggatgcgtgcacatgtgttcatatgggtgagtgtgcgtgtgttgttaaacatcggcgtttgtactgtgtttaaaaaactgctaaattatattactattttatatacaaattgtttaaaaatatcatataaatctactcttaagttttaaataattaaaaacttaattaataatatgttaatgattttctcatcttaccttaggctgagttcttatctctagttttccaacttacctccttcattttccacgcgcacatttttcaaactgctaaactgtgcgtttttaaaaaaattttctatacgaaagttactttaaaaaattatattaatctattttagttaatacttaattaattatatgctaaatgcttcttcgttttgcgtgttaaggagtaaggttctaaaccctcactccagaacacatcctaatctttcagctgacactaagtagagtggagcttatacttgtaagctagtaatagcagttaaaccataccgtctgttggattcaacaacgacgatgtagtggcaactgctagcagaaagcatcttccttcagacacggttagtctctcgtccccttgagtctcactgtagttgaactgcctccacgcaagttactccctccatcccaaaaataattcaaccagaagaggatgtccagattcattatcttaagagggatcggttgattttttttagacggagagagtaggccttatgacatatttacattcgtgttccagtagactcatttccaatttcccaaccaaaagcatagtactagtacactggactacttgacgttcaattgaaatgcttaaaaaatcaataaaaaagcattaagtttcgatccaccaatccaccatacaccttaccagtcaccaactaatccaccaacacccggcctcaccaaaacccagctggtcacccgtctgctatttaagcgatctcccgcactccgtttccctccaagaagagcacacagcagcctctctatagtctcagctcttcttccaccaccacccagctcctcctcctcctcctcgtcgttgttcgccaccaccgctcggagag

SEQ ID NO: 5336 - DNA, 2000 bp, Oryza sativa
attcttttgagattaaaatgtcagtttgattcatctaagactaaactttgttgtccttttttatgttgtttgcggaaaagtaggcatgcggactcaagtttcatccatatctgatttttttggcttctcaagaagaaaatcacctgaatttttggaggatggtaagctcaggaatgttgatgtgaataaattattcactgtcaggctatgcgactgatattgaagtgttgattgctcaaatgttgaaactgggattaattgctaccatgttttgtggtgatctaggcaccgttagaactgtagcgatggaagcatgaagatgtgccttattttttatgtccctatgtcctgaccgaagattctcggttcatacttcatactatgtacgatcttgtaactgagccttacggtttttgtagggaggttgcatatccttggtaagtatatggaaaggcacatcggtatataagttactagttgatcagcatctatatcctaactggaaattacgtatacaagttacttatgtgttttcttaatttagggaatgcagcgctgcttcttatctgtggagaggaaaatgtgtctgcaccgccatactgtgctgcctggaattttgctcagctatagatgctcaaaggactgaatagaaattgtagaaaaacctgcaaggcctgagaataggggaattttttttaattgcttagagttccagggcttccttgagttcctaggccagatgcacgaatggatgaccctgaagctcgtatactgaaccatgagatgatctgttcttgagctgcacaatggcacaatggatggttgacatttggttgtactgcttttacaaatacccagttggcgattgttttgtctgcttcttctacattctggttgcagtactagtcctcatttgactaactagctctgtgctttgcgaaatccattgacgtttcagtgtcctgggtatttgggagatcgcgtctcaggctagttgcagccagggtttcccaaaccgccagtgccggggttaccacgccccggcggtaagcacggttaccgcgcggtaaccgcggtaaccgcgaaaaaccgtgcaaaatttatcaaaaaatcaaattatttttaaaatttatttgaatataaggaggttaccgtggtatttatattaccgtaccccgcggtaagcccggtaaccgcgcggttaccggcggtaaggtaaacgctggttgcagctaccaccgttcaaccatgcaatcacacgttggtgagcttcacgttttagcttgtgtttgcacggtgcaaagcctggaaattttgtgacaactgagaactgagagaacagacgttcaaaggtccatgctttcaaaacgcttcttttttcaaccgagacgccggtccaagacctctaagctctgcgctgagcaaaaaacactttggctacttgattaaaaacgtgtccgaaaacagtttagtgccttctcgatatcgtgcagaactgcagatccaattggaaatccccgggacttgttacgtgctttgtgcctccacagatgtcctgcttgtgtaacgtcgagaattcttgactcgtactagtatatgactcgagcagttcgatccaccagccaactgaactgaagaaaataatgcagaaagatagcatcaaaacaccctttcttctkcgaamaaactctcwactttcaaacgattcccttgcagaataactttcttgatgaataattctattaggctctaaccagcggtgcaatgccgtgtcaccgagcctaatagagttcctgttgtattctcgaaagagttcctgtttgttcccggcacgctttcaaagtcactcagctattaatgccttcggattccagagatgaaaatcacgcctttggttcgccaaatttccgtctcgtgagcttctcgtcgttcttgtgcttgttttccgtcgaatcctcgtgcaattctgtgagaaaaagagggcgatctccggtgctgcc

SEQ ID NO: 5337 - DNA, 2000 bp, Oryza sativa
agatccaatggatttcttttttaatcaatttggagggagagacaatggcatggccggatcgagtggaggaggcggcatcagtctcgactgtgcaaaagagttccatctgcaggaggaagacgacgacggtagagcgatggggtccaagtggttagtgagatgggaaggagatagagaggagaaagaggtgaggtggaggaagtgggtcccactatattttttatgtttttatttgactgacatgtgggtccatatattcatttaatttattattgttttaaattttgattctaatgccacatccacaccacgtggaatgaggaccaagtcaaactatacatatagatgtcacgtcagctaaaattggtgtctgaactaccttaggatcgtatttgtagtagttttaagagttgagagatatgttgtatctggtatttcacttgacgaacgaattttagactcggttaaaaatggtgaagtaaacttattcccatgagggaactgcactctggatcttacattaagcccatatacttggtgggccaatgtccgtgcaattcttgtttgagagactgagatgtactagactactactccctccgtcctaaaaaaagacaaaccctggtttccgtgcccaacgtttgaccgtccgtcttattaaaaaattataaaaaaaaataaaaagacaagtcacgcataaaatattaatcatgttttatcatctaacaacaatgaaaatacgaattataaaaaaaaattatataagacagacagtcaaaattggatatggaaattcagggtttgtcttttttttgagacggagggagtagagtagtaggagtatatgttgttatacattaacttggtttagttcctctgatgattatatagcgtgtagatgctcaattcaaaaggcaaagagaacagattgcctgagaggctgagacggtcaagacctcataacttctcttaacccgaacacacggcagcaaatttgtcacgatcaagcacttaaatgaagccgttgattgtggggtctagaattcttattgtaccgtcggaaaattgacgcctgcacaccccmaccccttcttccacgatactagcacgactgatccacatttccacaaagccgatctccacctttgtgagtcgtgaatacgtttgatcgagagtgtccactccatttcatgggcaaaaccgaagtgataacaccgcgtgcatttgttgccaccaacaaacagagggtgacggcatgattaggaaatcagagggtgggtgatggagaccacactaccacacaagtcaggtctccgaagccggctgtgttcgcatgcaccttttcccatcgcctctccttcgttttccgcgcgcacgcttttcaaactactaaacgatgtgttttttgtaaaaagtttctatacgaaagttgcttaaaaaaatcaaattaatccatttttgaaaaaaaaattagctaatacttaattaatcaagtgttaatggaccgctccgttttccgtgcacaggagttaggttcccatctcccccatccgaactcagccgaagcccgttccctttagttcttacaatcttaccaagtcataccaatcagttgatcgttgcagcaaggggtcgaagtgccacgatagtgaccggagtgtaacgaagtttacatcgtgttgcctagcagcaaagaagaaaaatatcgtcgaccccaccggccaccacggcgcacaggagtcaacagcgaagaccggggcgaccaaaatatgccacggatcgatcggaacgcgacgaacgcagacggggccccggggcgacgcacgcttgacgaatccatccgcagacgaaacagcgagctgcgctgacaccgtcgccggcgcggctcccccgcatatatcacgctagcgcacggagaggcgcaccgcaccaccgctcgtgttctaccagccaacccagactcgatccgcggccgcgcgcgcctatccgcagcgaagagg

SEQ ID NO: 5338 - DNA, 165 bp, Oryza sativa
tttgktttkgkggggggggggggggttggttaaaggctacttatccttcaaataatgtgcctcatatcacgctgttgcaggttgctggagatctcctgaagcaatacccaggaaaaatttaagggagggacactctcagccacctggaactacttgagggactcc

SEQ ID NO: 5339 - DNA, 72 bp, Oryza sativa
gggmaccgggrgctctgtttccggcaaytttgcgcccttttccgggarcccsggktgcgcccgtttagcctc

SEQ ID NO: 5340 - DNA, 2000 bp, Oryza sativa
gaagctgttagatctctaagctgccttcccaaattgcagatattattcttggatggaagtgatatcagtgatcaggcattgaagtatctgggccttggaacatgtccactagcttccttatctctgaggggttgccgaaagttaacaaatgattgcataccactcttgtttgctggttctgttaaacagagcttacaggtgttggatctctctagaataccaggtattactgatgatggtatcatgttattagcaaggagtcgaactcctattattgaactccgaatgagagagaacccgaaaataggagatgctgctgtgatggctcttgcgtctatgctagttgatggtggaacccatggcagtagcttgcagctgctggatctttatgattgtggtgcgattacaccacttgcaatccggtggttcaagaaaccatatttcccaagattgcgatggctaggagtaacgggcagcttgaacagggttatggtggatgcccttgttcgaagccgtccattcttacatatggcttgccgtggtgaagaattggggactttcaattgggatagatcctccgattggtatcgacatgatgatgatgatcttgatgagcttgaacagtggattttgaatggtgaacctgtatctgacactgaaaccatcactgaagaataaggcatcactctttaaggtttcttgacccacaataatctccctgttctagcctgctagtgttcatctcctgttgtacctccaccatttcatttttctttcttataaagctattgtgtgattgtctctaccagttgaggtattttcttgcggtgtatgcatatgcaaacctatccgttgctgtatacttgtatcacgcaacacgcatacacgatatgcatgttgcattcagattccctgggcttatgtatgtacattgtttgctttcctgacctgatgttgtactggtatctttttccaggtttcagcttttctcatagttaagttatttatcgaccttatgccatataagatgtttacgattggctgggctcttatacgatatcttaagtgggcaccttttattgtggatacgctctaattgtttgttatgcgacatgtgcttcatcatatgttagtatcaaaagatcactttggtaaagcgccaggtccactacctctagttagtttcagtttccttgccgtagttagcataaacaagcttgtaagctatacatccgcttgtttgtttctcactatcctcgtttgtggctgtagagccaccgaaaccaggttgagccgcaccactytccggrgcaaaaccmaaaaaaaaaaagtgcgtagtatgttttgatccagtactgaaagacgaacatacaatagattttttttttcagttaatggtgtctctatacagtatggtttgtagtaaaaatgtactactactgagcaggaatttttttaccggtgttaggccctgtcatccgaaatttcgatacaaattagaaagtattaaatgtagactaatgataaaactaattccataattttagactaatttgcgagacgaatctattgagcctaattaatttatgattagcatatgtgatgctaaagtaacatgtgctaattataggttaattagacttaaaaaatttatctagttttattagtagtagtctatagagtatttaatacttatatatttagtgtccaaacatccaatatccaacgtgacaagaaaactttagtcacgggatccaaacgcttagcacaacttgatatcctaggtagaatgtctaattaaaagcttttctgtgagtttttaccgtggataaggccactcgagcccatctgtcagtgtgtcagactgtcagtgtgccgctcactcgcgtccctccgtctccggccagctagtggagtggagtacattcactagtggtttgcttccagttcctatccaatctctggtcttccggcaggtccccgaagaaggagcggcggcg

SEQ ID NO: 5341 - DNA, 2000 bp, Oryza sativa
cccatgagctaccaatgcaatggatcaatttgaaagtgcaagctagctatagctaactagtagtagctagcaacaaaaagtgaagagaagaaaacgatccaacggtgttatgctgtctcgatcgatcgattcatcggttggcaatggagcaaattatcaatttatcatatatatatatatatatacagatgattatgcacgcacacacagtgacacacgcggatgcagttgagaatggatgggtacatatatatatatatatatttgtagacacttctccaacgaataacgagtaacaactaagggaagaaattaggcaagcagagcacgaaatggaggagagtcgtcgtagaggcaggcagtggtgactaggaaacaaccggaaggtggcccgtagctgccttgccttgggaacgatcgatccatcacgaaatatatatacgcacttacacgtactctcctttagtctttttaatctcctctaataacaaaggctaagcttggattattccatcaatatcacaattcctaaagcttctcagtagagccgagcacagatgatatattcgtcaatttcgagcaattcaagtcggctcgaattggtaaggtgtgggagaatttgggaaattgacagacaaaagagagaattttgatcactcgtcttatttttctattaacgatttataaatacttgaaaatatattatattatggcatattaataagtataaccattcaattgtagttcattataatataatcattcagaagtaatgtacgatcaaagtagtactcctagttaacaccgatagttattgaaaacttggaaacaatgttgtcatagactatatatatattatcctctttaccaacaaagagttaggatgagttcagaggcaaccaagcaaatgattagtgcataattaataaagtattatctaaaaaacttaagaatggagattaatataattttttaaagcaatttggctatagaatttctttttttttaaaaaaaaagcacaccgttaaatagtttggaaagtgtgagcgcggaaaaacgagagaggaaagattgggaatgttgagagaagaacacaaccttagcattgtcatgaatgggaaaagaagtgctgatcgacatgccaggtttattgtgatagaagggattatgctatgggtcatacattatttgttgtgatgatatttttaagattcatgctttcgtgaagcatgatgtatttttacataggaggattacatagcaagcatggaatggcttatttagaatcaaatgcatgcaactagatttatttacaatgtagtcgaaaaagacacaaaattaatatccacaattgaacaagattgtatgtaccagagctaaacattcgacgtgacaaggtgaatttttctcaatttctcgtctttttgagaaaaataatatatttgctagtatatatttgtagagcatataacttgtagaaagcgaaaggcgagagcaaaaacacggttgagtgttgagcggtgagttgggttccctacccgctggctgagcggagcaaactgaaaccacgagacggcccaaccgaccgaccaaccaacactgacacaacccacaccccagcccgggaaggaagagagggtggagggcaccctggtcatttcagcaaaacgcaacgtgaggaaagaagtttaaacgggcgctgcatctggtgccgcgtgtccccctcgccagctgtacccaactcaaccccacttccaatcttaactgaacaaagaagagatggatcgaacagcacaacaaaccaaaggaaaggccttcttgtcatccttccttcctttatatagaggccccttcttctccccctcctctcccctgacttaatttagctccgcctccattcacgcattcacactagcatagcatataagatagcacttgtagagaggagatactagtacacatagagaagaggagaggagattgatcggtgagggaggatg

SEQ ID NO: 5342 - DNA, 2000 bp, Oryza sativa
tgaaagctaggcgttggtttttgtaggatagatggtgtactccacttgtaaggaggttaacctgctgctataagtgaactgggatcaggcacagtttctataggaactgcatgttaagctataggagccatctactttgttgatgaacggaccagatcgtcagctacaagtagtggtgcaaagcgctttaaaaaaattgctacagtaagctacaatcctggacgtattttaaccattagaccaagatgcaggaagtattttattttttttacttgtgctgtgccgttacatatcaggcgaccgtgcgggcatctggttgatcacataaaacgctttcggtggcttattatttggctgcacaacttgtatctaagatrattcatatatacggtgtcaggtgtcgtttttattatttggaatacgcttgcgtatttacgagagagaagtgcaacagaatatacaacggcatttttttcaatgaacagaatacaacacaaaactaattatgcgaccttgggatctatactcagagttagatttaactaagggcacccgcaatggttatctataggctctctacaagagactcatgtcagcatattttcctacttggaagatattaaatgaagagagagcaaagctatctactaacttagagatagtctatagagaaaaacgagacaatgtatgagagagctatagatacctatatagacatactattgagatggtttactattaatctagtatattgttgagatatacatgttttatagagcaccttactttactatttcgtgtgctcgaatgaggaggaatcgaccgttctcacccacgtgcggtgatttgttcatgtctagtcggttgatccgttgatggatggatcgtgtagacgtgtagtcgtgtactgctccctgggaggctgggacatgatatactccctccgtttcgttttatttgacgccgttgactttttatcacatgtttgaccattcgtcttatttaaaaacttttgtgaaatatgtaaaattatacatatgcataaaagtatatttaacgatgaatcaaatgataggaaaaaaattaataattatttaaattttttgaataagacaagcggtcaaacatgtgctaaaaagtcaacggtgtcaaataaaacgaaacggagggagtatcaagttttgcaatacgaaatgttgggcatttcttcagagcttatcccgaatgcatggtctcccatggatggatgtcctgtgatttcttcctttcctacagaaaaagcagatctctttggcttggcagctcgctgtcctgtgattactgtactgtacttaaaagggaggaaggaaacatataaacgcgtcttctcttgagctaactaaaaagaaaagaaaagaaagagtgtcttctattgaggtgaggtcatctgtcgtggtgtcactcgacacttgcaatcaacagctgtttccgccaaaacaaacaaatctgttctaatctcggcacccctgaaccaccgaaaaagctcatcactctcttctcttcactaataacctgacgacctctgctggctgcacttgccacttcatcgtcgtcgtcttcttcttcttcttgttcgctttttacactctcatcaaaagaatcatctctctctctctctctctctttttcttgcttgccttgtttggatcgattcgattaggatgcgattgaatcgcccgtctcatcttcccagccacacccacaaataatgttgtctttccgcaaatcccctccgatatccgtgtcctgctctttttttttgttatcctctaccgaaaatcccgattttttcgctttgaatccgccttttatccttcctcccataaagctttgaatccccgcgagcgagagcgagattccaggcgccgattcgcttccacttccgcgagcgtttcgtgcattgattccaagaagatccaagcttatcgcggaaaagaaagaaagaaagaaaggaagaggag

SEQ ID NO: 5343 - DNA, 2000 bp, Oryza sativa
ccatggtgaggcagcaagaagcaagctatggtctccaatggaggaggagaaggaaacggagacgcaggtggtagcgtggcgtgtttagttgcagctcaaggtcaatgagttggattaattgcttacttaattaattaattaattacgaatgtgcaagaaaaataaataattacgactgtttgctagcttgggttggattcaattgtttgtctgtacttaatatctaggatcttgaattctagatgtggctagatttctgcttagttgtgtgctaacacgccaggttaattaagttttgacatgtttttgttcgtttctttccatgtcttttctctaaccctgacgacaacatatgtgtagaagtccataaggtcttctaggtggttccttgtgattagctacagtcatcggattaacattcatcatttttagttggtaccaacttggttgcggggtatatacgccaatgtttagcaagattccaattactatacctccgtcccaaattaaaatttcatcttaaaatagtcatcactatacacatcactatacagtaccatatgtcccatcattgacctctcatttaaatatatttttctactttattctcattcaccctcctactttcaatcatatactcttattttgttttttaatatatggcgttgctgattttctatgctatagttaccatttgttttatttaaaagatttatgtaattattatttattttattgtgatttgatttatcgtcaaatgtttttaagcgtgacttaaaatttttatatttatataaaaaatttaaataaaatgaatagttaaatatttgttaaaaagtcaatgacttcatatattaaaaaacatatataatattatttaatgagaggtactatttttaaagtgctataattctctctacttaaactttaatttatactaaacaacctagaacaacatagaatggcaaatactccctccatctctaaatatttgacgccgttggctttttaatatgtttgaccgttcgtcttatttaaaaacttttgtgaatattattcaaagactttaactttagtagtatatttaaccatgaatcaaatgataagaaaataattaataattacttattttttttaataaaataaacgatcaaatatgtttaaaaaggtatttagggactgagcgagtatagcggaggtaagaattcttaggcatggtcactcagagactaatttcaggggctgagctagccttatgatcaaagtctgttacttcctccattttacaatgtaaatcattctaacattttccacattcatattgctattaatgaatttacataaatatatatgtttagatttattaacattactataaatgtgagaaatgctagaatgatttacattgtgaaacggagggagtacatcattagttagcactcgttatttacatgtcaatggaaatatttggaaaaaaattaactcggagaggaaggcgagaaagaaaagaaaaaaaaaaggaagaagagttgccggcscgaraccagacgaagccatccgatccccacccttcctcccctcccacctcatcagcgctggcggcggcggcggcggcggcggcktcccctggatccctcggcggaggcagcggcaacggcggcggcggcggtagatcaatcgcatttgtctcgctaaatccggcccgggccgcccgttgcgtcgcggtaagtgggtagggggaagtgtgtcgcgtcgcgtcgcgtggtagctgcgctcccttcccgcatccgcggtgcctgtgcgtgccctccacacgatccccccctcccgtcgtgttcgtccgaccgtccggcagatcggcgaggtgagctctctctcttcgtcgtttccatctcctcccccatcgttgaatgaattaatccgcctctcttaaggcttttagggtttcgttagcttccactatcgatcatccaccccgccccgctcgatcgcgcggcggc

SEQ ID NO: 5344 - DNA, 2000 bp, Oryza sativa
gttcgctggctttaaagggatggctgtgggaggcggatcgggcgggcagcgaggcggcggcgccgccgccgaagccacggggtcgagagcggggcggtggccggtgtaggcggtgcgagcaaagcagatggattattaggaggagaaggccggtggtggcgccccgccgttggagacggagaagaagatggcgcgggacaactcgcttgaggaaaaggagaggagagggaggggggaaaatgagggggggcgagggctcgccggcgccgttaacgcctttcagccagctggtgaggcagggcggcggcgcggtggagcagtggcggtggaatggccgatgggagggagcggtggcggtggaatgagcgaggggaggggaacgagaggaagagttaaggttaatacctctgcacgaatcttaaagcatattcgatggtctaaagtttaaaagacgggatgcgggattttttatcaacaaatatatagacagtcccaaaagaaaaactaaaccaactgagatcatctctataagaattgatgtgggcatactatgatgatgccattttcaaccttaccaaattttggtgaagttaccaaaaaagtggctacatttagtttgctgctaaattttggtaactatataagaaatcctgcaaaaattttggcaagttgccaaaattttgctaactatgccaaaattttggcaatgccaaaatttggtaaggtttttttttggcaacaaagtaaacaggcccataattttattttgcttttttttatataataaaacgagtgagatctttggttgcaagtgttcaaaaaatattttaaatacgtatagcactgctcctgctttttcgttttacggtagtagatgtttctgttctgaaccggtttctgaaaaagaaaagctgaaccttcaacacacgcaatgcatcagaagttgcagcgagaaaatttggccaagacattcctgcccatacgcccataccgaaatactcctaccatatgatgatgtatcgtatcgtatcgtatcatgtaggagtgcactggtatggcaacgacagcagagctcctctgcagtggcaaaacacacggcatcccaacaaaagaaacagtggacggtgacctttatacggagtaccatcgagactgtaacaaaaggagtagtaaatcacacattaactcctcgaaggacgcaacggcgtcgtctttggtgaggctcagccgaccttgccgtcacacattaactgttcgctcagacaagcgagtagtagtagtataatctgttttttgcttttttgcccttttcacggtttttcctgatctttctgggctttctccccgtacatctctatccgcttcacgctcggacgagtcgatttgtgtaaagtttatatcgtcctcagaaatttcttgatgaacgacgaacagaaatgaatatggtaagcgaaaattgagtgaaaaaacatcactaatttttttgaaccaacactatatcatacacctagtcacctactcctatgtagtataaaaaatcaagatactgcaacgtttgtcagaaagaaaaaaaatattttcctgacatgtcctccccacaaaaatgttgtcgccaaaatctgaaatgagagggggaaaaaaaacagatataggagatgatggagacaagcgtgattagttccaaattccaaggcattttctgagagataaacccgcaccgtccgtctccgtctccgtcctctctcgcttccgtactactccactagtgtcactcgcagccaaccaaccagcgtttttacctccacagcttcaacttcaaagggcgcaaagaacgcaacaaggaccagagccagagtgagccaccaccagaggcgtgaccgaatcggctagcgagtgagagaggaggagcagttcacagttgcagttccacgctcgcagtagtgtccagagcagagcgcgagggaagagggcgcagagagcaggaggagaggcaggcagcc

SEQ ID NO: 5345 - DNA, 2000 bp, Oryza sativa
aaagaggtttgctattgctaaaggacaagctggtgatctccagaagcctgaagagaagaataatacagtaacacacctagaaacattccattctcctctggtctggtcttctttgggaaacaaaatgttgtgtgatactcccttcatttcgttttatttgacaccgtttactttttagcacatgtttaaccgttcgtcttatttaaaaaatttaaataattatcaattcttttcctatcatttgattcattgttaaatatacttttatgcatacgtatagttttacatatttcacaaaagtttttgaataagacgagcggtcaaacatatgctaaaaagtcaacggtgtcaaataaaacgaaacggagggagtattattcttcttggacatgatctgatcctcctcccacttgttgctaacctttaattcccttgctaattcagttgttctccactctgatccctttgccccctcctagagaccatccattaattcttctaaatatcctttagcctaagcactagacttctccatactttgacatttccttgttctagactttgaagtgccattggaagcccggcattttcatgccctttttgacttgatcagtttgaattgatatattgatggtgactgaaggtttaatttttgtgtatgtgattgtactcattgaggtatatcaattatgtgtactatatttgtatatacttaaaaagtgcatttagtataatttgagaggttatatttagtctgcgtcaatttgagcatatgtttaaagaggcatattcataaaagggggaatgtgctatgaatgtttatgcattccttcaaatcgaaaagtaagttgccagtaagataacactactttgcttgattcttcttgggcttaattcgatccctttcttttcattatatactaaactgttccattatatattacattacataatatagtgttgctttcgtatattaggtcaagaattactcatcttagagtcgttatttttagcttaaaagatgttatttcagaaaaagaaagaataactgcatgtactgtattgcccaataagcccctgaaaaatatactccatttgttatcatttgtgttgttgtgacttgttttgtggtattttaaacatggtttatatttcttatatttgcataaactttttaatgagacaaaaaaaaagttcgaaaagttactgacgttaaatatttagaaacaaatattcttttcaaattatttggtagatttaaaacatattatttatttgctcttcaagaaaaatacattttttataaaacaaaatcttatactgcactatctagatacttccttcgttttcataagtattctactactacgaatataaacatttcatagtattaggatgtgtcatatgccatattggtttttttataggatggatgatgtatttgttatttcctccgtcccaaaatataacaacttttagcctttagaatttgtcccaaaatatatcaacttctccaccaacattctcttcccaaccaatcacaaccctccactattcactttttccacctacctccactacccatccaatcataaccctccaccactcacttctacctactttcttaataacaatgtccaactctaaaacttcttatattctgggatggatggagtaagtttatatcgaaacatttatttttttttccttacattacaattgaatagaaaaatccgcagaaagatccgttcacaacaaaccttttcaactaaagcaaccacaccacatgtgagcgtggcaggcatatgcatagagcatagtagtagtagcgttgcagggagagagaggctcttctccttttgatgagcaagcagctcaagagctcatcagcaacagcatcgccatcgtgacagaatattcccttccgacaccacctccgcttcaccctcgcatcgccctcaccgatcacccgccccaaaaccctcgccgtcgcggccgcc

SEQ ID NO: 5346 - DNA, 2000 bp, Oryza sativa
gatggcttggacgatccgggtgaagacggcgtcgtgcgcggcggggggaggaggcgacgacatggcgtcggctggcatagggagcgacatcgagagctagggttggggagcggaagcggaaagagaatctgataccatgttagagtgattgactcaacgcacaaatccattgattgagatgtggagtacatatacacgaaaacctttctaagattgctcaatcggtttatggaacagcaccgagaggaatcatgaggattggtaatacaaggaaacatattgacagacatgccatgcatgaaacattgctaacagaatggactacggttcggtggatgggaatgggatacgcctccaacccgccgcggcgccggcgtccgaacgaacgaacgaacgaacgtgacgtgaagggtattgcgttgcgctgcgcctcgcctcgccttgtgcggttttgcgacgccggccgccgcctgtggtggtgggctcgcgcgacgtgccgcgctctcttctgttcgtttttattacctgacgcgtccgacctgggatccacccgtcgcgatggctccaccgcgtagtagtagtagtggcttgtccagtggccaccacaaactagacctgtcattactcattactgccgtgtcaaagccagccgggaaaagaagaaaaaaaagaaggaaaaatcaatggatgctatgaaacgcttgcgggtacagcagcagccaatgcattttgcaattcttctacaacatctcattcccagtccggcaaacctgcagggtgcaaatccagtaatacatcaattccatccgtttaaaaggagaaatcctacattcaatgctcacgtgctagctagcatgaggctggctgcctggctgtggttaattgacactacccctgcacgtaaacaactgtagaaacgaactgtcgtattttcgcctcctaaatgctgccgcccatcaaatgctcgtatcatatcatatcatatctatttagcccgttataatgtcctcccaaaataaagaaaaatatctctacgtgcacagcacacaacataaatctaacattgctctggattacaacacagattatacatccgactttcactcttatctgaagcacaaagaaaaaaagaaaattcaaaaatgaatcagaatcgacatctacgatggttagtggtgtatgaaactgacatagataaagattaaattggtgtttgaataattaagttttaattattataaacttgataaataaatatatttaatattttaaaataaattttacatagaaagttttttttacgaaatacactatttaataatttaaaaagcatgtcaacgaaaatcacgtaaaatctgaatttcaacccacccaaagataacgcgcacgacgcccgcgcccacggccctcgttgacccgcccgaaaaaccccaccaaaccccccctcctcgcaaccggccgtacgtgcagccaccacgcaccgaaccaaacccgccgcgagagcgagacccacccaccacgcgcggccgggttcactcaccctcaccctctcagtggcagccgccggcaattgagccccgcgcaccaggggcagcgccgtcaaaacgcaacgcagccagggagaaaaggcaagttgtgagtgagcgagccagccagtgcacagggaaatcggggaaatcgtcggggaaatcgcatgccatttcagcccggaagatttgatttcaaaaaaaacatttaacagcttccttaaacaaccgaaaccccccacgatatcagctctctctctctccctcctcccatctcctcgtcttcctcctcctgacctcctcgtcgtcgtcgtctctcttcgccggctccggcggcggcggctgctcgcacccggtggcgtgaccgcggcggcggtggagtggagtggaatttgggttcggatcggcggagagaggaggaggagagggggtaataattgggaggcagttgggggagtgtaactttgggcattg

SEQ ID NO: 5347 - DNA, 2000 bp, Oryza sativa
tccgggctcgctggtatggagactttttcttggtttccctcccttccatttcttgttcttggtgttcggcttgggatgcctgggatcgatggctgctgcgatgcgagagattcgtgcctcgttgattcatcgcctggttaatacgagggttcttgtattgttcttggtccgggaaaatgttaggtctgtttggtaattgtaatcttccatccatagcaccgtagaggtagagctcaatcttcggctaaaatcttgggtattttacggttctgaaaccaaaaatcttgtttttttttttctttttggtgatttgttcttgcggtaattaggcataattcatcttttgaggggcaatatgggtagtctcacaccacaggacgtcacaaaattgcgaaatcttgatgatgaattccgttgtatcatggtatcttgtcagatctatgatttctgaccgtatctgtatttagtggggtatgcggtagatgttagattttgtttttgagcagttgcagatgttagaattaacaggttctaaaaccactattatctttatgctagaattaacaggtcctaaamccattattatcgttggtgaaatttctcttagtcaaagtccaaaagaggatgctgtcaatgctgcctcggtagtcatatacattgatcggtacattccaccccccttttctttgtccatggagtacatttcattgaaatgtcgaagtcaacaaacagaaaattgcaaaccaagttagggtcacaaatgtaaagcaggatccgtgcttgccatgttgtccttttctttttctgacgagcgaaatgcccgtacattgttacggaattaaaaaaaaatcatatcggcacatgtcaaagaggaaatctattttgaattaacatcaaagtttttgctgttttcactcccgtaaaatgggctccatttattactagcgtacaaggattatcatgattgagagctccaggatctattctattcgtgacttctactgttctaccgttattttggtttagtgggaggatagacaatgatcccgtatgtcagaatttgagttggtggttggttggtagcaaattcaccactcacgatcaccactacttcctttagatggagtatagattcaatctgatttctggcttcagtgaattgcttgcctcttacatgttctagacttgtagtgtgatgtcaattagttaggacttacttcatgtcaagtcgctggcttactgaataaatatgtgatagtcaattgaggagaggcacctgtcacagacaaaaagtatgaagtttgatgcacaaatatgggtccaaatccttttagtattatatattttattttatttattcccatctagttatggtaatgcattaatggttgcatctgtgcatggctgattggctggatgcgcataagtattctgtgaaatatcaatattggtgcacagagaactgaagatgttacaaacatgggcaaacttattgttacactaaaatattacaaacaacaagactataagtatacaggaaaaaagtatgaagtatctcacaataagagcttctaggcaaatttctgctgatgaaaatttttttgttctgttcttcggacttgtgctgtcttgtaagctggtttccccagcaaatgatgccgtgttggctttctataaatgccaggttgtatgacctactttctaaaaaaatcattgaatatccatacaatcttttttattattatttgtcwagtataggtttacttctctcaaaagtcttgtaaacttctctagaagttggatttatcaagaaaatgctgttagccactattgggcatagtgatcttgtttgcagtctatatatgtatgttattcagctgttcatttagttgaacacttgcatttcatatttcattattcttcaaatatattataatcacacatgcaatattcaaaatcttatttcaaatgaatgatcaaagtggttttacacaagagcg

SEQ ID NO: 5348 - DNA, 2000 bp, Oryza sativa
acattttcaattcttgaaattgtagaaaaccaccctgatggtacatatgagaaggcaaggctccgatttgcacatgctgaaactgttgtccctttctcatgtcttcttggtctttttcttgaaggatcaggtatctttcgttattgagaaaattccattcacacataatcattctccatgaataatgtagcatgtaactaattgcccatttccttgtctttcatatgtagattttgcgaagatacaacgggaggaatcattggacatacctcctgtgccaccacagggaagaaattggaagggcagtgttgttgcaccttttgctggtaacaatatgttggctttgtaccagtgcccaggaaaaactgatggtggtaagatttctcgggatcagaagagctcatacttcgtgcaggttatacacaatgaagctccagtttcaatgccggtaagattatagcttctaatttgtggtttattttwatgtgttcttcccaatttctggggactggtcacttggacaacatcctgcattattacaccccttttatgcccaaaatcgttggatttgtttgatgatataagattacaagttctgtagttcatgttatgcccaaaatgctcttgtgagccctttgcttgagcttgaaccctcataattttgggctttgatactttcttagttcatgccgtggtaacagaataaatggctcaaggagaattcacgtctaatatcttttggcatcggacaggctttattaactttaaggacttaatccaacaattgttcctttccattttttaatgtagtaatttatataacaacaaaaacaaactgacattatcgcatagtaagtgccattaacaaacactttcaaaaagttgtgtataggttttacatataacttgtttttgcctggccggccaaagagtaggtcggccaaatttcattaagaaagagtatttataagcatgccggcatagtcatctgagtttttttgtaagctaatttatgaagaacctcctaatcaggcttttttttttcctccagggatgcgggaacaaagatttctgcccatttgaagagttcaaggtaaataaaattgcctggtgctaatgttcaggcatcgtattcaagaaacaaacatgaatccccttagcagttacctgctgagcatctctcgttaatgccagtctacatttacaggagaagatagttgaaccccacctgaagcatgactacgacgccctatgcaagataaggccggtggcaagagaggagccttcctccttcagttccaggatgtccaatttcttcctaggtttgttctcgcagaaaggataccgtgttagtgctcaggatgtgaagtcggagctgtaggtttatactaggcagatggtgcatcttctacctttcgcactaagctgctactatccatctaccatggataaccaagggactgactcgtggactaaactacggtgtttctgtacttgcaaccctcagtttgatgagcgagtccaatgtgtaacaacacgctatcactggtgcccctcttctttcagatagaagacgtttgttgatcaatgtaatctttgttttaatctggactttctctagtgctcaactgctgactctgttgagatcaaactgaaagtactagcacacggttgtgattgtggcccttgtggtaggttgagatcatgtactactacttggacaatccgtttcaagctttcagctcaatcaatccagatttgggagatccccaattcgagatgaatcatgacaaatcatccgtgtgactgtcacttgtgaggctgtgaaagatccaaaaagttggctgcttctgcatctgcttctgcttctgtcagtcaagctttgtactgtactgtgctacagtgctactagtaggtacagccacatcgacaataaaagctccaggctcacaagccacagctctctcacacgagagctcgagtctctctcgtcggcgaca

SEQ ID NO: 5349 - DNA, 2000 bp, Oryza sativa
aagagggtttattatataatatctaaattatctagctgttcgttattgaacgggaaacatctattaaatagatggttattcatcgtataaaggtttcgctttttttatcttgaagtacttttggttaaacagctgccatgttatgatgttacatgtgttcattttgagtaaagtgtaaaattaacttattaagcagtaggaattaataggtccattaaacaacatctaaagcattcaacacacatgattactgaaatgaaacctttattaaagccatcctcaatatggtgcttacacgagagctggcaagaaaaaggtatttctttagccacattgatgattcgaccatacgttaaatcattagcagtcagtgctttatcaattatggatatctattggtatatatgcttagggcaacaccaatttatatagctaaaataatccatatagatgggacccacatttgtggactttaactattgcaacattcacaatgtatataggtagtaagtagtaggaggaggagagaggaaatagagacaaatgacatattttattctatatgggcagcccatatgcttatggatgacttttgctatttctctcctatggactacttttacaatgtggttaggtagctgaatgtattattttattgactatggactggttttaaagtacattgtggatgcccttattgatatatctatgtctaatggtagcatattctaattcatatatctgacactaatttctcatctaaaacacccgtttaaattgtttagttaagacagcttaatggcgtggcaactttttttttcttcttctaaacacacacggttaatcattttgtattggatgtgtctaagaagactgctagtcatagaagggttatcagatataacccactattgccaatgagtgacctttctaatttgattaaaaaagaaatcgttgtatgaataacaaaatacaattgagtgttcacaaaggtctcatcaatcaaaacatgctgcaaaagctaaaccaattaccaccaagcaataagacacccaaatccaattggaattgaccaaaccaagagttcatcgtactgtccacaaacttattaaaaaagcacacaccaaaatgagcaatgttagttgctatagtagattaatgggagtgtttgagaggagagaaaagaagaaaactgagaagacacccaaaacgagataaaccattaggatatgattaattaaattaattatttaaacttaaaataagattaatatgatttttaaaaataacttttctatataaaatttttacaaacaaaacaccgtttagtagttcgagaaccacgcatatagaaaatgaggtctcccgatcaacttgcaagaaacaaagattattacgtcatcgtcccaaattagttgtctttctaaaatactgtaaaatttatctcaaaatagttgccactcttatgtatactatgatagttgtatcaatctattctcatttaaatttctttttattttaatcatatctcatctttctgcccatgtaaataaggaacattataggcttttattcttatattttaatatatgaatttgttgacgggttatatacatatagattggtatggaggcggaatcaggatatatgatctacgagacgccggataactgattagttagtgtgagacggatgaagcagcaggtgagagagccaaaaaccagagagaaagcaagcaaaccacagaccaaaaaaacmaaaaacaaaaaaagccaacggcgcaatgcaaataaacggaggtgtacacgcaaactgcaaacgaagcctatggccggtgaccatccatccatccgttgacccggtctcctccccgccacgtcaccacccgccgatcattcccatccactcctcttcttcctcctcctcctctctctctctctacctcgccatcgctctcctcctcctcctccatccattcccctcctcctcctcctcctccc

SEQ ID NO: 5350 - DNA, 2000 bp, Oryza sativa
catcgtaatcatatgttctcgccctgagtccttgctttcaatctgtaactgcaggtggttgactccaacaaaactgcaggggcttccaagcaaacattatctgctgaagatatggaggatcaacttgaacagtttaccagcttgatgcaacagaagttcctgtccggtgaagactctgagcatatggactactctcggatcgataacgacgagatgctggatgaccattggtcaaaagaagccaactatgatgcggaggagaagtatttcgaagaggattagttcaaagttcaaactaggctgctgttatagcatcagttatgtagtgcatcatcgcatctcgttttttttttgttcatgttcagcacttacttagtctatcatgtacatatatctatatatgcagttgttgcccctctaatccgaataagttgagtaacttgcttatgaaaactaccgtatgtgttggaacatcaatcagaaaatagggtcctgtcttgtggagatgtttacaaattgcaaaatatttttatgcactacctccaggatgatggtgcatgcagggaaagtaacatgtgtgtattctatatttctaggggattacttgttcagtctgaaactgtgaaccgcatgagggaagtttccttcaaagcgaagaatgtatatatgggaaggcttagttagaagcagcgtgatccaaccagggtttgctttggttggacgaattggtcttcagacacttcaacgcaagctttagtattttttttttctctttgggttttgtattaagcctgcctcgtgtgctgttctgatgcacgctttctttgtaccaaaaaaaatggagacaaatgacttattcctgaagtttttgtgaaagcttttgccgtgtcttgcctgttccattgtttttcttttcttttgctgtgtttgtgctagtgtattgcctaccttcttctttttattaattttctttcttttgcattagtgccttgactaccttcctcttttctttccttttccttttgttatcggttaccacagtgtcttgcctgtttggtgcaagccgagaggcaaaaccacctcggttaataaagtcttaagagaaagggactaccatggtcaccgtgtrtacgggccaaccggccaagaaaacataaaagtgtatgagaaaggacgatgtacatatacccctattaatgtgtatagtagatttctttcagaacatttaatccgtttgcagatagtgcaatttttattgttttgatatcccccattagatgaatatcttaaaacacatattctataacaattgaagaaaaaaaaggaatacatttcttttttcaggaatagatagatattcaagaacaaataaaaaagaaatacatttttcaggaatagatagacatttatgtaccagagggataaccaaactattccctctaaaaaagttagtttttactctgtcatttttctttaaaaaaatagctttgctcatttttaccctgcttcaagaaaaaaaaacaattatagcatgcttgtactgtgaggagcagaggccaacgccgtcggtttgctgaatcagcaaaagccgaccaccgaccccacgttccgcacgcacgaaacgaaagtacgaaacccgcgccaacacaacccaaccaatcgtttaccgccacgtgcacgccaccccccaaccaaaacaaaaaccaaatttaaaaaatactacaatataaatactagtataataatttcttctcccataaagcttcgaccgaatccggctcgcctcctattaatccctctctctcctctccttttttcgatttgagaaaaaaaaaatttgctcgccttctccttccctcgcggcgaagacaccggagccaccactcgccgcccgcctatttcacgccgccgcgccgcgcagaccgacctcgtcctccaccccacccatctccgacgccgcggaccccggcggccgctcctcctttgctccattcatcgcc

SEQ ID NO: 5351 - DNA, 2000 bp, Oryza sativa
ccggttttgtatagttaagggaccctcggtatctggttttacggttcgaggacgttcttgtatcccgatttcaagttgagggaccttcggtgtacgttttcctttaagctacgatgggaggccggaggcccagttaattaagcacaacttggcatgggccagggcccgtttagcccaacacagaacatggataaatacaccacccattcgccaaagagcaaggtaggcaaggcacgcgagccctagccgccagccgactcgaccagcgcccggaggcggagcacccgccgccgccgccctcgccatcgtcggcttcacccctcatcggcaacctagtgcaggtgagctccatctccacccctcctcatctcctctcctccccacaccatctttcctagtctccctctgttgcttcctcggatctgcttcgctctcgtgctctacgcctcacacgacgcgctcttcctcgtcgccaccaactttgttgctgcgcgcgcgtacgtcggtgcgctgtgcgcgttctacttagtttgccttgtgatgctgctcttagtcgggttagtgcttcgtgctgtgctcgctggtttggcgcttcagatctgtgtgctgtttgctctcggagacgctagatccatagtcgtcgacttgcaaatgctgcgagctaatatgattcttgttggatttcttcgctcctagcgtgagaaatccgaagaattgggagaacacggtctttttttttgtcccaataaattggttggattgttctagtatatattttttattatttttttctcccaaattgttggaatggcttctccctctttcccaactggttggattccaaattgttggaatggcttctccctctttcccaactggttggattgaggtgaagcgtgcttactgtattttttccacctggatttggtactatctttactctctgaactagttgggaacggatattccaatctcctgtctcttcgtgtgacttctttctgcttccacgtggggttctggaatcttcaattcactgtagtataagttcatatcttatttattctcatagactatgatttggtcgacttcgctcatatattgccgtgtagtagagggtttttacaattattcacgttcttggattgctgagatatcatggttagttgtgctgtttgaactggttatggccctcccgctgtgaattgccaaggtgtctgaatgttggtgattttgtggatagttcacgtgttggacaaagaatgcattataggagtgacaaatatgactggtttttgcaaaaccggtatatattgtggttatgttccttggagttacaaataacttgcagtaatgtttgaactgtgggatggttatgacatacatcttatattgggtcgtgtgtgaactgtttgttcatctggatgatgcataattcacacgagttggatgaaaggttctacctgaaatggaagaatatgtttggtttctgtaatttcgttgatttgttggttacatctctttgttgtatattttatctttttaggtgatgtagctatatctgtttccttttatatgacaagacgttgtgtgaaagagggttccagatttatttagattttacgttgtcattgtggtcttgtggtaattgatattcattgtttgttcagattattttaattgagtattatactccctccgtttcataatgtaagttattctagcattgtccacattcatatagatgttaataaatctagacatagcatctatgtgaatgtgggcaatgctagaataacttacattatgaaacggaggaagtagtaattaactacctttgtacttattttgaatattctacttgttcgttctaactatttgtcagtagagcattctaacgttttacagcttggcaaatttttgcatgtcattatcgtatccagttttccacctaactgaaatccatgtcctgaaattgctttttcataggttgttttctgaag

SEQ ID NO: 5352 - DNA, 144 bp, Oryza sativa
aagsgcgccgttcggcccgggccggccggcggcgtttcccctccctccctcccttgcaaatttggccggaggagggaggggggargccggcggcggcgamgacggcgtggagcggcggcgacgacgacgacagcggcagcggcg

SEQ ID NO: 5353 - DNA, 1339 bp, Oryza sativa
cccccccccccccccccaggaattggacgtacacaaytcacacttcaaaatccagtttaargctcatttcatacacattatkgtttttatatmaatyakttswmwtycyataaaactcctctytcataatcatawgttccaaaagagacctgataatctgcctcttaaccattgttggataaactaccaaactaataatactatatcactaaaggaaaaaaaatgtatgggaataatgttagaaaatggaaatgataaatggaaacaaaaacgaaaatgacattgttgttgttttcgtattttactgtatttttacgaagattacttttttatagtatggtgattaccatatttctaaataccctaatatctatgatcaatgtatttatttgatccgtagctttagaggtccgtcaacctctcaaccaaatccttaacttgagttcatagctaaaagagagacaatttgtaatctacctagtgcaagcttaaatttatttggtatattatatagttatgtaagctaaatatgtgattttgcagtccatttttttaaacatttattatcccaatcgatgtcgagatgtttccgtgtgtattcaattttcgatattgtttttcgtttaacatttatatccaatttctagaaaatatatggttactaaaatggttgaagttgtttttcgactttttttttatcgcatagaggaaccagttcctgtaacttaccgctctctatgtccatgtcaactatccatgttagatagcagcgtatgttagagaagttccttttatgcataggccgtgtttagttcagcgcaaagtttggattttggttgaaattgaagataatgtgactgaaaagttatatgtgtatgacaagttgatgtgatggaaaatgactgaagattggatctaaactttgtatctaaacacagccatagagccatacatggtgtgcagtgtgcacacgcatgtgcgagtgcgagcgatctttttgcagttaaaagtacattataggtcctaatcatatagtcaccctatcaaagaaagaagctctttaaggtggtgaaaaaataatgcgaggaaaaaaacagagagaaatttatttgccccccttgcagagctgccacctttccacgaagttgccaaaattgacccattggagcacgtttttgccaaggcgcccccctctcggccacaccacgataaataccccccggacgcctccccgttccaaccttactctgcagcctcggagcagccgcctcccttccaagaacacacaacgcaagaggagcagagcagttcagatcagagcagggaaggagcaagcaca

SEQ ID NO: 5354 - DNA, 2000 bp, Oryza sativa
tataaatatagttaaacataaagaaatttgactaaataaaaaaaatcaaagcgacttataatataaaacggagggagtattgtctcttttagcctatagaaaaatgggcatgataattaaatgggccgtcttattagtgaacaatttcagcccaagaagatgttaaatgggccagcccaatataacgagtccggtattcttattcccagaaaccctagccgccaatccccttatatattgacgcctttgtgttcgttctccttgctccgtccgctttcgccgcctccctcctggcagttcttcagataatcagatttgtccatgaggtttcaactgttgcattccattgttgagttttattctgtttgcgtttctgtttgtttttgtcatggatctggctgattggaggctgtgatgaccaaaaaatacctaccctattttctgagggattccagtccttctgattgatagaaaccaaatggatccttctgagcctgccaagatcttcagattcttagttttgtattcggctttttcgatttgtcttcgtatattgcattcttctaaaagcaagcaagattcgtaacagttgatgggatgataacctttcacagaaactgtatgtgttgacccaaaattcagactacaattatctgatcaactcagacatcttgctaaagggggtttctttttttctgctttcaaatcaagaacatttttttttgcctatcttctttgcaaagaacactttgattagatgtaaactgtgcacaataagccgatgctctggatgagaagaggaaggaagcatggtagtgtgtacagagatggattgattttgttggtctgcatgtctgcctgcggtgatgccttcgggctttgatctcgcgggcctggatttgacccacacttcctatttttcttttaatctcgtaaactgatttaagaagcaatttcgcggctgttatattctgtttttaactttctaaacccaaaagaacgactaaataacattacaatttgcaggttacatttaacattgatttcccagaaaaacttgattcaagaaccagtatgactatccaggttgtgattgatattttacatctagaacaacgtaattgaggaactgctaccaaatgtgaactggaattcaagaatttgctctacggctctaccagctacatgctacaactactatcaaaatgttggtaccttggaaaagttacagttcacaggtagaaactgccaaatcgcggcatggtttggttaagcgtaatttatgaagttcttcatagagagagagcctcccttgttatcaaatatactccctatcaacaaccagttctgcaagtgcaaggttcagagggtcttcagacttcctcgtgaagagattctgcacacaaaacgattctagaggtacgaacaaaacacccattggtcagttgtgctttcaattgaacgaaagaagtgaatgatagatgtcccctgttggtcagttctgctgtcaacgacaaaattatcatttgttgttttgacatagagcaaattctgacagaaaaatgaaaaaaagaggagataacattcaaacactcccacagcagtagaagaacatcagaggacagcttcaaatcttcaggaaaagaatcagcaggtctgggtagcctcagcctctccatcagagctacgcaatcttgttttctcagcaagagtttccactctacacaatcctgttgtatctatataaagtcttgcwatctcggtaaaagtttccaagtttccaggctctakgcaatctkgctatcaaggtaagagtttccagctctatgaaatcttgttatttctaggatatggattttcatccctcgaggggatgtcttgcatatcatctacgcaccatgacaaccgcaagttggacttaaatcttctttttttcacccagatcaaggagccctcagaaatataacataatgacaacatgaatcattcatcagcacgcc

SEQ ID NO: 5355 - DNA, 2000 bp, Oryza sativa
gggtcgcgcgaacgcgcaactctactcgctagttaaattgagagcatatgtgttaggtttattgttgggtacggatcgatatgatagatgtgagccatgcatttgatttttgtatgtgttcattgtatatatgatagactaatgtatggttaggacacgatttatatttttagggtattttttccatgtcaattaaatatttgttgtaggctagtagttgataacattttttaggcttatgttgtggtcaatcttaatttatgcattgataaagaaacttttgggtttgtacgacatttaggaagaatgatagactattttcaaaagattataataatacgttttcggtgtagatggatagacttgctcgtctttactacgttgtaggttggttaattaaacgttatattggtgcacatattgagttcgaggatatgatgttgaaggacatttttattcccacccatcccactatagatgaactaaggttgcaagtgaaagatgttcttggatggaccaaggagaatgtgagtataccgcgctcttcgatttccgccaacaaatcccataaaaaacatctccaaatcgatcacatttaagaagaagaggtgaggaaggagagagagggaagggaggaaccctccctgttcttcactcaggcaggggggaaatgaggttggggaaggggggagatcccgcgcggcttagtccttctcagtggatggcacaaatgatgctagcattatgggttgacccaaggtgccaatgtcattggcgtcatcccccgggtgccccgtcgaccgggattccatggtggcaggggaatggccacggcgtcagcgtcatttgcaccaaaaaaagatttattaatatcataagttttcttgagagttttgtttataaaataagttttagaaaagattaaattgtaagaaatctaggctagccattcccgcacaacatagggaaggaagaggttaacatagggaaggaagaggtggggatgcaaggcatatcgcatccactgctagcctaaaatccaatttctaatccttcgttttccactgatacttttcgtgaaactactaaccggtgtgtttttgcaaaaaaaaaaagttctataggaaagttacttgaaaatcatattaattaattttttaagtttgtttagctaatacttaatcaagcatgcactaatctacctctccattttacgtacttgagaagggctcccaaccccaatggaaaccagccttaacatgattaaattccaatcattattatcaatgtttaagaataaaaatgtactaggagctacaagagagcacctatacattttactttttcagaaatatctcgatctaaattggggaacactgttcctagtaagcaaaagcttcttcacgtacgaacaaggcaacagcacactccagtactccacataccactatcacacagtgggatcgcttacgtcatatacttttgtcctatccagccgccctatgtcagccacatgccagatgtgccctacacgaccagacgcctttcccgttaaaagcgacagcccatttatgggccccacaaccctgccgccctaatgccctatgaacactatattaatccctccaactgcacttagagtaagtttaatagtatagccaactacggactccaatttatttatagccaatctaatagctcattcatataataattacatactacactattaatacttggtcccatctgtcatacacacactgcatcttggagtccgtgctacagctggttacaaatctgtagcccgctgcccatctctctctttatttatcttcttaaaatatgtttacagctggcttatagcatgctattgtacatgctcttagcgagctctatataaacctcgctacccgattcgctgccttcctggaaccaatcagcagctaaaagtcaatccacgccaccatcgatctctctatccaatccaagcgcgcaaatca

SEQ ID NO: 5356 - DNA, 2000 bp, Oryza sativa
caatagttgtaaagggtagaaattttcttgctgtttttcttggaaacaatttcattgcgcctgatctgatggtcggtctggtaatcaaatcaccagatcctgaaatccaccaaatcaaaccgtgagatttttgcagaggcaaaacaagaaaagcatctgctttatttctctcttgctttcttttcatccccaaccagtccttttttcttctgtttatttgtagaagtctaccacctgcagtctattattctacagagaaaaagattgaagctttttttctccaaagctgacaatggtgccggcatatgctaataggatactcccttcgtctaggaaaaaaccaacccactacaattttgaatatatatttattcagatttgttatgcttcctactccttctcaggtatggtgagatatttcatagtataatgaatttggacatatatttgtccaaattcatcgcattatgaaatgtctcgttcgatctatgttgttatattatagacggagatagtagattcggttatttttggacagagaaagtactcgcctgtgctagtgacatgattagtgacaccatcagattaaaaaaacatatgttttgattaaaaaaatggggaatttggggggagcaataatttggggttatccattgctgtttcatcatgtcagctgaaaggccctaccactaaaccaatatctgtactattctaccacctatcagaattcagagcactggggttttgcaactatttattggtccttctggatctcggagaaaccctccattcgtttgctcgtctctgaccaccattgggtatgttgcttccattgccaaactgttcccttttacccataggctgattgatcttggctgtgtgattttttgcttgggtttttgagctgattcagcggcgcttgcagcctcttgatcgtggtcttggctcgcccatttcttgcgattctttggtgggtcgtcagctgaatcttgcaggagtttttgctgacatgttcttgggtttactgctttcggtaaatctgaaccaagaggggggtttctgctgcagtttagtgggtttactatgagcggattcggggtttcgaggaaaaccggcaaaaaacctcaaatcctcgacctttagttttgctgccacgttgctccgccccattgcagagttctttttgcccccaaatttttttttacttggtgcagtaagaatcgcgcctcagtgattttctcgactcgtagtccgttgatactgtgtcttgcttatcacttgttctgcttaatcttttttgcttcctgaggaatgtcttggtgcctgtcggtggatggcgaaccaaaaatgaagggttttttttttttgaactgagaaaaatctttgggtttttggttggattctttcatggagtcgcgaccttccgtattcttctctttgatctccccgcttgcggattcataatattcggaacttcatgttggctctgcttaatctgtagccaaatcttcatatctccagggatctttcgctctgtcctatcggatttaggaattaggatctaactggtgctaatactaaagggtaatttggaaccatgccattataattttgcaaagtttgagatatgccatcggtatctcaatgatacttactaaaacccaacaaatccatttgataaagctggttcttttatccctttgaaaacattgtcagagtatattggttcaggttgatttattttgaatcagtactcgcactctgcttcgtaaaccatagatgctttcagttgtgtagatgaaacagctgtttttagttatgttttgatcttccaatgcttttgtgtgatgttattagtgttgatttagcatggctttcctgttcagagatagtcttgcaatgcttagtgatggctgttgactaattattcttgtgcaagtgagtggttttggtacgtgttgctaagtgtaacctttctttgcagttcctgaaattgagtc

SEQ ID NO: 5357 - DNA, 2000 bp, Oryza sativa
atcattcgttggagtagaggtgctatcccatcagatgtttaggacaaaacgaaggggaatagaactctgggtacttgacaaagggcctgtttaggggagcttgtcccagctgtagcttttcccaaaaactgcttctgctagaagccgccccaaacaatccacagcttctgagaatccatagttacagattctgaaaaatgaactaaaaagcaagaagctgaagaagctaggtttcagagcttttttagattctcagaagctggctaccaaacagctgcttctcagaatctaaaactcccccaaacagacccaaaaacagctgagtaaagttatttttattaaccaaagtttcacaatgaactaggacaagcctaaccttccacataatacatatataattgccattgttgcattttgagggacttaattttagccaagccatgaagccgcaactgatggtgcatcatgcgagataaaggattggtatggcagcaattgagtatcctcatcacgcgagaaaaaaagtttctttggtatttcatacaaagtaagttaaaaaaagaacttttttttgggtatttggtggtaaggacttcggttgtggtggacaccagccctcgaatccattctcataacttaagaagcaaaatgcaaaaattacagcataacccatgtcgttcttgggccaaagccaacatggcagctcaagctgtctaaccccggtccaaagtataaattaaagatggtaaatatatgtgatgttaaatgaaaagattggtttacttctaatccattgtgaaacttcagcaaataaagatagcccaagataagtactcaaaacaagattagtgcaaatatggaaaaaggaaaaaaaatagatggtactatttacgtcccaaaacttatattttgggtagaggagacgaattgaatgatgaatcaccatgtatatattaaagttatcagtgttacacatttaaaagtagaggtagtaataccataaatagttgatataaccaacatctgcatcttcaaatttcaacttttttaacttaagctgtatatcaacttttttaacttaagttgtattttaaattgagttttcttttgcacatgctttgttaactcaaacatgatcattacctgttgtatatcattgaaaccacacaaaatctcttgttccacttagaacattaatttggttttggaacagatccagttaattaattgatacaactaatgagtggtaattatgaagtggaattcatttggcagttgaattcaattctaagttgataaagacctgctcaaccttttatttttttaaaacactaatttgggaatattttttggcaaagtaatactcattacatagcaacgtgttgatcaatggatacatttgatttccaatattctccggctgcatataggctcccctgttccataggaaggtttgactacaacatattatatctggggtactaaataaataaatgtgcaatgaaaccacatggttggtgatgcaagtcaaccccagtattacacagctgctaaactgttgaatttgcaagctaagctacttaatctccatataatagtcttcttcctctactctagcaaattaaattaattaattaagctattctccatttaatccagctagatcactaccgacagaaactgcccccaagctgaggcagcctcatgacccactgacaccttggccccaccattacatgctctgcattagatccttctgttggacaccctataatcaaatgattagcacctgtaattaactaagacagtgtaattaactaagttgtggtccgaccaggttaacgtgtggtcaacgacgagaggtcagccatggcgctttgcaacaccataaaaagggcagcacccgcgagatgacgacgaggagacgaagcaattcaaacagccaagaagaaagaggaagaaggagctcgcgagatcgctagctagccatggtggcggcg

SEQ ID NO: 5358 - DNA, 2000 bp, Oryza sativa
atatatgtagaaaaaaatagtaatatttttaacccaagacaaatttattatgaaaatatatattcaattatatatttggtgaaactaatttaatattataaatattactatatttgtctataaacgtagtcaaacttaaaacaatttgactttgaccaaaatcaaaatgtcttataacctaaaacggagggagtatttgccaatggaaatcgtcatttgaacctaacacaatattaatcagtacactttcttactattttggaggttaacagtggagtgtcgctgacaaaagtcccgtggaaatgtttgagttacaacagggaaaacatttttgtttgccatatgcatccttctccatctgtttttctttctttttctttttttttaaaaaaaagagcactacacattgagcgctgcaacaatgggccggcgccaagcgcattacttcacccctaatgggccgtcatgaacacctgatgggtttaatgtcatgaaacctgaactcacgctctctcgctgcattttttttttgcagcaattcaagccacaatgatctggaagaacgttggccttccaaatttctttacattgtctctaggaaaggacttgcaggtgcattcagttagtttcagtttcaacaaccctgcagttttatacttatgctgttttcatttaattcgactagtttcaacaacctctagaatttcaaatttagatagtaataatgcatgcatgtgattagataaaaagttagcgctgacatttcccggttgctttgtttgctaggattgtgttgcatctcatgattctcatctcgatttcgcggtaattttcaaacaagtgtacaagcttctcagggtacttcgcatccaagctagcactattgacctgcatctccttcagaatttgcacgatttgcatgtttagtggatttgcaagattgaaaatcagttagccaagtttgggactaaattataagagcctaagaggtcatcagtgaccgatttaatttgtcagccacaccatcagttctaaattatttttgtggcgtccacaaatttggcctgcatacttttttaaaaaaatctgaattaatcaaccctgttatgccaaaaacggttgctgatgataacatttgatttgtgcgtacgtatctgctgacgataaattacgacagaagcaactgaaactacgatatgatggtctgagaaacatcatatgccttaacggacgatcacattacagttgaattttctagttactactaactaattgcttctctaatcgagtctccgccgtgcaactcgatcacatgacacatgcatggtccatacgcagtcaaaaaaaacaaaaacmaaaaaccaaaagaactttgctttcgtctaatatatttgaggcgcgcaagctttgcgtgatcacgaaaagaagtcacagaaaaacgcaggcggtgaatactcgatcgaattgagttccccaaatcgatctcatctcatcaacaaatgctctcaaaattcgtccaatgcataagcatggaagtgaatgagtgatccaatatttcacaaaaacccagctctcaaaagcccactgcaaccgcttaattacttggctataaataaggtggtgaagtggccatgaatggatcacaaagcttcacccactccaaacctctaacacctgcagtggcctgctgcctatatttgtccaattcgacaccgatcgatcagcttaagaggctgagcttaattaataatcactagtggtcacacgtgtaagcactactagttagcatcagtttgcataatcccctcgcatatttgcagctagctagttatacatatatatggcaggaatctagcttggctgtgcttgttcttgatccatccatcgccaattcgccatgcatgcgttcttgccctgagtcgatcttgtgaattggtggtggtcggagagatagattggttggttgcgagggcgaggcggcggcggcggcggcgaagggg

SEQ ID NO: 5359 - DNA, 2000 bp, Oryza sativa
ttatctttgagccgatgtcatataagcattgatcggcagtcattgataagtaaaaaagaactaaatctacccgatcggctgtagatattaacaatatataatccttatgtcgatatatacttaaatcaagtgattgggatagatcggtcgccatgccgatacagtataaatcacttaaatcgaaatatatattaacaacaaaattatatatgttcatagcatagccgatcagatagatctagcatgcatcggctaatactccaataccgctcaatattaagatattaaagcaagtagaacataccaagcagaagcctaatatacttaaaagcaacaagatcttaacataaagggcagatttaacatgtcgatcaagcatatagaataactatagttaaatcaggtaagatcggctgaaaccccgatgctatcctaatcggcaaccggaagacaggctagagattgaaattctaagcacgatttaatagatcaaactcaactgttgcaacattaagtatgaaaaaaggacaatatctagacaatcaagtcgttggatgtttcatagagtggtggatatcttatataatccaagctaacgtcgctatttaacctaatcggccgccttctattaacagatgttagccgattgtaggttagatgacgatattaccgaagattatgtaagatatatgataactcgataaattacataaacaagattagagtgtcataaagatggaagcactaatcccgagaacgcaagccgtcataacaagttttacctcttgttgaagatcgaaaccgatacagctcaacccgaaagcaagaactcgtcgaaataaaacgaaagcaaaaagagtggcgatgtgccgagattgtattgaacgtatgttgtttgattacatggggttcgggtctatttatacccgagaattacaaaatatgtccataccggacacgactcttatctctaacaaactctaagatatcataagtctttgcggcagacttttgcccaaatatatctctaaggaaattacataaaatatcctaattaatagatacaattgccttctcaggactctatccatgcgtggcaatcatcttgaagcatatcaacccaacctgatgttgtacaccaagtcgtattatcgaaatcggctgcattacctaaccaagtctgactcgaacttagccgatccaatcgtagccgatccggactccagccaattcttgctctgttcccgcgacaatcctcatcttagattccgcttcgatctaatctccctttccgatgctgatattatcaaatttggtcgttaacaatctcacaacccactcacatgtatgcacacacatcccaaattcccaattttttaagcttggtcgaacaacctggtgttctataaggtgctaaatttgtgatttcagacaaccacttacaattttcattaaatttgtattatttctaaaaaaagttcttttaaaagattgtgagggcacatccattttgcgattaagggagataaaagtagactattccttctcaaataacagtatttccaaacgtagcacgattagtgtccgaggtgaattgacgaatctacggatacgcgacgtgtcacgtgtgcggcactacagccatctgcaaggagcggatatgctctcggattaatctgttttcgtccataagtgctacagtttgtgatttgtctgatcatgacaaaggtctacacgcatgtacacctgttcacataatgacacgatcaaaatctgttaagtacgtcccacgtacgatacgactacgatgccaacggcatctttgattatttgcatttgcattgacttgatatagtatgtcaccatcacactatcacaattcagtcatacaagtcaggcttggagtactgaacaggctctctctagctctacatgtataaaaaaaaatcagtttcaagcatcatacaatatagtcattcattcagctgccacccgccaag

SEQ ID NO: 5360 - DNA, 2000 bp, Oryza sativa
ctaaagcactcaagaagattatacggtctgctgattcctccacaattaatcagttacgagcactgctgcttagtgactctcttagtacaaaggcccatgccattacagttcttgggcatgtacttgtgatggcttcccagagagatctagtgcagaatggagctccagccaataaagggctcagatctcttattgatattcttgagtcatcaaatgaggaaactcaggaacaagctgcaactgtggtggctgatattttcagtacccgtcaggatatttgtgatatcttaggaactgatgaaattattcagccatgcatgaagcttttgacaagtgggaaccaagttattgcaacacaatctgctcgagctttaggagcactctcccactcggctaatgccatgttgaagaacaagatgtcatgcatagctgaaggctatgtgcaaactcttatagagatgtcaaagtcaccatccattgatgctgctgaaacaacaattgctgcattggcaaatttcctatcagatgcacatattgccaaggaagcactagacggcaacatcgtcctggctttgactagagtacttaaggaagggagcttggaaggaaagattagtgcttcacggtcgctctgtcagttgctcaaccagttccccctcaatgaagttattccagattactcgcagtgctattttataattcatgcactgctggtgtgtctatctggcatcaatttagaaaatgctactaatttggatcccttgaatgtacttgcatggatggctaggaccaaggagggcgcgcactttagttctcccttgtggtctgcctttcttgatgttccagaaagcttagagcctttagtgcgctgtatcagtgttgggcttccaccgattcaagataaggccattcaaattcttgcaagtttatgtcaggaccaaccttctctacttggtgagcatttgaacagaagtcaaggatgcattgcttcccttgctagtagagttattgaatcaacaaacatggaaataagaattggcagtgccatcaccctcatatctgcaatgagacacagcagggaacactcaattgatgttattgaagcatcagggcatctgaagaatctaatatctgcatccattgatatgatgaagcaagattctgccccaacatccctagatattgaagtttggaaaccataccccgaaaacagtttgtataactatgataaggatgttctgggtgtgtctggatcaggaaaggtcttggaagaaacagttgcgctttggttgctctcacttatttgttcttctcatttgagtagtaaacttactgttatggacctcggtggtgttgagactatatctgataaaacttgctagctacaccactaatcaacaggtgcatatgttttgccttccctttcaaattttctctgtgcctatactcgctatactatttctatatatcatttaactgcaatcagttggcttaaattcaagatgcttattgcttactgtttggaactgctatattatttgagttgagagattagggatacatcatgccatttccccctgatttcaccattttaccttgttactttgaagcgcctaagctgtataaaagataaaatatatccaaatagaattcaatatttacttgtacggtcaagatcctaattagctgtttctgaaaaaaaagatcctgattagctatctacatataatcagctgattctgagcattttgtccagaaacatgatagtccttgtatatttagtcgttctagacaccagagatatgatagctttacttattccttaattatattatgtttatgttaccaaattatactgttttgtctcatatggcaaattcctggccctcaatgattccatgttacaggaccaatatgaagactcagagagtgtatggacttgcgcccttcttttggctactttatttcaggattcaatgcttgttcaatctccagcaata

SEQ ID NO: 5361 - DNA, 2000 bp, Oryza sativa
ttggtttgacatttcgagccaatctccttttatcttattccattttataattatcaatgtataattccttcaaatttacattgacgtaacaatggtactccctccgtttcacaatgtaagtcattctaacatttttcacatttatatagatattaatgaatctagacatctatatatatttagattcattaacatctatataaatgtgaaaaatgctagaatgacttacattgtgaaacggagggagtacaatataaggtttatcaagtgaaaccgtgaagattgtgctttcatgaaagcattgtatctaaattttgaatacaagttcaagattgaatcaaacaaataaacatggttatacttgttttttttaaaggaaggcaagaactttgccttatatatataaaaataaacttagaactactctaacggttaaaactcaactagactttttcgcccctaccccaaagtttggcctcatcttagatttatttggctactatggttgccataaccaactattgcataaaacaacaaaaacacatggctatctcttagtcttgaaagtcaataaatctatatctcatacgttataatactctaacgtaaaaacgttactgtactcactcaacatccataacttaaaaatagccgttatcaataaagcgccacaatgatagttgcataaagttacaccacatatatattactagtatactagttattgatgatgatagaattaggtcactatcaatgtctcctaggtaaaagctgtaccgggcccttctactgttgcaatcgcatcttttttcaaaccggaaacgatgattcacatttatttaaaattttaattctcaccacgcaacgcaacgcaagccggctgtccttttccagaatagcatgaaaacgacaggactgatccgcaataacgccatccctttctctctccactccactccactcttcccccctaccctctcctctctctctctcctgcgctgtgacgcgcacacttcgccggagcgaccgccgcctccggccaccgtctccggctatctggtgagtcccgcccccgctttccttcctatactgccaatctcgcatcggtttggttctggcggttggaggcgcgacgcgacgctgcgctagaattcgatcgactaaagctgagcggggtggtggttacgatgggggtgtcgacgagcgtggcggccgagatctcgcgctcggtggcccgccggcgaggtagaggcggcgagatttggcggtggtttcgtttgatcctgacggcttcggccggcggcggccggtgtattgcccttccccatgcatgctccagcgccgagcaaacccgggccccctaacgacgctacccaccattgatgccgcacgcgccttcgcctgcgcaggtcctccgcctgtcgccccgtgcggcctcggacctgccaatttctaagaatcgaaattgtcaatgcccaaaatatggctcaatttttcttgcatatttcttaagtgtataagaaatgagatcggtgagaagatggcatgcaaagctggggaaagttccaataaaatgttgctttctctctccctcaggagctgaggggaattttcttatttagagcggtaggtgaggaagttagtgggagttacctttcctcttttttcttgcgaaattggacgatacactagtgttttcttgagatcatttgtagcaagtgctgaggcatctcaagaggaggagctggtaaggggctggtcatcttcaatctcacgcagtcaagcctgaaatcatccacctgtctcacgagtcatgccaaggatccccgcaaaaaaagagtcacgccaaggatggcctctggctcagtgttctgctccctctgagtgcaaagaggtagatgctgccgctccagctcgtacggcattggcttgtcaaggtagtagtagcgtgcatgatggcagattaattggcgggaacgggtggtttaagaggtggcatt

SEQ ID NO: 5362 - DNA, 512 bp, Oryza sativa
  misc_feature (1)...(512): n = A,T,C or G
attaatattaatattaatgatctagattaatatatatgtctagattcattaatattaatataaatatgaaaaatgttagaatgacttncattgtgaaatggagaaatgttagaatgacttacattatgaaatggagagaatacttgactacttgtgtcactctccgatctccaccaattcgccgcgcccactcgaaagcgcacgccgccgccgccgacgacgatcctcccaatcacacaacccgatcaccaacgacagtcgacaacaagaccagaataatccggtggaaaaaaaaacactttcttcgccaccacacacgttttttttgtcgctgtcaacagcatcagcgtccccgccacctaccgatcatcatcctcatcctcgcgccaaaccaaaacctacgtgtcactcgtcgtcaagctctccacgattttgcaacgtttttttgagctcaaaagattggttgattgattgctttggttgttggttgggtagagtcgtcgccggagttc

SEQ ID NO: 5363 - DNA, 2000 bp, Oryza sativa
ctggatgggccgccgacttaccgttgtgacacacggcccatctacatgggctcctccggcccatataaatgggcttcaccggcccaagatggctcaccgaaaccctaaccaggcagccgccgcgactggctatatatatactcatacttgctcaggagtagagacaagcatcgccggccgccgctcctttcaaatcatattcattctatctctatcgtgtgctttttatcatcgtggtttgtagtcgtgtgcgttttattttcgtagtttgtgtaattggtttgattcgttgaattttcggggtggttttgagttgttcgtttctttcgatctggattttttttttggggggtgcggatttgcaagatcagcttcttgtttggatctcgagcacacgcacacggtccaggcaatcggcatatggtctgccatcttgcgagattgaaatcgagccagcttaaactcacctggatctgaccctcggtgattttctgggccctttcggctggcacatgcccctcgtcttcaaaatattcgagatttgtctttttgttcttggttatagatctcgaagcaaagcaaacgcactctgtcccaagacttgtcagtgttttgtggcaatttcttcgtttgcgagaaggatgttccgagaatctcgtacgccggtgaggtttcccgtgatctggccgaggttttctggatacattcaacgcggaaagctgcttttaattttgttccaatttgctgtctttgttgtaggtctgcaccaaattcgatctgaatgtccttgtgaagcgtgaaatcaaatttggaataacatagtacggagtagtgcagaaccgaaatccgcatgaaagtactctgtatctgttatctgataaactgagaatttcgaataaaccggaacataagcattattattatatgaaaaacggagcattgaaaatttcgttatgaaaaacggagcattgaaaatttcgatgttatgctcgtctggtagacgagaagcttatttttcgaagatatatcttccaaatcccaattatgtttgcgcctaattcagacgctcccactccttgagggcttgccggctcgtttacctacattttttgatttaccgaattttattaaggtaacaaacttttgccaactgccagtgtcagtttgtcactatcaacatttggtatttcaggaagtttacttgtgtacctatacaaaaatttagaaagattgcaaactaaacatctaacattgacaaaaaattattaacgagtctacccagattttgcactgtcaaattttaagaagattaatttatcaacaaactgaactagggcttaagtcatggataaattcactcgcactcacgggccaacattacgctcaactggcttgtgggcctaaattatggctgctggaattgctcgaactgatgggccaaaatgaagaacatttaaatttagaaagattttgaagttttttcatcgaagttaatgtttcagtctttgcttttagattattaataatacgtatataaaaattttatttacaaattacttcttgtttacaaatatgccgagctccgaatagctagagacgatccctcaaaaagaaaaaaaaattatagccagagacgaacatacaagctggacgcatttcttcaccacggagttgatttgatcgatccacagcattttcagcggaatatcgcatgaaaatggcgtttttttggcaacacaatcttgaaatgctcgaagccactatgtcctccaccaatcgctcggcaccacccaatggcgggcagccaccacgcatgcacccacctcctcacctttgcaatgcccataagaggaggccagccttcacgccttcctccgccatcccaccaccaccaccaccgcggcctccgacgcctccctcccacacgctcccctgtggccgtacgtgcagccggctgcaccaccagctagcggcggcgggcgccggccggcggcgagggg

SEQ ID NO: 5364 - DNA, 2000 bp, Oryza sativa
tacacaattcttactgtctcaggtcataccaaggaagatcttattgtcacacaattgattccattgaacactgtacgacaatatcttgtaaatggtcagtaaaacctgaaagtgcatgtaccattaatctttttctagccaaaatttatctttcttttgcgggtaggaaacctttatctttattttcacggcgcagtgtatccgcggcgtgtgacgatctcatgcctgtcagggcagggaaacgtacgtacgcgatcccctcccccctgatcaggcgatcactgcaccgtcggctccgtgacaagtaggggtggaaaaaaagtttgggctcgcgagctcagctcgggcttggctcgagctcgcttagcttggctcggcttaaataccaaacgagccaagcctaagcgtcctttctagctcgtttctgaaacgagccgagcctgagctgtctcgcgagtcgcttgatttggctcgtgagcctacgctatcattaattatatgggtgattttattttctagtgaagttattatttgtcaatatgtaatttatcatttatattttgatgaattgaatatataaagttattttaattttacatattaattatttgttattactttttttaatgattataaattatatagcttaatggaaggctcgcaagccagctcgagctagctcgagccacaaacgagccgagccaagctcatgttttagctcattgctataaccgagccgagccaagccgagactagcttgttgcgagccattgcaagccgagccgctcggctcgtttccacccctagtgacaagtgacaacgtcgtcgtgggcatattggggaagcggagcaccctgaaaaaaaggtcgcacgccgcagcctccaccgcacgcttcttcggctcccggatcggatctaccaccccacttcggaaattaaagacaaaaaacccttcgcgaagcaacgcaagcccacgcgtccggttccctccacgagtccacgcccgcccagggattccgcacgctcggaacgcgacccgagcccatccgcgcgaggccacaccacaggcgtgaaatccccgcgctgcccacgagcccgccgcagcgccgcgcgagggcagtccggtcaatccggcgcgcaaccctccccctcgcgacggcacgtgaccgcgcctcgagcagaccaccggctgtccccggccgtcggatcggatcgggatttaacctcgccgtaagccgcggataagcgcgggggattagaatacttaacctctcctctgctctcctcctyacccggcttaagcgcgcgggggggctgcgattcgcaggcgagagcacatgccatgtgaccccaccccaccactcctccctcacctacagctgttaaggccagtcacaatgggggtttcactggtgtgtcatgcacatttaataggggtaagactgaataaaaaatgattatttgcatgaaatggggatgagagagaaggaaagagtyycatcctggtgaaactcgtcagcgtcgtttccaagtcctcggtaacagagtgaaacccccgttgaggccgattcgtttcattcaccggatctcttgcgtccgcctccgccgtgcgacctccgcattctcccgcgccgcgccggattttgggtacaaatgatcccagcaacttgtatcaattaaatgctttgcttagtcttggaaacgtcaaagtgaaacccctccactgtggggattgtttcataaaagatttcatttgagagaagatggtataatattttgggtagccgtgcaatgacactagccattgtgactggcctaattgctctccccctctactgtgtttgcgtctttcttcttcgcttctctttctctctctctccatctcctcctcatcacttcccactctcccccttctgtctctctactttctctctctaccgccgctctcgcagcaggccaggttctctctaatggtcgtgaggcagtgagctcgctcgtac

SEQ ID NO: 5365 - DNA, 2000 bp, Oryza sativa
gcgttcgaggagtcagagccccgcgtgtcgcctcgtccggtcagtccccccgtgcacataccccaaatccccatatcgttgtggtcgtcggcgccactcatcgccatcgttgtggtcgcgtcgccgctcgctagatccaccaccaccgctgctccccgccaccgctcgccagcaaatccgccgtcgttgtggcctgcgtcgccagatccggcgagcatgaggttggatccgctccgcccaactatctctcatcgccctctgctcgcctagggaaaatgagaggggatatgagaagctcgcggcggcgtgagggggctgggaggggaacggttggcggggaaggggaagggtctcgtttggcggggtggaattgggagaagaaggagagcgccgacagtgtcagaagaagaagatgatacggctcgggagtcgggagagagagaataaaaatctatggagaagacgagaagactcgggagagagagggggagaggtgacagtgggtccacatgatgtttaagggtgcatatatacttcttttagttattatagggactaaaatataaagttttaataggtttgataataagatacaccacaagggctgacatataaatagatagtggctgaaatgcaaaatacgttttggagttgtttccattgtggttaatgtgatcttkgtgtggttgtatcctacgtggtgttttgagaccactagtgcttgtggtcttcattgaacatgcccttacatgactcaatttaattatttgcctgaaatatatatggactagtagcagtttcatttttctatattctcaacaagaaaaagaaacaaaactactaaaagacagaacgggagataacagatggatggaatggcgttgctgcaaatctacgccaacttttcatgaaggaaagacggaattccaacctaacctaaccttaatttaggaccttgttagggcatctttagttcgcgaaatgaaaatttttgtgtgtcacatcggatgtttgaccgggatgtcggaaggggttttcggacacgaatgaaaaaactaatttcataactcgtctggaaaccacgagacgaatcttttgagcctaattaatccggtcattagcacatgtgggttactgtaacactttatggctaatcatgaattaattaggctcaaaagattcgtctcgcgatttctcccctaactgtgcaattagtttttcttttaatctatatttaatgctccatgtatgtgtccaaagatttgatgcgatgtttttgggaaaaatttttaggaactaaacggggcctaagcttctactattttcttttgaataaaatttcgatcgtctttcctgcttcaaattacacgtactactttatcttctttttggtttactttcagaaaggaacaagtaatctattttgttgtagtagtagtagtatcaaacacacacaagtttgacgcgcaccggcaccgcccctgtaccgaaattgtttggtcgcctttatcaaaagacacacacgctgcctctctgttgctgctgcggtgtgtgtgctggtgctgcagctgcaggactagtactagcattcatttcagactgcaacgtccgacttgaagcaagtttatccaattgctatggacgctactgttatcgattcgaaatgataaaagcaagcgtcaaaaccatacgaattttgtaacctgtgataaaaatctagtagtatttgccaccgaatgtttttctgggatgctgtgtaccgtgttgttcgcaactaaagtagggggagtcgtggaattctaaacggttcgtcaaaggggagaggaaaacggaggccaacaaatgattccattctatcccatttacgttagggatacaacaccacacatgatagtagtagtagcataaaataaacaaaaaagaaaagaaacgttttcatcttttctgctttacagtagtaggagaaagctgcaggagctctccctcacactcctgatgtg

SEQ ID NO: 5366 - DNA, 505 bp, Oryza sativa
tattattattattattattattattagcacatcacgtgtagcacgcctctgttcctccctttatcatccaataccttataaataatgcatgctcatatacatagtcacattccattattccattgctgatcaatcaggtgtacacatcctcagtcagatctagtgtaagctaagccagtgtggcgtggagccgtggagacgaccatctgacgcaagagacaacaagtccaccaaaggcccccgctcgatcgaaaaggcgaggccggtgctttgccatacatacatacataagcccctccaaagagagggagtggttggctcggatcggagcagttggctgcagccgcagtttgttggagcggttggccctcgcactcgcactaccccccgccctttttctcccgccatatttctacttctcccggcccaccccccctcagctcgccctcctcccgccccccacctgctcgatctccactccgtctccatctccatccgatccaag

SEQ ID NO: 5367 - DNA, 2000 bp, Oryza sativa
aaccaaaaaagccactaaggacaagagccctctccagctctagaatagaagaaacttaacatcttgtacacactacagcaaaaggatccagataagaacatatgagtagggtattacgtttccgtacggcgaacctgtataaactcattgtctcgtgttcccgactttaggtccgcacactagcgccttggctgaatcacaaaatggaggttctgtaagtgttctggacatgagatacttcttacttctattttaggctcggtgggaccaaccatatactaagtttaatacagaatcaagtctcatatatggaaggtgttctggataagggaagagaaacaaagtcctacttgaacactacaaggtctacttgaatcgtatccatagttgcctccctcgccttacttggacaagagagcacccgaggatataaatacaagtccaccagaaggagaagggacgcacaaataaaaaaccaatacagattagcataagtcaagacaagactatagcgccacaaaagctagggcaatctccaatcttgttgagttcatgttcgaggaagtcgactactactagtcgtcgacagctttacaccactatactgatagagattatgttaggtcatccttattattgtactcgtgtgatattgatatataatagcaacaccagttccgatcaacaggagtaaagttattacacgtaagtaagagtcttggatatgtataaaaaataaatgtctctcgtctcttaacttttaccttaatcttgcgtataccttgacaccaacgactcctatacttcaaaaataccatatatggggtatagcctgttgacggattccttttctccctgctagagtagtgacaccccaccttcctatgcactaccgcctctagacttgttgtcactcgttggtattgctttcctattaccgccaccactagtgtctccgtctctcctcttctcaagtcacctaaggcccaatttaatttagatttttaaaaatattattgatgtggattttgtaaaataaaaggataagttaaatattttagaaataaaacttaataaatagcttaaaacaagatatataaacaattgatttttttaaggatagaataaatactctgttaaacagaaatgttcagttgtcctcttccctcctctcaccctttccctgccactcttttatctctatggatgcaagcaggatgggttagtgggatttttcttcttcttatttcatttctagtttattttatctaaaagttatattaccatgtgagaaatgaactaacgagtgaactttatttttttaaaaaaaatattatactatcatgtgagaaataaattagcgagcaaattttatggacttgtccggttccctactccatgaccagtcgaaggtcgacgatgtttaggccccctttgattcaaaggaaattcatagaaatttttagagaatttcattcctataagaatttttcctatatagcctttgaatcaaaggaatggatcttatggaatcctataaaattcctatggattgcctaatgccatgtaagttttggagaaattctaacatgaggtaaaacctcttagaaactttccttttgagtctttatctctcctctaattcctatgtttttcctgcggtccaatcaaacggtcattcttgtattttgcaatcctctgttttacacttatatttctatcaaaatcctgtgttttttctattcctatgttttcgtattcctatgatttaaagggctcttagagtcttgaagactgaggcaaagtctgttatcttaatcgattgttacagtatcggagtaataaattacggcagtggtagccgacccaccggacagagcctcccacagtcctacacccatcatcatcaataaactactcctttgatgatctccccacgttggtacgtccagaatactcgctcacccgaacccgcggcgacttcgccggtgaccttcccg

SEQ ID NO: 5368 - DNA, 2000 bp, Oryza sativa
ttttatttatttatttgcaaaaagaaattaatgctgcttttggagtagtactatctttagcagggcttatcctatccataatccacctgtcattctattttcagaacttgcttttcgagtatgttctggttcgtaatttgccgcatttccatataaacattgcggccgatttgttctttcttttttgtgtgtgtccgtggattgacagcgatagagaaaagccacagttttctgctgttccattgctatttgtacttatcctcagtgagaaatctaacgtgtgttactttaggatgcgagtgtttatacgctctaccaactttkgtttgttttcaaacatcgccgttcaaccaagaaatcaaccaccagttggattcaaatcttgtccaggcatattcctgtcaagtacgagcatatttttaccagttgcacacatttgtattgtttactctgcattcctagcctctagacattaggagagatggcaaactgatctatttttgtccgtcaattcttatccgtcaaaatctattttttttatgacgtgctagggaggcaaaactgatctgtttggttttgattagaaaaccctcttttttatagggtttgatccaacctgatgtgtgatgtccatgccaaatagtgattagtagtatttatttatttagagaaagagagcagcgctgtcccatttcattattgaaatgaacaaatgttatattagtgattttgtgcagtagccatgttgtaattttttgatacttcatgcaaagcagaatgtttttctatacgtactgcacggattcatactgcccctagttggatttaacacaatgctgccactggggttttggcagcttggatgagttggataggtggtggtggtggatccagttttcactagtcttgcttggctgcttgccatctcctgtaactagtactagtatcttctgtaggccagccagctcttgccaaataataggctttgtaataatgtaatttgcgtgttaaactggtttgattgtcataatgacacttggagcctcctctggattgggatggatatgattgcaagcaactgtggcatgagggttgcaagctattgtgcttggtgagaatgggggaaaaattctggaatggagggtggttgaatcactctggtggagtgtggtggtggtcctagagctcctatttctatgtttgtatgtggtgggggtgcgtggtccatgttttgattagttttcgtcaatggatattgtggtccttaagttggagataaacgtgctattattttttgtatcaaaaggatgggatccactagactggtgtcaaaatctcttagttggtaggatagcgtccgtagtgaggatattttgaagtgccgcacttgcggtgcgtgcctaacatttttgtgtgcaccaaaaagttgtaccttgctaatgcaagagttcagccaatggatatcaaatgaaatgagtacatatgaccttcttgtactattgtgtgtggagcctttttttttcatttcttgacaatagcaaacttgttccgtgtcgtttgatgtccatccatatttggttattttagagttctaatgcaagaatgtatgtaatcagtcagttcagtgactttagtcactgcgtctgatgtgaaaaatatgtttagtaaaccatgaacaagatatttcttacgtttgcaaaaacatactaacatgaaactacaatggcacaatgtcagttggctacgcatcaataatattttatgttgtataacccggattgtttgtgtttgtggtgaatgtattacactagatgcaaattagttaatttaactaaatgagatattattatatattatagtagcttttataaggaagagctgacataatatgtttttctatttcacaggaattcaaacggtggtgcttgctatttcgacgtaagggcttaaacgaattggtttgtcactattttggtttcaacacagaaggttgtgggacc

SEQ ID NO: 5369 - DNA, 697 bp, Oryza sativa
  misc_feature (1)...(697): n = A,T,C or G
gtttkgawacnracttcagtctttcatcatcacatttaacctattatacacacttaacttttcagccacatsttchtacaattttaaccaaaatmcaractttagtactgaactaaacacagccaaaargaagaasaaagcgtcctcccctccacgcaagcaagcwaaaaatgtawcawatrwaaaatttwccatgtgatgaagttgataaatctcacatctaataaatactcctccagtttcattttaattgatgttttggacaatacacggtctaccagatatatctttgaccttattttwctattataatatatacaatatataaatacatgtttacttttattaaaatatttttaaagttattgatggttaaatttataaaagtttaatctcaaccttattcaaaacgtcaatcagagcgagcagttagtttccacggtatattttcccggtttgggttaggccatccatcctccatccctgggcgcttgctgggcctcggcggatcccccgaagcagccgccgcaacaacgagagaaaggcaacaaatcaatcaattcccccatcttcctcgttctctccgcctcctccccactctccatttatactcctcttctcctctccatcgccgcattgctcgccaccccgacgacgacgacgacgacggcgacggcggaggagtagagacagagag

SEQ ID NO: 5370 - DNA, 2000 bp, Oryza sativa
ctgtttaaaccagagtaaacaatatcggctgtgtttagattcaaaatttggatctaaacttcagtcattttccatcacatcaatctgtcatacacacacaacttttcaatcacatcatctccaatttcaaccaaaatgcaaactttgcgctgaactaaacacaaccatcggttcggttgaggcctagaacaggtagagatacatcattcctggttcataagaaaaacgtgtattcatactcaacgggttagattatttttgagaattacacagtacaacgcagacacttacaatgtacgcacactcacccctacgaacgcacgcatgtaaactctacccctatgagcatattcgaagactgggccggcaaatcctagagattgacgaagtcaccacaggcgtctcactgtcgacgggtacgtcgcctagactaggtgcgaactactgtccagagaatatcgagccggcaggtattggtactcaaattatagtttttcaagaaaaataataaaatttttcatatgaagtctgatgaaaacaaactttacagagatgcacttaatagtgcagtggcaaggggtgtgtggtttcaactcaaaggtcccatgtttaatcctcaacacgcttataatttcttcttaaaaaagtttggagggtcgtctctccctcgcaacacgctcatgatttcttcttaaaaatgtttggagggacatatctccctccaaatcttgttttttaaacaaactttatatcgaaattatagagtttggcgatgataaatacacgttatagaacttaagttctctaatctacttcgattttttttttagtttttcaaacaacttcaaatgcatggagacaaactccatatgaaaattttagatcttcacgagattcgcaacttcttagttgataaccttttcatttaaaatcatttacatagcttaatatgttttcaagacaggaaaagtcaaaagaaaatattatgcaatatcaaatagctagcattcgttattctaccttccgtcaaaacatgtgcgcgcttttgatactgttgagttgggtatcatggagagcagatccatacgatcatatatttaattgttcaatcacatcaccaaaagaaacaggttttcaatatatattgaagtactataaatcatgctatatatacccctcttcccctccacaatacaattcaattccctcctaggtttgttatgatccatttgacacacgaacacacacatacactacactctccctagctatctttttccaaattctgatcacagatcaattactcttgatcgcccatttattacttcttcattttaaaccctcttttcgtttaattaacgtggcaaggagtgatatatacgatgctgccgtgcttgttcccggcgtatggtagcgtcgtagcctgcaaaccttccgcgatcgatcggtcgccttttggattgttgtcccagcccaaacaaactaataggactcttattcgtcgtcctaaggttactaaaggtacattatgttcatcattttatgcttactgtaaatatacagatgtgtaaggccggccatatattaatttcattatgtaatataaaagatacatatttatttatttattagtacaataaggtagttttttttaattccatatatattttctataaactttactaatggtcaggactgcctaccaaagaaagacgtgggcccaaaagataacttactgtacttcattttcatttaagagcaatacaaatccatgttaattctaccgatcgagataaaatttcgaaagaaaatttgtgtaaatattaacatccgtagaaggactggttgcatttgggattttctttcggatcgatacgaggacaatgccgctaataaatacctaatatatataagttgcatatataattgcattgtttgaaccatgttccacataaatatttcaacgatttatatcacatatcttccaaattacagcattc

SEQ ID NO: 5371 - DNA, 2000 bp, Oryza sativa
catcgagttgggccgcatcgagctccacgagatgtgatggcgtcggatgccatctacagcgtcgtcccaccaaagatgatctcaacgcytgracaccagggtcgccaacatcgagatcatctcagggtgggacggcgctgcagaacttccaacactatcctatcattgtggagcttaacaccaccctacttkgatagraacccataggcagcgacgctttgcagcttaatcatcatcaacaaaccaattgttgtagttcaacttctttagtagcgggtaattggttgaggctccaacctccttgaccactcggtgtatgaccagcctgatttttgcccgaggcacggccgccacagcctctaggagtgcacctggtggtgataaagaccgtcggcatggaaactgcgtgtgcacacaagccatgaatacgctctctagtgcaggatatcaagtccaagccttgaacctcgctttaataccaattattagggtttccctagacaacccattagaacgtgtataatcaatatgaagaacaaaaggaacacgataggatttatagtgtagtcatgctattttgggtttttttttcttctattattgtgcaaagtgaaacatgcagaacaaaargtgcaagcacttcccactttatggtttgatcacgtccatcctcacgatttacacaatgcgtttatgtccccatgccgtttaatatgaattttatatctaatgaatatggaattttaacatgaggtccaaccttttgaaaaaaaatctaccgtgtctatctcttcttttcttgatttcttgtattttttttgtgctccatacgaattgctattcatgtagtttttttttctgtattttctcaatctaaaagatttggagtactagggcactttcttttacgaaacacgatacatactcagatgcggatgcctgtatacatgtgcacactcatcattattaacacacacccgatcctgttaacccttacgagtacacacgaagaactaaactaacatattcaatcatatataggtcctatttggtatatctttggatccaagatttcttggaactgagttttcctagttctacaaatccatgaatgtgagttcacgattatgttgataaatatttggatgaatcattttgttcatgttttagataaaatttacagtacattcttaaatcactacagtttaacatagaaagttcaaatccagaaagttcaaatccatcgtagatctgggatctgaagccgtgctaaacatgatcgtgttgttcatattcctatattttaaaaatcctggtttgcccaaggagggcgccaagccaccgatttcacggacgacggatgaccattgctgccggctcgatgaagtctgctatgctccatcgtactccctccattccaaaagaaacaaatctaggattagatgtgacacattctaatacaacaaatctggacagatatatgcatatatgtacacattcagtactatattatttttttatgaaacataggaagtcttatattattattatattattactccgcagtagcaggacaaacaccgggaggggaggatctccagcaaccgacaccgtcgaatgttccatccacatcgccgctcgcgccaccccamccgcccgtccgtccaaaagtgctttgagattcggaaaaagtacaccctttcttcttttcttttcccctcacgtgcgcgcgacacgaaggccacacctcggagccccacacacgcactcccctcgccctcgccctcgccggcgcgccgcccctctccggccctgcgccgccgtggtcgccctagacccccytcccccctccggcatccactgtcggcgggcggccgcgaaaaaggtgcgtttcctatcgctcgccgttttgcccgccaatagcaagcggaagctgggggaatctgcggtggctttttcgcctcgttgtgccgtgtcatctcctcctcctcctcctgccg

SEQ ID NO: 5372 - DNA, 779 bp, Oryza sativa
gacmcgggaacycmgggtttgcccttttttttttttgacatagggagtattgggcaaacaattgatgttgacaaatcctgaatatatgaatatattactaggtacttcctccgtcccaaaatataacaacttttagctctcaatatttgtcccaaaatataacaacttctccacaacattttcttcccaaccaatcacaactctccaccattcacttttctcacatatcttcactacttaaccaatcataaactctccacgttcacttctacctactttcttaataaccgtgtccaactctaaaaaatgcttatattccgagacggatggagtatctataacatggtctaaggttagaaactttaattagttttgaaaaaattagtagcagcaaattttaaaaaaaagtgaaaaatctcctatcatttcgcagtttgaacacgaccagtacaaaaagaatcagaactgataaaaaaaatcgagctaagcgacaataaccggaaaagaaagatgagagaagcgtgacaacccgtgaggccgtgacagaacaacacacgacggcagccagagccagccgaggagaagcaagaggcgacgccgctggccaagtcggcccgttaccagccacatccacagaaaaacggggcgaacgcctcctcgcgacctcacctcaccccacccccaacccctcccacctccccgcgtgagggatgagatagaaaccgcgccgtcgcatgacgccatcgccggcggcgtccaggtccgcctctgacgccggg

SEQ ID NO: 5373 - DNA, 1230 bp, Oryza sativa
gtcractyggggtmcctaaccggccaggttaccttgctccttacaagggaaccaagtatcatcttcaggagtatcgcgamgcccctgaaccacaaggtaaggaagagaacttcaactatgcacactcatctcttaggaatgtcattgaaaggtcatttggagttttgaaaatgaagtggaggatgttggagaagatccctagttatgatcctcgtaaacagacacaaattataattgcatgttgtgcgctacataacttcattaggaaaagtggcatacgtgacaagcacttcgatcgttgtgaccgtgatgagaactatgtgccgccacaagctagtgccgatcaacctaagaccgaagaagtgtttgatgattgtgatctgatgaatgcatttcgtgattccattgcacttgctttggkacacggtcttgaattttgtttgtcatttggaacatgcgtatggactgtcatgtatgcggctgatgtgtatgtttgacaacttatttgtggatttctattgcttgcataattgttgactgcatttgtaatgtgctactgttatggaggatgtaagccaagagatttatgttgtatgtcagtatgtgtgtgacgtcgcatggcagctgtgtttgctgtaccatgcatgtatgccaaatttattatttgtttgtagcaacatcgcctatgaagcaagtttgaaagtcagccatgcatgcatggcattaaatatgagcaattcaggaattctgtcaggacccaaaacttcttgccaaaactttctgcatgtttcccaaaatccaaaaactgtgcagagggagtggtacggagggatagaaatttgtatctccgataaaaaaatttggaagtggtgtgaatttagatgatattttattgacataaaacagtgaaattctcctatccctctctccgagccctagctgcccctcgtgtccacgtccttcaaaatggttaatatacacgccatatttgaattaggacgagactagtgcacggcacactagtccccttgcaatgagaaaggccaccaaactttccggttgcagttaataatcaccctaacaccgatccaaatcccaactgttctttccgtcacgtcacgcacaagtcaaaataacggacactgctcttaccgtctttgcccttccaccactagtagtggggagcactgcaaagcgtagcttataccagtagcagtaggaagaaggcgc

SEQ ID NO: 5374 - DNA, 336 bp, Oryza sativa
aaaaaacctgggrattgrgkttttttttttttttgacggaaggattatgttttcctatgtctcactatccccttcgttgatcgggaaagttggaaagcattagggagacgaagagactatccactccgtccgatgcgcacccctccgacctccttctggagcacgcttccttcccctgcaagttcccgccatttctctccccaaccccactctgtcaccccgctcgattccccactattaatttactaattaaatcatcacaaacaatcctctcccaaaccccttccatttacaccaaaccgcccccttcgcgccgccgccgccgccgccgccgac

SEQ ID NO: 5375 - DNA, 2000 bp, Oryza sativa
taggtggcagatgtgaatgtttgatgatttgggcttgaggtttcatttacaaaggtattacatttgttttttatactgaaactcaactctagtttggctgaccaaatgcgccattatattactcaatcatggaaaacatgcatgagcttaccagtgcatggttcgaaatatttaataacgtactactctgttgtgattccagtttttattaatatgctttttttaatcgataaatgtattttccttgtcaacagtgttttggcacatgaacaccttggggggctgaaatcaacatgttatacattgtaaaggatctgttagtagattttttttttaagaacaaacttctactatgtcatatggaaagccaaaagtacttggatatttatattttgggatgggaggagtaatatggaaattcgcattatatatgcacattgcacagctgcttatctgccagaacaattccatcttcagttggctggagtctggaggcatttttcgtacagtaccatgcatcttgcatgtgtatcgttgctcgttgggcattgcagcgttgacctgtatatttcctacagttttttcagcacgccccactgatccctctagtctgtacgaactaacgaacagtttattatcgctgcatttgtgtactgtacaaaacaagcaagtggtgatcccagagctagtgttattttagtactgttcttgtcagtacaggttgtgttatgttgcgtttatactacgtactatacatctctacatgtgtgccgctgttagtacaacctgcacgctaagcaagatgattatagataatctctctgaatatcttgggttgggctgcattgtagcgtttgcctggagagtggattttaaaatctctacttccatattatttaacacttaaatagttattaaaaaatttaaaaacattcagaaaatgtattaacatatgatatatcactctacaaacatgcaatttaaaatttaatttctacatgtcaaaacgaaaaaagaataaatttgactataaatatacgttaactagttataatttaatttgttttttttgttacgatatgtaggagttgaatttaaagttgcatgtttatgaagtgatatatcacatattaatacatcttctcaatttttttaatttttttcataattgtttaagtggcatgcaaatataactaggggacatcccctcaaaagtttattatagtttccccattggcctgtactttacccacagtagataaatacagtgatattcaacttcatttatctaatgtactactccctccgtttcaaaatgtttgacaccgttaactttttattacgtatttgaccatttgtcttattcaaaaaatttaagtaattatttattattttcatatcatttgattcattgttaaatatactttcatgtacacatatagttttacatatttcacaattttttttaataagacgaacggttaaacatgtgctaaaaagtcaacggtgtcaaacattttgaaacggagggagtacaaaacaggctagtggtgtttagtttagaaatccttattgtcagtataggttccatgttgttggtataatctacatgtgtgctgctgcctgctgttagtagataatatctgtatctgccttgggtctcctgcaacgcatgagcggttagttggcttgatgagaaactgaagcgtcacggtttgagtggtacgtgtctccagcgccgtggggtgggagtgggatacagtcaagactccttcaataatcttcttgtcaaaaagaaaaaggtcaacggtttcaggcctacttctcttcctcacgcgcgctgtcctggttgtagttgtagttgtaatccacaagaaactcaaatcaaaacgcacacacaattcaattctcgtctcatctcataccatacccctgtaaggctgtaaggtgtaagtgtgttcagcgagatgcgagcttcttcttgacctcgacgtagatcc

SEQ ID NO: 5376 - DNA, 2000 bp, Oryza sativa
aattactttgcattcgggaatcaattcgtggttggctgtagcaatcttgtgttgatacttgatagcactggattcggttcttggccgaccagatcttccctctggctggatggatagggtggtttctgtttgttgggggatcgaattggacagccaattctaatctggacagtcaactctttctttacagataagaggctattgcgtgtctgtttcgaaggtgtcaacaaaaggatttgtgcagaattttttttagggttctaattctgtaagaatatttcctatttgaccatttgaaataaagaaatggatcttcccaaattctatagaattccttataaatttgctcaatgtagattttggagaaaaattatcaagagttttaacattgtaggaatttccagtttatgtgtttttcctacggtttatccaaatagttatttctatgtatttcatacggtttcgtgtggatggtaataacttgtaattagaggggttatcttaaatgtagctaatgatggtttaccttgtttcttggcctgttatttgaggtttagggtacgtgttcatgttgggttcacttatttcgtgccggttagatgtagtaccgcatttgattttttaagtaattttcattttattttaataacgtataagttgttaaaacgtaacgtcaaaaccataaattagatccactctaatttacgaatacaaatacaagctaataacttatcaacttcttacaatctcatcttttcgcttttatttatactaattagtatgtttactaggtgaaaccccgcgcgttactgcgggacttcaatatgataataataagtaaaaataatatgtaatatagctaaacaatataaacttacataagcactaaaatcaatttatgtgatatggcttatttagagaagagagaaataatattaaccaagtgaggatgaacttgtataggtatataagatattataaaaaataatgaaaatatatattgaaatattatgtgaattatgtgggatgatgatttaacatgctttcattttaaaagctctaaaatgtaataaattttaaattagataatatagtatgtttacatgatattaaatgtattaattgttagtggatgatgatgtggcacctttgcatgttaagctttaggagttagtgggttataaaggattagaaaaaaatatgggtaaaatatttatataagtgtccttactcattagcgatacaaaagcaaatactataaaataaactataatataaaaaattaacttgaaaattaagttgtaaattcaatttttggcttactacggtccaataaatccacttggatcgacttccattttatctatatttaacaaatgatacataaaataaaataaagttgaccgaagggagtacttatgccatataacaacaaaaagaaaaaaaatggcaagaaacattcaggataaaaacacagagcaatgataaaaataataaggaaaaatttaataaagaatgttgtgacttagcggttttagctgtagaacatcgtacaaaagtagcttttggaagaaaatactctacaaacgtaaaaattaactcatggatgccgtacctattaaaatattgatttctaatttgatgggagagaaacaatagttcacaactttcacattgttcctctcccctatttaatcataaatcacctttatagtgtttttttctaaagtcacttgtgtaatgtcgtacggtgaagatatcgaagtcatgatgtcatgtactcatgtaccaaattttgccaaatacctatgtttacgaaccaaagtcattgataagagtcacgtacgtgtaccaactacttaggcacttgggtagtacaaacaagacaaaattttgagctattttcaagtacttggacaatctacctatatattatgtccgattttccaatctgtccccacaaatcgagagaagggggagagatcagtacaagccgcacc

SEQ ID NO: 5377 - DNA, 2000 bp, Oryza sativa
cataggattgggagtaaggctgcgttctttcttcttgtcaacagtgattacggaaaacggagcgatccattagcacatgattaattaagtatctgctattctttttaaaaaaaatggactaatatgatttttttaagcaactttcgtataaaaactttttacagaaaaatgcaccgtttagtagtttgaaaagcgtgctaacggaaaacgaggacgactagcctgaaaagaacgcagcctaaatagctgggaaaagctaatgtgtaagatagctgaccatcttcccagcacttgtaatccctcgataggatatcctcttgttggtcgaaaaatcatacaaataattataaaaaaaaatcacatctatataccacctcagaacttgtaagtatatcgacctgatttgtggtgaaatacagcatgtgctcaagagtttgtctgtaagctgcagtggatcgtcctccatacaactgaaacacggagaaagtcaattttgtcgagaaaaactgatgaagacaacttgtcacatgatggcctatattaagaaatgaactagtacccacaaagatttcatttgaggtagtaacaaccttgcaaaatttgcaagtagtgtttcaattcccatctgctaattataaaggagccagagcatctttagcgagaatctggccgtttcaaatggcaagtacatcatcagactatagggcaacaaaatcaagtcacgcaacaactttgcagttcgtaatgctgcacaaaatttgaaactcttccatccaaattgttctgaggtggtgaatctacgattgaaggtccactgatcagcagcataatccctgcatcgccgccgccttcctcatcctctctccaactagagatggaaatgggtgcaagaaatctaaacgcgaggaccatcaccatctcctggaaggctggaactccatgaacagctgctgcatcatgcagcagaatccagagtgaccccttggcccttgcttctgacaaaagcccaagaggaggaacatcttgacgccggcacaacacacctgatgtgacaatctgcaatagtagcttccaatcgtttgtgagtaatgttgtaaaacaaaacgaatttgggcagctgatcatggattttcccatgaaagcaacagattaaaaaacattcctacacagactcccgataaaacatcaccttcacacgtgaaacaaaaggaagaagacacaatagatgagatgcttaacggaaccgaacatagatccttcaatcagactgcattgtctcatttaaaaattgggcggtcaccctggctgcatctgcttgcagtttatttttcatttagataagagactacctgcccagatcaagtgaaagctatctgcagattcagacacgaaatagagtaaccatcagactgcaaactacacgaccaggtcagcttgtgcagcagataaacaaacttacatgtaggtttaagcaggctctgccaaaatgtcctagttacctgatggaagcagaggatacgactttaaagacacatggatcctcagattcctgtcgatatcgccatgatttctgccatgggctgttcaagttatctgtgtaaaaaaagcacaagagtttgcaataagtccgacattcacaactaaacaacatagagttgacatcctggacaaagatgagacatgaagaaggtgttgtctggctaatcatttccccattttactcgcttcatggccgtcttgccactctttatatgttcatgtcattatcctttgttaccacaattataacctcactatatttttgcaaaagaaagaaaaaataaaacctcactatcttttctgttaactcttgtgaatgcagttaactggtatcttttcttgagaaaacagttacgtggaatctaacatgacmaggacactataaaagctagacaaccatatcagccaagcaatacataacaagtaaagcacatgttgctctggtactaagtaggcagaac

SEQ ID NO: 5378 - DNA, 249 bp, Oryza sativa
tttggcatggagtgatgcggaggagatgcaggtggagaggatgcaggaggaagttgaaggaagccgcgcggatacggataagctcaagcctacgagattttctccawcctcgagagcmagttcctgttcgggtacacggacccgcaccagctgtggctgccaaggcgccggcggcgcaggcgtcggcggcgacggccgtgccgtcggggaaggcggcgcagcgtgggaaggtgtgcgtgctgtgcgtgg

SEQ ID NO: 5379 - DNA, 2000 bp, Oryza sativa
tcactctaaatctcattttctagagagatgtttggaggtacgcttctcactctaaatctctttttagagagagaaagagaggttaattgcataattgcatgtacagtgtacaatgtctgtcagtcgaacgatgggtggagcagcagcaagcagccggtggagagagcgacggaggaagacgggctcaatcgatggatcggttgatcggagccgtccaaatcgttgccgccggggagtccctatcatggcgggaaagggatcatgtggatatcactataggtagtttcatgtatatacacgcacgcagagaatacacctgtagatcatatactagagaaaaaagacgtatgattgtacatagtagcctgatcagatttttttttaacgaacgcttgatcagatttttaactcaagacaattaatcttcgctggatgacacagcacaagaggaaaattcaacgaatttgaaaaaaaaccatgcttgacctggttctagttaatgctctcggctctcgcaaggtagctaagctcgtgctatgctggttgatactgtatacgaacatgataattgtaattaatgagtagcagtctggtactagatgcgatcatctgtattatcatttgggagaaagtcggacgctgcagctatcatctcgaacccaactattttgatttgaccaaatgtcctccgatcctacagtgcgcgtaaccaaccaaatgcaatcttggcgaaacatgctcgttccccgacaaaatccgccagaatcatatatgtcgggacagcaagcctcgccaatagtcaaacgtaaatcaaccgctcataaccactcgtactactactgcatagtaacatgcgcaaattaattaacaccctctattttgggtttgattatcacatcagatatacggatacacatttaaagtattaaatatagtctaataacaaaataaattatatattccgtcagaagctacgagacaaatttattaagcctaattaattaatcattagtaaatatttaatgtagcaccacattgtcaaatcatggtgcaattaggcttaaaagattcgtttcataatttacacgcaaactgtataattggttttttattttgtccatatttaatattttatgtatgtatctaaacattcgatgtgatgattgaattttttttcaactaaacatggccgaagttctctaaattaaacatctgacccagttcactaactcccctgtccaaaagtgctcaattcaagacactgtaaaattagttacaccgtccaatgtgcacacgggttggtacgtgtgcttgcgtttgcgttgcggtgcagcgcagggttgatcgcgtccgtcccatgcgttcgcagcagcagcagcaaccatcagccaaccacgcgtccacggacgcaaaccgattcggcgcacgcgcgtgcgcaagcgcgcgccggtcaaaatctgctccgctattgtagcttttgctcgctttgcttagctttgctcctcaccaaacccccccgatcgaacgagtccaccacacgacacaacatcacacaacccctccaactccagaggcaaccgcgacgcgggtgcgcgcggcttatatttttcgtgcgtttcctcgcgctcccagcctttctttgcacacgccacacaccgagcaagcagaggaggagtattatattcttcgcggggccgagccgattcaacgcgcagtgctcgctcgcgcgcgcgcgggagcgtctcggggttggacaccggccggcccagcttcctgtgaaggatataagctccctgcctcgttgttcaactgctcggcgtcgatcacgcagcgcgggagatcgcgcaaagaaccgagaagagctcatctcatccaccatcactcgcgcagagagatcgatagccacagcgcacaagcaacgcgccgccaatcacatgcgcgcggcggtgcaggggcgggcacatgcgtggacgacgacgacgacgacaccgccgggcgcg

SEQ ID NO: 5380 - DNA, 2000 bp, Oryza sativa
gaagttgctttaaaaattatattaatttaatttttaagtttttttactaatacttaattaattatgcactaatccatcgctctatttcacatgcgtgtagaagggtttacgacttgcaccgcccaatacagcctaagagagtatttaagaggaaaggaaaaaaagaagattgagaatacgtaaaccgaggtgagccattagtgtattattaattaaatattaattatttcaaacttaaaaaatgaattactataattattttaaagtaaattttctataatttttctaagaaacgcacagtttagacatgagcatgaaaaacgaggtaaatcttctctcaatctcgttgcaaacttacaaaattagaacaagtatgcaatcccacgtcatacttgtcatctgcagttcttcactccccccaaattatattactcaaacggatatgcttgcgtctttgcttaacaactaattaattaattcgccgtagtggcacatacatttcaggctaatgttcatggactgatacgatactatatagtttgctggtcagactgatattttttttattggacaccggccgggcgggcacctcccatctcctttgttacaggttcaggaagcagtgggcaatatgcagacagggacttgtcccctttactcggaagtggattccattgcgtagatgtgcacgttctctttctttttctctacaatattttaacttgtggaatccgatactccgacgttattggtgcacgaggaacgtctgatcatcgtttccatcagttgcaggcggtgtgcacgagcgacgtttgatcaatccatggcgtacctgatcacctctttttttctaaaaaaaagaaaacacggcacaaacgtaaaccctcacgaatgacattcttatctatacacatgcacgccctacacttattaacatatccgaattcttgaactttaccccctccgtttcacaacgtaaatcattctagcatttttcatattcatattgatgctaatgaatctaaattcattagcatcattatgaatgtgggaaatgctagaataatctagattcattagtatcaatatgaatatgggaaatgctagaatgatttacattgtgaaacggagaaagtatatttataattgacgaaaacattgtatatgtctcgtcgtcgatggataggtttcagtaggaatttctactgaaacctatccaatgatgatgagacatatgctaataagtatagcccgtgcatgtgtatagatggtgaaaactgagaagagaaagccttcgtttttcatgcacatcccaaatactagatgtagtatatttttaaaaaaaaatctataaaaatgttgctttaaaaaaatcatactaattaattattcaagtttaaaataattaatgctgaattaatcatatgccaacagtaacagtgcatctcgtctatgtatcttcttattttctctcctctcagacacatcgtaaatatgatatgcgtgtaatgaaaagaagattcgaccctgatgcgcggtccggatatgtctctccaaaacacaagcagatggagtatatctttagctaattaagctatagctatatagctcgcagttggtcgcacgtcagcaaaactagcgtagctatagctaaggctcggttgctgcacggatggatggtccaacctgacgacgatcggtcgacacaccggtgcggggcccaccacgccacgccaccgtgtccactctcctcctacactgcatgctgctgctgacgtggctcccgcatctgccgcgcgctataaattcgcggctccccgagctctcaacctcgtcgtcgccgcagcagcttgcgatcgatcgagagctagaagaagcagcagcagcagctacttcttagctcgccgtcgccggagctagctcgcgtgtgaccaccgccgccgccgccgccgccgcacgcagcctcagctcgatctctgcactttgttcgatcgccggcc

SEQ ID NO: 5381 - DNA, 1882 bp, Oryza sativa
aataaatatttttatagaaaaaaagtcaaagttgtgttttggagatcgtgtcgctgtcctaaacgacttcctttacgagtatgtagggattactcatctgttactgccttaattacgtactgaacacgagttattggatagtcgcgtttcctcctttctaagttattcttctggtagatatcttgacatggcatggcctgggttgttatggttaggtaaatatatactattatgttagtgcaagcaaagtatgacttgatggtcaaactaataatatacttggacgtttaaaacaaacaatcaacatgattcacttctttgtgtgtgtgtatgttcagagtactatatatattgaaaaaaaatcgtcggtactaacaaaacgaacataaaattcttggcattttacacaagtgggagaatggacctgtagatttccactaacaacttctgttcggtcagctgatctccagtcaaatgtagtaaaagttaatctaaagaaaatgtagtatatgttttatcttgtggagagataattctctattattacagcttctaatggggatcgaaatcatgcgcatcagcacatttcatatctctattgatatgatcctctcatcaaattaagattagaagagcatcgtaaaattttaagctctggcttggtcggcaatcactttcttcaatttttaatacctcaacaacatcacaaaatctttcaggaaaggagcatgattgttcttcagaactaaatttattagctagtacatttagtaagatttgataatgcgcattggatatgtaattttttttctctttgatattgaaaataattgctcgagagttcatttctgcttcatagcatccatgtgaaatatgccaactttcgatctcacatgaaccacctcttactcatacaaaaggaaaacaaaacttagaaactgcaagatggggtcaccgtggtcttctatgcaaacaaatgaactaaagcaaattacatgagctaattttgatataaattggttttccttgaccatcccggcaggctcaagtaccacacctgaggaatcaggtttcaacgagaatcaattgttcaagaagaaaaaaaaaggattagcagcatagttagctttatatctgttttacgtcatcaccattaatttctctgggcatgcatgctttcctcaaagaaacacaaggaaagaagataagttccaccagagagagatacaatccagagagttgcatgattgccacattcaaatatttgagctactggacacggcactgctaacttgtttatgacaagccctttctttttttgccctttcctttttgcctttagattgccctttccctttacatccatgcagaaatttgttgtgcaaaaagcagatgcctatagaataacttggttaccgggaaacaaggccattagtcccttgagaccctatagctaacatatatacactgccctgcaacaatatatacttttacagaaatatatatatggtggccacattgcataaaagtatatataaaatcattgttgttaagatggcaaaaccaattataatggtctattgctgatcaaaagctgcaaaaggggtacaagctgccttgagccaccccagctagctatctgtgcttacttcttgttgccccacacaaaggcacaaattctatttccatagaatatattgcccacaccacatgttgttcattgttgaaggcaccaagcaacccctgtctagcttcctctaccatcccttatataaataccacccctcctgctcaacctctctcacccatcatcactactgcaccaagctagtctcaagtgttcaattagctagctctcttttgcttagccatgagtgcagca

SEQ ID NO: 5382 - DNA, 164 bp, Oryza sativa
ttttcaggaaacaaccggaatagctaccgatcgatcagtgacttttctgaataataacgccgaatactggcgacgagccaacaacccgaatcgggagtttttcccgaagaactgataatacggattttctcgcaaaattattcccagccgcaccctcgaggccg

SEQ ID NO: 5383 - DNA, 2000 bp, Oryza sativa
tatcctcgattattcattcgttgcccgtgacatgaaagtgccatgtaatgttaattaattgttacgttaatctctcatgtgatgtgttggataatttggtctctttgtgattttttttatttagtttgcctgatactcgctccgtaaaaaaaacaacatatttaatttttggatgattttttgtgagactgatagagtatataattaacaatatgttctaaaacactgtagctgatgaatagctagcctggatatttcccattcctccattttcaaatatatgacgcgatattgaattttaacatcatgtttaactatccatcttattaaacattttagcataaatatattaaaaatataggatctttaatgataacacaagcccaaacaaaataaaatattgatatatataaagcttttctaataaaataaatggtcaatcatcatgttcgaaagccaacaatattacgtgtttaaaatggatgtactactattatgtgaagaaccatggaatcctcccaatacctccacatatgcactttgatcatactagtggaggactgatcttttcctatggtacccaaaatcataattatcccggttagattaaaaactagtattaaatatactccaaatcatcaaccgggattaaaatttgatctttagtcccggttgataacacgaatcggaactaaagatgaagaataatctagctctcaagctgggtggacgaccaccaacttaaacacagccgggtttgcgccgtgactcagttagaaatagccatgaaaaaaccatataaattaaccaacagtagcttcggtcgatcggtacacgtgctatcagtcctaagtgcgtggattgtccttgatgtctactaatacagatatgcgctttcaaactaaaataagcatatcctccgaagattgccgaaccatccttgcttaatagttttcaaacctgcagcacacaattaaccaagcaagcattgcatgcatccaacaatgtactgcactactatcaacgtatatcatcatcgatccttttggtccattttgcggccggatggctggcctgattgtacgtgcatcctacgaccattcttcccctcgggcgaaatttcctcccatgtcacatgagcccatgtatcgagagatgatcatcatatgacgacgtgcacgggccacacacataatcatattactagctaactagcctactatactatatggccataatattcaggaaagtgacgagctaacacatgcaataattcgtgccgatatcgagatcgatcgacacgggaggttgatgactatgggattgctcatcatgttttggcttccggctggctaacaaatacttcctccattttttaatagatgacgttgttgactttttctcatatgtttgaccattcgtcttattcaaaaaattttatgcaaatgtaaaagatataaatcacacttaaagtactatgagtgataaaataactcataacaaaataaattataattacataaattttttaaaattaagatgaatagtcaaacatgtaaggaaaaaattcaacgacgttaatctatttaaaaaccagggggtagtatattaaggtagtttagcaacgagacgacgacgacgygcasgagactctgggacccatgcctgaatcgcgcrtgccwgratcgmgcgtkmywggwcarcywagtysgkcrmysmagtcckgcgmtgcagcmtgmrtgcagagagtgcwgakagtttggctgaaaattttgttctaaaccactactagtcgtctactactacacctcgtgtgtgccgcgtgcagcaggagatcgatcgatcgatcgatccaaccgaatgcatgggccagcgggtagcatatggcggcacactataaattggaggccacccctgtgcgtctcgtcccatccaactcatctcaggatcgagttgtgtacgtttgtagtgtgctgctctctctgctaccttgtgtcgag

SEQ ID NO: 5384 - DNA, 2000 bp, Oryza sativa
ataaatgtataaagaagagtattctaatgaaagtacaaagcttacaaaagaaaagagaaaagctactagagccatacccgaattcttccgaaggcttccggactcctgattctactctattataattccaccagctagatactactaaactaaacttgagagaaatgagagagctcttgcttgacgtgtgtcttgaagtgaagagagtgaagtccttttataggcaggtatgatggttgtaaccgctgcgaaatgtctaaagtaccccgcaaccgccatcaggagaagatctggagcgttcctgccaaaccccacatccaacggtggagagggaggttcggccgaacccctggggccggcccaaccagtccatggtttggctggcagcctcctctgttattcttctccgcagacttgtcaattttggctcagtttgtcgtgtcaattctgagttcttggcgcattcatacataaatctggttctcgacatcgtccgattgatttatcgtctgtgttgatgtcgattctcctccactttatgattattctctgaaaaaagttagtataccaaatactagaggaatattattattttaatacatttatgcattgcaagaatcactagttctcctctattttggtaatattgacggtcgaaactaatcgataacgaccgtcaacaatggaccggatgctcgcttgcaggccgaggtggaatggaggagaagtggggttaacaggccggttcggctacgggctaaagaaataatgggctcaaaatggcccagggagaaacgagggttttcytttagatcatttaaataaatgataaaatgatgtttgtattattaaaatagcaatggagatatgaaawtatcgaaaaaatttcgcatagtgwaattaatcatggagaatttaataaaaattaaatgcaaccatagtttattcgggaaattttattttccacatttaccttgaatttcattagcctttcttttcttcaacatcgtatacacctctaattgcgattttatattttaattaattacataatgtaaatatttctcaaccttttcttaaatttctcatgtttttcccgttgcaatgcacgggtattttttctagtatataatgaatttgaggatgatactttacacgtagttgtaatactattaaaaggatatatacatttttttatgctttttagttgatgtgcacggtgtgtacacgggaatgcttgtatgtataggatatgcgtaccccataatggcattcaccaattcatgctgctaaaggaaggtttatggatgggaagttaactgtggtggcaaaaaaaaaagagagggaaaaacatttgttaacgacattttgtagaatttgtgttcaccgacagcaatttgtagaaccgggttattgtcgttgataaaacatacaccttccgtcctaaattatacggcgcctattttttaagaaaatttaaactcggtaacttttaactaatgatcatagtaacgttaattgttatgcatgttatatcactagatttatattttgaagcagatgctaattttatattcattggaaacataacataaaataaattaatagttaaattatgtcattaaataccgtataaaaaaatataggtattaagacagagggagtatatagtagaatttctcacattgacacgcggcaaaacaaatacgcgccatccctaattgtcagttttcccattttgagcttccaataacgaggaatgaagaacccaagcccggccgtcaacctcggccatgaactcccgatatagttcgccggccaatggacatgcaattaatggcgatccatccttagccaacaccgcaatggaatgaccgatcgatccgtgcgatcgcgagtaggtcgcggagagaccatctccccccattcgaggcctcctatatatgtacacacacctcctccatccatgtcccaagctgcatgccatggcgaggacgtcg

SEQ ID NO: 5385 - DNA, 2000 bp, Oryza sativa
ccagctatattgtatgtataaatatttactgatccagggattgatacattaattccagtcggatccaagtcattagttttgggacccgacaggacctcgcctccaccagatccggcggcgtggaggcagctgcggcccagtgggggtgggaggggcagcgggccggacctcgcctccgccagatcaggcggcatggaggcggctgcggtctggcgggggcgtcgtctctttctctctctctctgtgtgcggcggatggcatggtggcagtggaggttcatgtgttcttggttgaaagttttgttatgtgtgttcttgatggaatgtttcatgtgtgttcttaatgaattccgactgggatttttctttggggggggacaaaaaaatccccgcacagatttgttttttcaatttttttccatcgctattgctaaccaaatcggattgcgtatggacgaaaacacggtgatgattgtggtagtgatttggttgtgccgattttgggaattgtttccctcgtatccgattctgagaggaattgggattcgggggctgcgggcgaaggcgcaccgcgagggacaaaggcgcccttcgtccgacctgtgacgataggaaaaatccgaatatttatattagttatagatatactttgtatacaactattcgtatcaatctataccattgtaattggtcccaccacccggcggtttagattttattttttttattaatgtggtcttacttttggatatttatagattatattttactatactcttcttggtatatgtaggatttacttgtttaattattttttataactcttcaaacatactaggtgttggatacttagatggttctatcattgtgttagaaaacagcaaatcttgatttcttatcattttcatgattcttttgaagactactagtatcattggtaaaaaaaacttttaaatcacccccttacaccttttgaattagtgatatgtgatcatgattttcataaagacggatgaaaagatatatgagttccaccaaggcttccatctagtttatttgagttatttttgaggagatttctatcaaatctcgtctttgtttagtatctttaacaaccatttgtcaaacaagcatattttcttcggcgtcaaggtcttaaatacctaagccactctgacataggaatctctctctcccatttatccatgaaactcttttaatcactcgagtgtggacacccacttatctatagcatcaactaaatgattataaaaaaatcacaaaaaattgataagatatattagtaactaatatatcactccataaggatggaaattcaaatttgatttctacaaattataacaaaaacaacaagtttgactgtgaatatatgtgtactaattataatttaatttgttatttttttacaactcatagaaatcgatttgaacttgcatgcttgtaaattgatatatcacatattaatctatcttgatattttttaaggattttttaaaataattatttagttgacatactcacatacaatagataagtcagatgattagaatcattctcccgtttatttatcattggtggcactttgctagacaaatatagataagaaaacactataccagatcagatcacctctgtcgaactcaaaccctcagctgtgacgagtccgaatcacctgtgacgggtgaaggccggtccgatgcaagagtcacctctaacggccttacgtgctaatgagaatgagacaccgtgcgtgacaaatgatgccaacatgtatgaagctctgatgacttaaaagaatacagattgccaacatgtatacccgtcggattagttgaccgtgaaataattctccgtcaagcaaggttgctcattggggactcaccaatcatcacttcaccttagctacaagctacagcgacaaatcacttatatatatggagatcaaatgagctaagtaagagtgattagaagcaactcaag

SEQ ID NO: 5386 - DNA, 2000 bp, Oryza sativa
ccctctcatctacacaatatacatgaacctgatgaagctcttaagtcttaacaatacattgcgctctagagagaagggtagatcaataccaataagctggaaattatcttaggtggttaggaaaaacactttkgttctgaacatacaaaargaaaaatgtgtattcgtaagattcataacaacataactcatgagcttgcgaatgtggctaggcaatcccagcacaattatcattgagctatgagtgtaatgttgtattacaactatgatatgatatattatgatagttcacgtactaactaataaatcttatttctccactaaaatccgaaaccacctcatagccggtcattttagaatgagaagagaatgagtatgtacaactcaattacatggaaattgattgtggttgttgtaaatatttgacgtctaagataagatttggtcaaacatgtgaaattttggcctttagttttatcttagtataattttacaagatctagtaagtttataatatttgatactagacataatatattttaaaagtaagcatttgagatattattaatggtcatagacttaatctatggtaaacgctaaatatttatgaagaggggagaaagaagggagatcgaaattggtaggatattgttgcatattattcgatgattttattgcaatcatttcttctttatttgtcttactcgttgcattcaaatgttgcatttgttccaatgttgcgccaattctttttagaaatattgcatagaattttgaatgttgcattactttttccaaaagttgtacttgtttccaagtgatttaaacttaatatttaacattttatttgcggaatgttgcaacaaagatgtagtgaaacatacatgtaatgtttcatctatttacttaatgtttcatcaagtcccatatactcccttcgtttcgaaatgtttgatgccgttgacttttagcacatgtttaaccgttcgtcttattcaaaaaatttaagtaattattaattcttttcttatcatttgattcattgctaaatatatttttatgtaggtatataattttacatatttcacaaaagtttttgaataagacgaacggtcaaacatgtgctaaaaagtcaacaatgtcaaacatttcgaaacggagggagtataaaacatttgactggttgttgaaacacttgaccgactgaagttttcacttttttggggtgttccacaaatgttttcgctcacttgttcatctttgatcatgctaaatatcttaagtgtacacaatttttttaatcaaagtgaccaaccttaagttttatatcgaaaacaacgtaggtccgctcattagagcagtgcttcttgtggaaaatatatttgttgtattctgtctctacgactttatttttctttagaattctatctctaccattatattttagctctataatttatatttgacttttatcgctaaccgatatatgtatgcttctaacacttcttacattccaagcttcagatccgtatattacatcagcgtgatgcacctcgtttacttccaagtttccaagccatcgttccatcggtccctcgtttacttgaagttccaagccaaggtagattattggtagaactacgacgtggctccgcgatgttcacacgcttgattttcccataacaactgacgcacccccgattgggccaagccaggcagcttccattcacgccgccgaacccgcaaatagactaattacaactatttctgccaccggctggtgctagcctttgaccgcgacttttccaccaaaccaccacggcagcatgttactactaagcaccaatacctctcctacgcgcgtttctcattttctgcaacacttgcaaccttcagtcgtacacgttaacgtcgcgcgtatataaacagccgatccggtagatgcaattcgtacgtgttcgtgtcatcactgaacgttagagtggacacaacatctcaca

SEQ ID NO: 5387 - DNA, 2000 bp, Oryza sativa
aagatattactaaaatataggatgatgtaatatggatgatctgttggagctagaagggatatggatgatgaatttttttggatgataatctataagggtattcggaggatctgagctccaggggatgctctaagcaactgggctttactgaaaacagactctgatagcgcgctctccgctttaaagtctttttgcataagtacttgaagcacatggtggcacacaggcttgctgatcctgacttggataaaggacacctttcgatgggcctcaatcgattattccatgccgctgccattactgccttgactaccaggaaaagcagatttaatccatttagtgttttggttgtgagagtgagtgtcggtctggcatgaacaacttgtactatatccaatctactccagctcgaacaatgatgtgcattactgatgtttaatttggtcaattcacactcatgtgagtggatcagcgtatgtgtgttccaatgcaaagttgaagtagctaattgcactggtggatatatcttcgtttggttacctgacgaatactgtattccaaaacaactaacgccaatataaacacgaaaataactgacgaaacaatgaaacatcttggagacaatgagctgcattctgaaactgtgaggtgagcctgagccaggagcatcgatctccagttggtccatgtccaccgccggagagaatcctgagcacgaggcgcgtgtaccacagaaaagcagcgagcttcccgtgctttacacgaagaacgcagctatcacgtatgcataatttgcatatgcgtccaacgagccgcgtcggcgtcgctggcttggcccggtgctcgatcggtcgatgcttcatggctaagatcgaacatgagaacgttcagaaagagcaaaaacgcgttagtatcgactcgtagcacatggcagccacaacccttttgtatgaaagaacactttggcgttcccacacaaaaattttacaccatgtcacatcgaacgtttgaacacatgcatgaaatattaaatatagacttaaaaaataactaattgcacagattgtgactaatttgcgagacaaatcttttaagtctaattgctctatgatttgacaatgtggtgctgcagtaaatatttactaataatggattaattaagcttaataaattcatctcgttgtttactgacggatcatgtaattagttttttattagtgcctaaacatcacatgcgacaccttatataatacccgatatgacacgctaaaactttacaccctggatctaaaaacacccctttgtgttagctgatgcgcacacaataggatgcctgcctgctgcggcagagattctcgaagaatatgtcctgattagttctggtctactggtatgctgtttgcaaaagctaggatggatctgtgtataatgccggtcatttccttgtcccaaactggacggagctgcagtgccagcaaccgacgcccggcctcacgtgaaaaagcagatgttttgtgagttgtgagtttcattcctgtccaaactcttgaccttgcctgacccatctagcagcgagacgcaccaaactgtggttaccaactttactccacagtacctaccatagacaccacagaagcagaggccatcacgcatcactttcttctatcacatctaaagatcagagtctcccggagatctctctatgtccctgaccctcctgagacactctttttacaggccaaaagttccggtactatttgaattttatcaaatttgaaaagccattcaaaatacaaatgtgttattcaaaaaggtgtcggcccccctcagaattttccccgaacctgattatgactgtcagtgcatgagttcaaaaagagtgtcatgtgaaaccgatcaacttctctgtatataaacccttcagtccacggcccaaagcaaagcacacgtacagctacactttgtcactagctaagctagcaagtgcaactgtgcaagcc

SEQ ID NO: 5388 - DNA, 2000 bp, Oryza sativa
actgctcctcctcgccgatttcccccctcctttttctctaataccaaattactcgagaaattgtgttggttcggtccgcgggtagcgtgattcggccagatctggcgtctgtgtgtgtggagaattcgagggttttgtttgggtttgtggggggagtaaatccggacgaatctgtggtggtttgggggggaattcggtgtgtgtttgagttgatttgagttcgtggatgattccgttggatattgataggtcctagttctgatccagaagtggcggctacgcctttgctgtagcctcaccgatccgccgccgccgccgccatgaagttccgctctgattcgtcaggcggcgacgagccccgcgctccggctgccggcgacggcggcggcggcggcgacgagccggccaaagaggcagcggaccgatccgtcctccagtttcgagccagggcgaggcctcctcttcctcgcaagccgccaccgcagcagcagcaggaggagcagcctccggaggatgcgggaagggcgagcagccgagggttccggatctcggggaggacctggtgttcgaggtgctgcggcgagcggaggcgcggacgctggcggccgcggcgtgcgtgagcagggggtggcggcagctcgcggaggacgagcggctctgggaggccgcgtgcgtgcgggagtgggcgaacctcggcttctccgagcggcagctccgggccgtggtgctctccctcggtggattccgccggctccacgctgtctacatccgccccctgcagtggcgtggcgccggcgtgcccaggcaacaggggaggcggcagccgccggtgaggttgggccgggaccaggttcagctctcgctgtcactgttctccattgggttctttcagaatatgccttgtcctaagaaagacaagggaaatgacagtgataagaatggagggggccaatgcgggtagtcgaatttgtggaataagcttcactccaacaagcatcatcctaagctaccatggcagttgccctattgttcacactggtgatgctagagagtgttggagagacgaacaggaaaatcggcatgcttgatttgggacatgagagaaattaagtggaattgcaagatctgaattggttcggttgtgttccgcacttgtaagatttatgtgatagtgtcacatggattgatggacgttgagtgctatgaggacagttgcgtgaatgctgatgacaagtgatttacttcaagagaagggagaaatggtttgcaattcgttctgctgttgctgatattctagttatcagctattgtgtcaacttgatatatctggcccaagagcagtatggactgtgtgccttcttgcgccggtaccaagctttagagggaaagctgatgcaaatagcttttgtttgcataacctttttcaattagggaaacataatttcccatattaggcatatggagaattatgtgaggtattgattgtttgtacaaaaataaccattttattcttgaatattgcattttcacatgttaactaaggttcttaagttgatctgactgccatgtacaatatggagcccaacaaggggtagtgacacatatttctcaacttcagtatgcaataagtcagtcattttatatgtttttacatgtggagctgcggataatgtgacaaacttatgtaatcgtgaatgatcttttgatgtttctctgtttttctttcatgtagtttgatataggattcctttatctggcactattgaagttttgttgtaaataatgttattcttgcaaagattatcttaaatcaatcatttctggatctgaagaggtattgtaacaatctgaagctttgcacaaccaattgcaactaaacttttgtatttcttagggtgaggacttgaggttggtgtgatgggcatttagctaactgaaatttctctcaaacctcacagatttgaccttctgtttctaccagaaaaacacaaacagtgaag

SEQ ID NO: 5389 - DNA, 2000 bp, Oryza sativa
ccaccgcgtcgatacattataaactactacctccgttttttaatagatgacgccgttgactttttatcacacgattaaccattcgtcttattcaaaaaatttacgtaattataatttattttgttgtgagttgttttatcacccaaagtattttaagcatgatttatatctatacatttacataaattttttttgaataagacgaatggtcaaacatatgtttaaaagtcaacggcgtcatctattaaaaaaacggaggtagtatgtcgcaagagatagccctatgtatgttatcaccaaatttatccaatacacgaaggtttgagagtttactaattagctctagtgcaggtcctagaaatcgggttcacgacatgccaaaaatcaggttcagaatgtgccggttagtttgttcctgcaactaacaatgatgataaaaataatcaaaccatgaaccaatcgactaatatatagtgtagtagatacagatccgatggttaaaatatacatcggctaaaggaagtggagtaactattataatttacctttatctttcatgttatgagtttttgaaatgcatgaatatttatgcttaggagtagagcagccgtcctagctgccctttccctatttccgccattggctggaggtccaatgtagatatatctacgggctaactaaccaatacatcatataactgaagtttagagtaatgataactcatcagctagaactctaacatacgctgcataaaaacctatacacttagtagaattaaacttattagcaataatctaatagattggaacctaaccaaaacaatataagattgaagataataagaaaaatctatttagccaatagatctatataaacgtgatggatataccagatctaactaagaaatcaaaacgatgcagccttagtcgaagccggtacaacaagataaattgatgaccataaagcctagtcaaaatattgagcggaacccgaaaaagtcctaactataccagtacaattgacggggtgacatgacttaccccattcgccaaatatcgaatttaaccgatacagccccgctcgagaatatgaaccacataaactacaactagggtggtgatgtgccgaaatacaattgtatcaatacgaggagatgtcttacaaagatctcgggtgtacatatttatactctaacatgaataagatttcctaaaaataaaaataaataatcctacctatttagaagatatactaagaaaatatgaaatttccttgccctggtattatgattctctttgaactcaccctaatctaaatacatttccatctaatccgttttttcctttaaccgaatccaggaaagaacagtaccaaattctgacgttaacggaatttattatttgctattttgtcttttttttctcctttcaatatatgtgaatgcaatatacaaactctcttcttataatacaacaaagataaagaaatccaaggcgtattacaaaaaagttcacaagtcctaatagtcctaaactgcaattagagccaaatgtgcgggaccaaagagcaaaaggtacatgaacttctagagccagtccaaactccaaagtgatagactgactagctcacacgctgctttgctcctgagctcacacaatcgccttcgttctatggccctcatggatccacaaatccccctttctcctcctccgcatgctccatatttaaatcccccacaccctccgtccctccatccggagccgccacttccttccttccaaaaaggaagaggggaaaaaaaatctatagccaccaaattgagcaagattctcacacgaaaccaatcacaagctagcattcgtttaatttcttggctgctattgtccggggaagaggttcttggtgtccaaagaatttgtcggttctagggagctccaagttgctgtagcttcatttcttggttctttgggttcttggattggcggtactgattgtgggag

SEQ ID NO: 5390 - DNA, 1340 bp, Oryza sativa
tttwaccccgggcccccccccccccacacacttttacgactcgcgtggcgcgcgagtggggccaacctgcggagtcacgtagccgaagggaaagtaattcccctctactccacatacccccggcccatatctccgacaccggcccagggcttaataaaattaatagaatactcataacaataagttgcaacttatttttcggaagcccatctccaaagaactccagggttaagcgtgcttgacctggagcaatttgaaataggtgaccgatcgggaaattctccacgaatgcacatgagtgagaacaaagtgtgcagaaaaaacttgtgttggtctgtgaggtcagtctatgacctatgaaagctgccagatgtaagtgggcctggcctgagagaggcagagagacagaacgttacaaaatggtatcagagccgactctcgcggtttcacgggcgcgtgtgtgaggacaagtatgcagaaaaaacttgtgttggtctgtaaggggggatgagtgaccgatcgggaaattctccccgagtgcacatgagtgaggacaaagtatgcagaaaaaacttgtgttagtctgtaagggcagtctatgacctatgaaagctgccagatgtaagtgggcctggcctaagagaagcgggacgttacacctatttagttccaaaaaaacttttttcaaaaacatcacatcgaatcttaagatacatatatgaaacattaaatatagataaaaagaaaaactaattacacaatttgcatgtaaatcgcgagacgaatcttttaagcctaattaggtcatgattagccataaatgctacagtaacccgcatgtgctaatgacggattaattaggctcaagagattcttctcgcggtttccagacgagttatgaaattagtttatttattcgtgtctaaaaaccttttttaatatccggtcaaacgtccgatatgatatccaaaaattttcattccaccaactgaacaggacctaaataaaatttgtatagcagagtacgtacattttcttcctgatctttacagcttccatattagaacttgcacacatcactcactcatccatgatcgctgctgcagagagctcctcagtcctcaacgtgcggctcagatcttctggagagtagcacaatcgcacgagatcaccggaggcgcaacgggtgacacgttgacacgagcccaacggcgcacagaatccaaaccacacaagatcaaaaaaaccaagccgaaaacccgagacgcgacgcgtgtccgaccagtctttgagttatcccctccgcttggcgctcagctgcacagacaggggagacagcc

SEQ ID NO: 5391 - DNA, 2000 bp, Oryza sativa
ctaaccgtgtgtggggagaccgccggcgtggggaggggggagagggggggggttgttcattctgggacccccggtagcttcgtcttgggggttagacatatggagtggataaaatcaaacacggaaaattataattggttgacaaaatgaaattggtgaatggtgaatgttatgattggttgataaaaaaatataggtggagaaattcctatgttttatgataaatattaaaaactagaagttgctatatttgagacaggaaataatctgtttcacattgatccttacatgtcataacatgcacgtagttttgcccaagttgacaaaaccgatctttcacaagccgaacatggtctgttgcaacaattcatttcaattcttctattgtctccacttctcagtctagcttgacgatgtaagacaccacattataatgcactagctaaatgctcgtgtgttacaacggaaattaaataagagaaccacaccgcacactctaaagcctcaaaaattaaaataaatatattctcattgtaaaatcttagggtcatattatttgtcgttattttcaccatacttttaaaaaaatccctgtttgatggtttgatgttgggaaggaacaaaagtccatttacctcattgtttggaggactcacttgacactgattgtgggtggtagctaattcaccactcaccatcaccattgagataatttaaaagaatatacatactaatatatggcacgatcattgctacgaataacaaacgccaaaagacgaagagaaaaacatttactcgatcacgtccatttcagactactgcatacgttcatgtatatatgaaccacgtagcatgctctaaattaaaagcgttcttttgatatatcaaaaatcagatttctcttcctacatcaatttttttacttacagtctgcttactctaataacaaggcattaaagatggaaaatccaaaccatttctatagtttttctaattccagctttcgtttaatttccagcagcatataaactacatatgcaattcaggaatgtgtgtaacatagtagtaaaattatcactatctgttaagtacagaagtgggaacctgttgaaaaaatataggccggctaggcttattcaaaaactcaaaaccccatgattgaccccttaatcgtttgcacattgtttgttcacctaacgatccttcccagctcatccctggttgtgccacggatgcttctctgagatttgcttctcattgacactgcaacctccagcatatgatgcagctatatgccataacctccccctggggagcaggagcacggcatccatatgtgcagcctccagcatatgatgcagctatatgcagtacaaaacatcattcccctacccacagtccaagacatacctgattaacaatatttttcttcaactggaagatcttcattaggcaaaccaagcaagaaccttctctgaagttcaaaggggtctctaaggctgcaaaatataactctacgtgaaagaatatatatttttatatgctacagttcatgataatgcttataatgcagaatgccttactaccaacaagcacatgctctccaaacttgtcccttgatcatgaacccacatcattacatatcagcatatatagctgccttcttctccatcaccctcccttccccctcttgcagtttcatgccattcttggcgctgtttgctttcttggatgtatttcaccgagtttccgttattctgcattccagtctcttggtacatttccctcagtttgcttctttggtgtcacataaataatgttactgcacccaatatttttaggtactccctccgaaaacatatgcatgtgtatgtgtttttttccttgcagattaatctttgtggttacttcaatactgtatcaagtcttagtgaaggataattatcttgaagtatatcatacttcccagaagctagatacaaacacgagttgtcactacc

SEQ ID NO: 5392 - DNA, 2000 bp, Oryza sativa
atcggttaaatcagcatgtccctcatcaaacaacacacacggagtcaattgacgaggcaaaagctgtggaagagccgtaaaacgtgcgcggatacaacacatgagcacgaatctacatgccatcctaaggcaaaaaatcgactgcgattggacagaaaatctgtcgccacgattatagcaaatccgctacgaatctacgacggatgcaatgttcacatatacagtatactgttcattgtatggtcagcaggaattgatgtcgcgatgcagaagcagacaagaatcaaagaagtagctagcactaataaaaaaagaatggactagaaacatgttttttctcctggtctgcttcacaagtcaagagacaatcttttcttcttctggcccgtgttgtgatttgtgagggggcttatgtttggcacaaaacgtattttttgggctttttctgtcatcctacctataagaatatctcagagttcaccggacatggaaaagaagaagattcttaattcgttttatcgtttagtttctcttgttcacattgcgcgtacggtagaccatggttcgacttccgccggtaaccgcacggttaccacggtaacctccttaaattcaaataaatttaaaaataatttgaatttttgataaattttacgcggtttcatacggttttttacggttaccgtgcggtaaccgtgcttacggccggggcgcggtaacctcggcccggccggcggtttgggaaacctgcggtagactggacctggattgacctactgcaagtctgcaatcctaggacatctgttcctcttggactggtatttatgatcataggctaagaaaattcagaaagaaggtagcgaacaaaacatctactctctccgtcccatataaaatcaaaccctagcatcccaatacaaaattagtagagagtgaaatgaccaaaatactctttattatttaaaaaaatagtaattgtgacaggtagataaagggtattgaagaaataaaacttttcattttatatactgagagtagttaggatgttagaagttgattttttatgggataaaatttaaatgataataaatgcttaaagtattttttaataataaaacaacttacaacataataaatgataattacgtaattttttaaataagataaatgattaaatgtgtgttaaaaaatcagcagcttcatccgtagaaaacgaaggtgtagaaaacactttccgatatggatatgtctcttttgggatatgttgagtttttatgggacggaggtattatgtcatagtggagtagtatgaaattgcaggatcaatccgttctggaagcagttggtacggcagctaataagttcatgggagcagaccaaataaagagcatctgccattcaaaagacgactgcttaattaagtgctcatcactttcttatacctgggttgtttgtttgtaaagagcattatatttcacatttgacgcggaccggatgtgcggatgcttcctttccatcgcgttaggagcaatcgaaaatcacaaaaaagacaatgagaaagaatctgaaacgagaagcagcatgtttatttgccacgaaaacgacagtagcactgcttccgttcaaaaaaagaaagaaagaaagaaagaaagaaaacgacagtagcagcagcatgcgtccatgcagcctggccgagtccccacccgaccggacgcagacgcacgactcccacgaggtcgtcgttccggtggcgtgccaccagcaaccggatcgaggaagcaggcagcgaaccccaactgcccctaccccaaccaatcccaacacgccacgtacccccaatacctacgcacaccaaccccctcaggtcaaactcgtgctcgtgctgtcgtgcagctcaagaagtccgttttagtataggaccaagctagtagttcgccaacacgatgtcacaaaaaaatttaagcagccggtgtaagctcgcaccgtgcgcagtcgtcgcc

SEQ ID NO: 5393 - DNA, 1754 bp, Oryza sativa
  misc_feature (1)...(1754): n = A,T,C or G
wataagkcwttctrggkttcccatattcatatggtgttwatggatatatatatatatatatatattcattaacatcaatatgaatgtgggaaatgttagaatgacttacattgtgaaacggaaggagtactaagttttggcagtgccaaaattttatcaagatggcaatattgccaaaattttggcatgatttcttatgtagtgaccaaatttagcaacaaactaaacatagacatggttttggtaactttgccaaaaaatggtatggttgaaaattgcatgaacaggccctataatataaaaacaagtggatttctactaggcaagtggattttagagtgatgatgttctaaaactattgctagcagtattatgtactcgctttgtccatatatatatataagggtttttggttggatatgatatatcataatacaataatctggacagagagtcgattcgttgtattagaatgtgtcacattcgggacaaaaaccattatatttgtggacagagggagtagtgcattccatatgtatctaaagccacatccaacttttaagaatccaacttctaaataccacaatccagaagcaggactaaggaatggaaaaagaaaaaggaacttggccttggatacaggctagaaaacaagttaaattcgagcaactcattctctccccctctccaattcaagaagacaagatcaacctattctgtgacacagatgtagaccacgtaacaggtgacggagaataaaacgctaatccgttcgtattaaaggtggatgtggatgccatgaataggacgcttctggctctctaactggcgcctacacacgttgctggagcctaattataccgaatgcattcaaaacgaacagataactcttgagaaattgaggctattaacatgacagcaaatacttttgacgttacacgttcgttttaataagggtagccgttatgtgttcaccgtatcttttcggataaatattaaatgcacttttcattatctcgtcaataactacattwaatagctaaagttgagacttcttttcytttcgtgcaattactttcaagaatcaaaaagatttttgaacccgtcctcttcaatcttcatatatataccaaanccaaacctaaaagtatctttttgaaaacccaaatgaggatttggatatgaaaagaaaacccaggtgaagatggaaatatctctggtggataaatcatttgtgataccacttgttcttttctaatttatgatgatattttgctgataaaggaggggaccagttgttgtagttgtagtcttgtagagccatccaacaaccaaattcacgcaacaaaagctatgctggtggtaatcatattcatcgccaatattttaaaactgggcccttttttttgtccaactgttcacaagcgtagctcacatctctagctgctcctttatctgatatctcctcatctgacaaccacaaaacctgcatactcagagagaatatccaaaacagtgctgctgttaaagaaaaaggttgcgagtgctactgatccaggtgcatgcatctatcccctcttcgtcgcctatataaatcggcctggacagccgagtgtgtccagggcaagcagaggcagcactgcccaaaccacctctttggcctgaattgcgcgacgctaacggcagcacactctcctgctactgctccattagccagcagccggtggcgcacaaacgccaatcgatcggaacgc

SEQ ID NO: 5394 - DNA, 2000 bp, Oryza sativa
ttactagaattaaatggacaaagtccaattaattccaacaggatttcggtagaatgtgtagttctattctctgagaataattctaagaatgcctccgttcgaatggaggcataaacgcaataccgctgcatatgcccgcaaatcagcttgcggaggctgtagcacattggttttgttgcgatgaaacgtctgcgtttgtttggatctatcgtttaaattttataagatcacgtcagcaaggctaaccaagtctggaatcttgaaagtaaccttcggccattccaagatcgaaccttgttgtaggatgacttggaagcttttgtgctgtggattttagcccgtggtatttcaccatggattcggtaagggtcggtgctaaactaactactaattaaatatgttcgtatcctttggatcaagggtcgaggcgtcaaacattcttatcgaaagataagctgaattccaaaccatacgcataaactattatctaggtagcagaggagcatatataaacatatgcttagaaaaaaaacatgtgcgcccttgaatacaaaacgtgaggatatgttgcccggtgtctacatccctaaattgtatggtccagaaccagaagttagctgcataataatacccctttcctatcacaaattccagggccggaaaagaacgaaaaattaataaagggagaaacaaaatcattggtaaatacagggaacttctcaattgtactgtttgttagcctttctttatacatgtagaagacttaatttgatacaggaatatctacgaacaatagcactataatctgtactctcaaataacatgcaaacaaagtcacacattgttaattaggattccaaaagatggatgcatgctaactcatgccattcactcgaccacagattagaatggaccaagaaagtaataatccattccatagaacacaacacaatgacacgcagagtcctaatcagcgtgtggtggtccaatgctccaagctactgagactacgagagatgtggtggactccagtggttgccttgcatacttagcttgccttccctagtctagactctagactagtgatcatcgaggtcgtagtcttgtaaacgatggttactactcattctgttttttttcttagtactccctccgtcctatattttaatattttgcttgmactatttaactattcatcttattttaaaaattttgaaattattatttttttacttacctttattatccaaagtaatttaagcataaccttttggtttttaatatttacataatttttttaataagatgaatagtcaaaagtgtaagtaaaatgtcaaaatcccttatgttgtatacagagggagtaatagtcagtgttgactgctagtagtgttttaactttgatcattattatcaacatgtaattgatttacaatacttcctccgtttcacaatataagtgattctagcatttctcacattcatattaatgttaatctagattcattgacatcaatatgaatgtgagaaatgttataatgatttatattgtgaaacggagagagtagaatagatgaatatgatgtttgcatttttaccatacgacacattttaaaatacggcatatatttttataaacttattgctaaaaataaatagtcagcagaaaaaaaataaaaacgtattgtctaataaagtattgtgaaacgaacagattaatagcatcttaatttacctttcactgcatctaatatgtcactttgaatgttgctactccgagctagctaggttcattatgctttgcactaaagcagcaaagcatgcaatgttagttctggctgcctatatatacgaggccatctgacgagcagaacacaagtgcaaacgtgcagcagcagaggcagcaacacctcccctgttcttgctctgtttcctcactctgttggtacacaacaaaaagaagaagcttaattaggtggtttttgatctgatcacgcgcc

SEQ ID NO: 5395 - DNA, 2000 bp, Oryza sativa
ctgctagcttccatgcaaaatatttgcaaatggatagtgcagtgcagaagagcagaaacctaacaaggactgtcactttgtgcaacatcctgccgtttgttcaggctcgtaggacaagcaggaaaagcagcgtttgctcgtagttgccatgacaaaatcgagataaaaaaaataacccaaaagaactgtacctaacattatactagcatgctgcatatatacaagagaagatatacataattacatatatcatttgattaaccgggaatggatcgaagacggcctaccaaacgtgtacaagtgcattgcatctggtcagtcagccgcgtgcagaaatgggcgaagaaactgtacaaagtgcatggctagctaacatttactgtcacttcatcgatcgcactgagtacgaaagacgagtagacgacgaccatcattagtgacgtccacgctaattaccctctcgagtcaaacacaggtgcaggacattagtgcggttaatatcttggagtagttaattaaggcgttaaatcatgtgcaaccgcacgatctctcgttccgtccatttgtggtgctgaccacaggatggttgaaggacaattgagcagtactgctcacttacatgtgagcccgagaggctatggggttcacatgtcagtgagcaatattgcatgtacaatattgcagatgacctgcatggctgcatctggttgaagggtagaaacaccacttttccactttttactcccttgtttttcatgcatatttcttcaacaactaaacattgtgtttttcttaaaaaaatttactatagaaaagttgaatttttaaaatcatattaatctatttttattcttttactaatatttaatcatgtgctaatgaactatattgttttctgtacagaaagaagaagagccccatcggttgccttaataagccaaagcaaaagataaaatttgaatttttaaacttaattttgaagttgatttaaagatttttttcaacatagtttttttttcagcatcgacttttaaatcgttaagaacacatgtataaaaagttttaccaataaattagttttttattatctaatgaaccaaaatggcttattagaaaatatgagtaaccgatgaggccggaagtatccaactaatactcttgaacacatagggcctgttcattttgatgccattttcaaccataccattttttttgtcaaagttgccaaaaaatatatacgtttagtttgttaccaaatttggtcaatacataagaaatcctgccaaaatgttggcaatattgccatcttgttaaaattttggtattgccaaaacttggtaaggtttattttggctacaatctgaacatgcctataatagtagaaggggtttatttgcaaatatccatctccaacttcacgtgggactatctgagtggattaaagtggtttagaatctaataatcgaaacccattttgaaaagggttaaattatcaaatctctcctcttgaccctccctttctttccatgggcttcgccggcgactggaccctctactgtcttgaatgcgcttcatagcttgttttcatagacttcattggcgacttgatcctagtttgttttcatgggctttacgggccactggaccctcgcttgtcttcatgggctttatgggcctcattttcttcagaattttatggccttctatacgcccactacacctaatcacgcgcaaaatctcactgccggtccggcctggcccacccgcaacgactagtcaacacgcgctgcggcctcgccggcttctaggcccacgtagaaggttcgagaacaacgaggaccgcataaaagcatctcccacccccacgatctcgccctctcaaaaccctctcctaaccctagccgccgccgcagccgcagccgcagccgcgcgtcgtctcctccgcccgcgagctcctcttcccgccggcgagagatcaggagcacgcaaggcgcgcggcc

SEQ ID NO: 5396 - DNA, 2000 bp, Oryza sativa
agctaactatgaagttccaaaatggagcaggcacagagaaaatgaatttactctttatcttgccatagttattttttaaaaaaaagaaaaaaacatagagaggggggaaaggaaagagaaggccagcgccaactaatactgaacacatttatacaatataaaactctgttacagatgcaagtagagaaccatgcatgcagcactaattaggcaatggctaatggagatttcaacgcattgggatctaaaaacaacagagagaacaactccatgaactatacatacctttaaaagggtaccaatgagatcatcataagaggcagtctgaatctcgaagaccacccccaccagcagaacccactcggtaatctagataaatggtacagctaactttggatcacagtacctataaactgctctaaatttccatgaaatagttatgattaaggtcaatggtcatgcattttattagtgtgctgatttgttgatttccatagaataccatacaagtggtccactgataaaccttggatctaggagatataatctagtcatagtccaagctttgcaggcagagcccagttcttaatgatagatctagctaacaagagaatattagttttcttgagcaaagaaacgtttctgtaagatgcctgtgtcctagatttttgtatttctggttagtggtgtttctgaatattatccattttcacggacatgagttgctatatacaaccccagacgaaatcttgaatcgacatcgaaagtatgctggatttgccagtctgcttctctgccaagcaatctcacttgccaaatttgtgctgaaattcgatgttgacatatttggttcgtctgagcacaccagactgtttggttacaactcgaaacggcacctactgtctatactcaattcacatttccagaccaattagttgcctggtccaaaaacaccatacgtattctttgttttcaaagaatcaatcaaactatatatacagattgaataaggagtgatcatgatgtggcattcaatttcaaagtcttggaatattgctagtcgacatatatgatcaagtctagatactactctaggaacttatagtatcatgcatgcatgttactatagcccgttgaatgaagtggagtttgcactcaagataaattcttacttatgagagagacgcatgtggtcctctactctcaccaatcaattcggataaaattaagatgtgtgtggtcctctaatttaccaatacggacaagctgtcattgatctaactcagacatgagaaccagaatttgttagcaaatttccccaatttttctgaaaactagctagctagcatgtcatcagaatgtgaatgttcattaaattggccagtcatggtgtgcaagcatttttcctaaaatattatactagtactcgagctgcccctccatctttatcaggggactatgatcatcatacaaggacctagctatcgtcctaaagtccagctgaaatttcaaaatcaatcaattacttgaacacatggtcctataatagtcggccatggcaaagacttgcaggaagcttcgtacggacattaacggtggacgtgctattagatcatattccggccagacgtacgcagtctggacacacatcttagaatcagcccttcaacaaaacagcaacatgttacacacgttgaaatccacataaatctcagtcgcctgtgctcttttttttttcctctccacacaagtcacccaagagtgcggccgtgtttgacatttaggatgctgaccgcctaacataggtaagcacaaggttacaacttaatttatgcaaaagtccaaagaggagacggaagaggacatggcttgcctttataattaagccataatactggtgcaggaacaaaaggaagaagagaaggagctgaaggcagacaagaacttgagaagaagaggagaggtagctgtgctgctcaaagcagctagcttctcagtac

SEQ ID NO: 5397 - DNA, 146 bp, Oryza sativa
tttwamccccccccccccccccccaattttctgcccccactactccacatttcgctctcgctttgccgggaaaaaaaaccgcctaccacgataggctcccggatgagggtccataccgtttgcttgcttcatttacatcgagctgg

SEQ ID NO: 5398 - DNA, 2000 bp, Oryza sativa
gaaatgctgctcccggagtcccggtacttccagagctccagatagggtcaaaacccatgtttagaaaatacaactctggagaatccaatcacgttcttcagacaaacgtgagtcacgcccccaaattaacagttttgtgacagctagcgtcatgcatggccaactcaaactgtgttgccccaataatacttctccaacctaaccagcactgtactttggaaaattttcaacgttcaagagggacggctatggacaaaatcaccaaaaaaaaaaaggtagccttaaaacttcaaacaggacgctactgcctaccagagccccgtactgaatcaactccttgcatcctccaaccaaagaaaatgttacaaggatgtcgcaaaaaagggttgatatactgagtgacaccaacgtctcctgatgcacaagttttagaaaagcaacatccgatggagctgctgatcattgatcaatggcaaaaaaacacccaaatatccagttatgctggaaataatagcatagagattctccaagcgatagatggagtacacacctcaaagaaccttttcagcaattaaatacgattaaatcatcatttaaacaatccaatcctatcctatcatatccagcactcacgatcacagcgccaacgaacccaaagccagcttcacaaacagctcatatctaccggacaaaaaatcttacatgtatttttcccctctccattacccggtgttcccgtagtgtgggcccgtaccacgagccctaccaccgtcggatacgtccacgcgatagagtcaaagaaatctgagccgtcagattcgatcagaccagtctcttcttacctttcccttcttcggttcttccccggcttccaaagcaaacggaggaggaactgaggaagacgcctgggctgagaacccgaagaagcccgacgactccggaatcgggggctcgggcagtcgagctcaccgcgcgcgcgcgtcccgtctcgccgaggtgagcgctaagaactagctttaccttgttgcgtcgtcgcggcttctgttgggtggaggagattgactggaagcatccgtttctttcaacggagaaagtttgctttgttcttttgaggggggttttgttgctgtccccgagcgttttgttgcatccgcgggagatcttccgattggtggatatgtgtatgggggtattttggttttgcgtggttgcatttattggcttcgagccaacgaaaggtggaatcttgcatttcttgctacgccgttctggagtttgtgggagaatcatggtgtgttctggcatttcctgggtgccatctcaagaacgtggctaggtttcttggttcttgcggcatgtgcttggcgtcgcgcgaagcaagagttggggttctgtggttattggttctgttccatcagtgcgattttgggcgagattggttgggttctttcgggagcttcgatgattctgggtaagggttgtggacttgtactttgtgagctgacgctacttgctgcgctgaaattaggcgttcgggtcccctcgttgttcgttttgttcaccggattggatatttgggggtctcgtgcgctcctgtgttgtgccaggatcacgtggaagataactggatatcgttgaaatgcgagttggtggttaatgttaacatcgttgcatttatgatggaccatttcctagccattctgtgctgtctgttctaaatggcttgttagattgcaacgctgccatagtgccacactagctgaagacagtaagcagttttagaaaaaggaactactgattttgtttctgctaatagaacatatttcactgcataacagcaaagccaacactggtcaacacttgtgcattatgatatttttgcttttcatgcataatgcataatgttgatgtggttatcgtccttggtgtaattcagattgatgttcttatgagctcttgtatgttctatgctctatggtaggtagtaacaaaaggacact

SEQ ID NO: 5399 - DNA, 2000 bp, Oryza sativa
aattcacatcacacacatcgagcacaaaaatttaacatcacacatcacacagtaagaggtgagcatggagggagggcgtggatggcagtcggcggatctgctccccgccgcccctctaacgcgctgctgccgccgagcaccgccggtggggatttgctcccgagagctgctggatccactctcccgccggatctgcctccgtcctcccaagcaccgccatcacctcaccgccaccttccacccatttgccgtcgccgccgtcggtggggagggaggagccgccgaatccgctccttgccgcctcctctcttgcgtcgttgcctttgagagccgccaccacccccttcgtcattgtcgtcgcccaccgcctcccacatcgtcgaggaggcggatccggcctcccccatcatcgcggcggccggatctgaccctgagctcacgatggcccgcagcagagaggaggaggccgcgccctgccaccgctctcgaggcccttcccgttgaccgatgcgacggtggagctgaggcgacggcagccggcggtggtggggtggcgacgagctagcggcggtggagaagggagggaggagagaaggagaagggagagaggcggagagagaccgcgagaagggagaggaagagagaccgtgagaagggataaggatggactgggcggtgggcgcgcggtctcaaaaatttttttgtatcggtctttattacccaccaccagtgaaaaaagtgattttcgctggtggtcacttaagaggtccgcctcgaaaaatagagtttttttatggcggacctcttaacgtggccgccagcgaaaatcggttttcgctggcagtccatggccccccacccctcgatatgtttttgctggcggttttcgcatatggccgccagcgaaaattatagggtaacaccatgaaaaatcattttatagtgtaccttaactatttggtaccaaatcacggagaaggaggcacgtatagttgcctcttgggcgatcgtggagcgactagtcatcgactcctcttctcccttcctctcctcaacgcctccctctttctttgttgttgctatggctgagcgagggagccaaagggggagcccttctgtttcattgtgtttttgcacgagggagcttatgtcacaatatgggcctatcgagtgggctcttgggctgaagcaaacattggcccactcagctaggaagttgcctactataaaaacgctggaaggggatcgatgaacagaaatacaacctgctttgccatggttctcttcctcctccaactctgcctcccatgatttctatttctctaatcctaatctcatgcttctgctttctctatgtttctcttcccaatccctgattctactctcttgattgtatccttaggcactttgtatattctcgagtggatttgcaatatattggtggcactatgtgtgagagatttgatgtgaatatgttggatcgtgacatagaaaaagaaaacgatttagtaaagtgtaccgttcgaacggtatcaggtgctgtagccgtcctcgaaccaaaacgcctttttaacttgtgcgaccggtgttccgggattttgggttcgtcctcctcgtacatcacgttgtgacagcgcatttgcctgccccgggggtggggacaaaacgcacatgatccagctagtctcgactcagctcgcgtgtggcgtgaccgcgtgaggcgaggcgatagatcgctcaccgaccggaatcaaaaccgaacccaaatttggaaaacccaaccccgtagggcccactctattccagcccaagaaccccaaaaaaaaaaaaaaggaaaaccacaagagaattagaattttcctcctcccttcccttcccttcctctcgccgaaccaacgcggaagaaggagctcgcccgccggctagggtttgccgcacacccgccgccgagcagctagcaccggagtgttgggaggggaggctcgcccgccgccgccgcc

SEQ ID NO: 5400 - DNA, 2000 bp, Oryza sativa
ggatgctcgtgccaaaggcgccaaaagatggcattcccgcgatcatgcggcattgcttcctcttctctcccctttgcgaagaatcatgctgtatcctttttttgttattgttgttgttgttgagaactgaatcatgctgtatcgatgcctgcccgtgatgaaacatgctggtttagtttgggtgaggcctgaggcggcgcctgtgccgttattcggcccagcaggcagggcgattgtcgggcctaattaaacgaagctaagccgaccagatggagtttgcttggaccacgcgatgttgtatacttgtatatgggccaaatcaaagaataaccctgcaaagctataccttgggccaactatagtaattaaaagcttaattcttaagttaaacattgggccagacagtacagccatgtctcgttcagtcgttcgcatgctataagttcgagaaacagatatcgttgtcattcctttggctaagcatcaacaacggggaaactaaagaaagtgcaagtgcatgcacctctctggctcgatctctccggtctttacacctgataaaagggagctcaaacaatttggccattcccgctagagttttgaggcaatcaaggtgcagatatacccgatgaaatttgttgtcgagtattgtagccgaagaatcttctgccgcttaactatacaagcagctctgcggcagcagcaccaactttagtgtacggtgtcttcaattctgaacgtactactaggagtactccatctckgtagtttgagccaaaaaggagggcattgccactgcagcactgccatgctgcatgcatgccatcccaggctcactcacacagtcatccttcggactcgtccgcggactctggatgaatgagagcaggttttcatcactgctctactagtgctctcgacgccagaaattggcatcaactgaggcatactcctatcctacctggccatgggccacctggggcaccatcctacgactgctcactggtggattccttcgtactcgtcggtacggcgccgaagccttgaatttcgtatcaggccgtgaatgaatccactcgaaacaagtgaacaagcctttggaatacggatatgtgttctgttgatccaaccttagtacagaagtaaagtgtactccaatcaagtactactcctccacatcaacgaacttgacagttgacaagacatagaggcacttgacagccgtgttgccatacaaggagagccaattaatcagttcacaaaagctcagttcaccctgctgcgattactcccgtaaccatcgtgaacaatgaataaacaaaccttcacgaaacagccaaccaaacagctgccgagtgtcaccaccaaccaaccagcgcaagatctcgcatgaaatcctcttcctttgtctctccatcgcgggggctatttgctgcgtcggcgcaccgtcggccgcctacagggccaacacctggctgcatggcccgcggctgccgtgccgtgccgcactcgcgcgacgcgcgcttccctccggggctaagaaatcccggggaaaatccgcaccgagcaaccgacgtgttccgcggcgattcgagtcgccatcaagtcgcatcttgtcgtggggacatgggggactaatggccacgtaggaaactcaaacacccgcaccgtcgaggccccgcctttgcccccacaaccgcgaacctgacaggcacacgaaccggacgagcactcaccaacccgctgcgcccaacgcgagcgtcacggtcagtcgcacacgtccgaggcctataaacctaaacctgccaccactaaaccctcccaaatcaaatcattagccaaggccaagcaggcgcggctgcttagcttataaagagaccagatagtactactcagcttagcacacccaaaccgcgcgccatctcaccaaaccaagggagaagcttagctccgccaactagctcgcgctcgcgtgtagcggataagcggagtatcgatcg

SEQ ID NO: 5401 - DNA, 2000 bp, Oryza sativa
ttgtttcgcaatttacatacaaactgtacaattggttttttttttccacatttaatactttcatgtatatgttcaaatatttgatgtgacgtttttggccaaaattttttaagaatctaaacaaggcctggccgatgaacaaatcttctagggcctcaattattaggtttctgggcccgatgcacgtgcactcatgcagggtggtcaatgattcgattaagacgtcgatcggtcgctggggctaatctccaatctcttgtggtgtttttgggaggtcaagaaggcaacgcaacgagtgcagcaactgtggccactagctgagcccagcttaagctagctttgcctgccactgtgttggatacccacacactttggatgatcaaattaatcatcatcattatcattgtcattatcatcatactgccactaatttaaaaggcgtttccaactggggcagcagccactgatcttgagaaaaggttaatacgtgtttgtgcgtcttaattgttggattagtgggtgtttaggccacgtcgatccgtgccgtctcctgggaagatactctaattaaatggtcttttggtagttattagttaattgattttgttgtgtggattgcattggcctagctttcagaaagagtatctagattagtgctcttttctttggctcgatctggccgcaggatcgctacatgacgtatacatatatatacaccttgtctttcattttttttaaaaaaaaataaattcagcacgcaacaaacagtatagtttacatatgtatgagattacgtcatcacacaagtgctctctctgttccaaatggcaacataaaccacgtggcatgccacgttggcctgatacgatgttctatatatatccacatgctctttggttattttagtcaaattactggtcatatttatgagttaggacacgagagatggacgagttaaacccggtttgtatctgtggaatgatatcccagcaaatctggaaaatcacgtacgaacgtgccaacaaaacacggcactataatcacacggatgcaggtggcccatctcatcatcaatcatcatctctgcagcgtgacagtaacatgaacacacgtctcagccagacacatatttacgrgtaatatytaaaaaaaaaaaaaagacaaaccctggatttcagtgtccaacgtttaaccgtccatcttatttgaaaaaattataaaaaaattttaaaaagacaagtcacgcataaagtattaatcatgttttatcatctaataacaatgaaaatactaattataaaaaaattatataaaacggatagtcaaatattggacacggaaaatcagagtttgtcttttttttgaacggatggagtatgtagcggctaatagtcagaatatactgaatttgtgcctaacaaaaattcgtctgaaaattgtgtttcacatgcgtcatttctctactcccccctcaaaaattatttttttgaacccgtttgtttacccgattaatcgacgaaccgagcatgcaaaaaccgggagatttgcgtagccgagccacatacgggtcgggtcgggtcaggctcggtcgcacacgagccagacaccccgtgccaacctgcaccaacagcgaccggtgacgtgtcccgtgtgcccaacttatcattccccccgcgtggccgcgtgccacacgtacgcgcgcgtgccgggggctccgggacacgtctcactgacaggtgggacccacggcgcagcgtcacgcgatcgcgacccacacgcggcggggtggtgggccccgccgccatagtaatcgctcgagctcgagctcgagctcgagctcgccgcgccgtggccgctatatatatccctcgccgtaacaacgctcatctcaaactcactcgctcacacatacaagcgcagttaagattagttaatccaagctctagctcgatcgcgcggtcgccggagctgaggtagacgaaggagtgcgacgagctaag

SEQ ID NO: 5402 - DNA, 310 bp, Oryza sativa
  misc_feature (1)...(310): n = A,T,C or G
cacccactgaaaacccctnccacgtrgtncccccccgamccaacccacctncccccccagccacacgcccgcacccgctcccctcgcgcacggcccgctccccttgaccgccacgtgtccccccactgacatgcgggccccaccctccacccacgcccttcctcctcctcctcaaatgaatccccacctccccctccccaccaaagccgcgttcgcatccgccgccgcagccgcagccgccgccgccgacgccgacgaggagaggaggagagggaaggcgagagggaggtaggtaggtaggcagttagcc

SEQ ID NO: 5403 - DNA, 2000 bp, Oryza sativa
tgtcatggcttcctgaatgatttttggtcaccatactagtagcacacgaccatgcattatcagctcattactgtcggttcggcttgaaccaatggcgattggctgtgtttggaactccaaattcccgacacctccctctcattttccacgtgcacgtttttcaaattgttaaacggtgtattttttataaaaagtttctatataaaagttgcttaaaaaatcaaattaatttatttttttaaaaaaaatagcaaatacttaattaatcatacgctaatggaccgctctgttttccgtgcgggaagattgggttcccaatcctaaaatctgaacacagtgtgtatataactatataccactgacggttatcgccacaaatcggcattgcttcgaactgtttggatgcctgacgtaaaagatagcggtccgggttttgaattggttggctggtcaattggactgcccaagggtttaacaactatccaaggtcccttctttttccccgcaaaccacaattagagaaacggatttgctaaataatggaaaatactataggacgatatcgtgttaaataatgagaaatgtccaaacgtgctaccgttctgtatcatttcccggatgtatggattgaacccacgatctcaagtgtgcatgcttgggtccctcaccaaccaagcaatgacacgattccaatcagttttatgccagttacattgtaactataattataccataattacatgtaaaagtttttcatccaaaaaatggtcaaaagttatatagctaatcccttagagaaatgaccccactaagggcctctttgaatcgcaggattgagaaaacgtaggaataggaaaaacgtaggattttgataggaatgtaaatgtaaagcagaggattgtaaaacgcagaaaaaatatagaaatgaccgtttaattgagccgcatgaaaaacgcaggaattggatgagagagatagactcaaagaaaagttaccaagaggttgaagctcttgctaaattttctccaaaatctctataggattgtccattccataggaattttaaaggattgtgaaggattcaatcctttatttcaaagggctttataggaaaatttcctataggattaaaatcctctaaaattactatatttttcctccaattcaaagggtcctaaaatacaaacagtaattgatcccatggattaaatttctagttcaaccactggagttctaaaaagaaaagttcaactactggtgacctagtgcacgaatcttgatgtcgatcaaacggccaaaattcgcaagatttagggctgatttggtttgaggccctaccaaaatgttggtagtgccatagagtagatttattactatttagccaatccaaatactatcatgaagctactaaaatattggcatggcacaaattagcactaatccaaacatgcccttattgaaccaaatcagccaattaatactcctcaatcaccaatttaccacccaaatacccggatccaattcttgactcgacgcacgagttacacacttaactacacgagacgacgaaactcgagtaattaagcccagccagggtcatatcgttacctcgccgccgcaccggtgagtgtgtcagtcaacgccacgaacccaactccactcatcctctcatcccgcctctataaatcctacccgtacgtgctaccaactgctcgctcgatcgatcgcccacacgsgctccgcacgtcgacgcgcaaaacccctcctcccctcccctcgccggcgatggagccggccgccgccgccgccgccggcgcagctcgacgtggacaagctcacctacgagatcttctccattctcgagagcaagttcttgttcggttacgatgatcccaagctcgtcttcagcggcggcgacgagccgcagggggcggtgaaggggactctggcgagaggcccggcggtggtggagcgtggcaaggtgtgcgtgctgtcgattg

SEQ ID NO: 5404 - DNA, 2000 bp, Oryza sativa
agggcactgttgcgttgcacgcgtggatggtagggagcaatgcgccactcatctggttcaaagtgggcctcgtatagttcaaagcgtgcaagctaagcggtatcaccaatggccaaaaccggaagaaaaatagatgggcttggtgtttaggtggtaaattgcaacgaacttccccgaagtggcattttattatagacatatggtacttgttaagtggcaaataataaattgccgaatatgtggtggcaaattattaattatgtctatgctgagtggataatagttgattttcctgttgttttattgagcatgccatttatgctaattttggttttgtgtttgcgacagttactggagggtctgcagagttcccttatagtttccaaagttccaggcgaaaagggtcctaggactaactacagaagtgcttcctcaagaggtgactcttctttttcgtgcttgtagataatttatggcccccattttccctctgaggcactgataatttgcaatctgtttggtgtaacagggcgaaaccttggctgagaaaaaggctttgctgcgctgttgttgggataattctcgttttgtacataactggttagctcgatggaggcaaaagaggataggattggagtaaagacttccccggagaagatgtgctcaggtgtattatatgctagcttaagttagtggggtttattttttggatttgtactggacacttgtgttatgtgatgtagagtagacattaatcatccaaaaaccaccgtttaatctgtatggatacagcgaaagagaaattggacacggtttaaactcatcgtctgtggtaaaccatttgacggatgtattaaccttctccgtccttttgtggaattgatggattgctaccttttgttttgacttcagtgaattcgtctacagtttgaacccttttattcttccttgcgccgctgcctcttcatcgttgtgtgatcaccaaatttcgtgctgctgctctttcagctggatttgtgcgtccacgctttgccgttgcaattgcagctggaatggcggatagctttgtttggctggaggttggatctgattcacgtttgctgcagcaacttaagtttggacacgcaaccttttcagtttctttcccttttgctgcgtcctgtcgtgcgtgcagcgtcgctctaaatgcttcattgacgaaatgggatgtactgattagggctgctaaaatcgtttagatgttgacagcacggccagtgccagaaaatgatgacatgaatgaggccttgtggctcctgaccaaatcaagccttctgaccatatcgcttaagtaggtcatcaatttgctaagggatgtaagcggatagtcactgtcggcacataaactcactttatatactccgcccgtttcatattataagtaattcaacttttttcctccgtttcatattaagtcatttgactttttttgtcaaatacttaaaatttcttaaagtttgatcaaatttatagtaaaatacagtaacatttttaatacaaaacgaacatggtatcaaatatatagtctatgctatatttaatcaaactaatttggtatcttagatgttgctaatttggttttataaatttggtcaaatctaaagaactttaattaggaaaaaagtcaaacgactaaacagtgttggctttcgtaggaaatctattatagcagccatagaagtcaatcatcaggcatcagcgaggtagctgcatatatttcctcttgccaagtctagtaggtcatacaaaatccatcaagttgcttccttcaaattggcagctagtagctggcaattttgactcctattcatacactgaagcaatcacctaaccatctagcaacaattttaaaaagaaagtactgtcttgcctgactcgatgtataattgtaccaaccattgcataatcctacagaacattcatatccctcttgaattcaaccatcaagcacatcaggaagg

SEQ ID NO: 5405 - DNA, 1437 bp, Oryza sativa
  misc_feature (1)...(1437): n = A,T,C or G
nkantannanannnntaatatanngannangtngaknatatntatanaanancntgcctasmcnanananwnwgntgkygntgtnctcatnttakgnsnacacacagagggaggtgngagagnaagagaggagagaggttnyccyyccycymmmmcmmmcccccsgggggrrraraaaawwyyccccccytttttttycccccccccmcaragaaamccccccccccyttttytyyttwtwacacccccccytttttggggggggggscccccyccyttttttttttttcatmcmaanatycttnankggggggcaaatttccccccgaatttgggscccaaggggttagtgggnartwtttgggggraaaagggtayyccggggtwtgrmccwtrggwtccgawttctargattccccttaggaataattgtagccatgcaacgcacgagttgatgactattatttacaaaattcattgagatcatattgagagctaatttttaagataattatgaatatatgagttttatacaatcaatctaaaaagatgttgccattcaaagaattaaaggtttgtttgggacgttttaatgtttttacgactgctggagtatccataccgtgcatgtactccaatatatgacttttgacaaagagattaatattattcagctcagaatatacgataacacgttttagctatgttcgttgacaaatcattgtgatttatttttaataagattatatatctaaaaacagatgacgcgccatgcatataaattaatatagcatgttctttcatggtagatggaactaataatgaatatcataatgaacatctgtttctagatgaactaataactacacataaggaactgaataatgcaaataaattgaggatcatttctcattaaagacatgacactaaatgaatatatttgcatcactgcataaaaatagccctctctaaatgaaccattactacaatttacaggtgggcagatcaggttttcttcatctttttctgaatgccaaatgtggcaccacaccacaggtatatggaatgcagaataaatgcaaactttaaaccaaaacaaatccaaaaaatcaaaatgcatttaaaactcgactagatcaaaccacagagagaggccttctttctttctcctcctcctcctcctccttccccctagaaatcggaattaattggcattaaataattcccccaaccatttcccaacaacaccaataaattagtggccgcccattcgccgcgtgggtcccacctgtcggccacggcggcgcgcgccctctatatatatataggcgagccgcgcccaccaccaccagcgccaccgcttcttcttctttcgattcttcttcttcttgcggcgacgcggagaagcagaggaaagccgccacgggggagagggga

SEQ ID NO: 5406 - DNA, 2000 bp, Oryza sativa
caatattacacgttatatctccgtgtcatctcacaccttgcgccgttccacccacattttctctgtgtcatcacaccctgcaccgttccacccacacttgcctttctttcccttcctacaaggcagattgcaaggaagatcctattgccattgtttgttttcacaccatcccatttggaaccttttcttacgtgcgaacgatgctacaccaaaatctatcatgacaaaagcaaaaacctaccgaatccaaacaccataaaaaggcttcatattcaaaaattcaaaccagttttgactgtgggcacacattatcttaaaaaaatgactgtgaccaagtgaaagtggtggcaaactgcraacatagtcctaggctactataatttgtagtggtagaattattaattttgatatatacttaatactttgcgaatgactataacttgtacatagattgcttgtggtttttatacttgctagttaacaatagatgtttaattatgacagtctatacctattaatagatagttccgtcatgttggttaaaaactcatggtaccagtgggtacccagtacccgacgagcatggatatggttttttttcccacccagcgaagagtattgcacatgggcggacaaggagttttcgggtctcgggtcaagcatgttcttgctccacccaaactcgaccgacccattgtcatctctaaacataagtgtccatagtatgatgatatctaaagtataataaaatattagaaagaagagataagcggttcagctatggtgtgacgaacgagtgataaatgaataaaaataaatagctgatataaacctacgtagatgctagccacgcaacaaaaactgaagacgtctaaacgaagaaaaccttacacatgtattcaacaccacgcgttatatctttgcgtcatcgtaccctgcaccgttctatccacactttagtttttttttccctttccacaaaggcccattgcaaggaagaccgtattgccattgtttgatttcttacatgctaggaaaaaaatagtcacaacaaaggccataraaaaactacgaattaaaacaccgtaaaaatwctcacaaattcgaaatttcaaacccattttgactatggccaagatttatctatattcttttgtgattaaaaaattttgattgtgaccaagccaaagtgtgatattgatgaggagcatacgaggatgagaggagagaggggtggtgtggtggtggtgtggtkggggttggggtagtcgacaaagcgcccaaagtcaaacccaaccaaaagtcattggctccatcgctgcggtgggctgacagcccgtacatttttttaatccacccccgaccgtggactttgcaccatttcgccccccctttttttagaaacaaaaaacccacaaaaagtcgcccacccaaagctcgcctcgcctagcgacgatcgcgagcactcctcctcctcctcctcctccgactccgatcaaatcacaccggagaaacctcgccgtccggccacaccggcggcgcgcgctctctcgctgtcgggggggttggcggtggcgcagccgcggggcgagaaaaatctggtctcggacgcccggctttgttgactaaaaccgggcgggcggcgggcsgcggcgacgamttygcacgcgatccgcgccttccttcctcttcttcccttgtttggtgcctcgcctcgtctctcctctatttcttttcgcttggtttagttggatttttgcgttcttggtggtggtggtggtagtggtcgtcgtcgtcggcaacgcgggagacttagcgttcttggtggtgttcgcgatctttgcggcgtccagtggcagtggattgcggtggtgggattggcgcggatcctgttttgctcgtttggttgtcgatcgccggcggtggattccggtggtggaggtgtttgggttgtgagctcgtcggcggcggcggcggcgcattgggtgttgggggccgag

SEQ ID NO: 5407 - DNA, 250 bp, Oryza sativa
  misc_feature (1)...(250): n = A,T,C or G
taknnnntttnnatagsaagtgganaggntttttnaagnttaattgtaangmgstttcaataaaattttaaaaaaggnatknaaattkcnaaragttgaaawattttwamccgarttccggattaaaccttaanaactkannararnagnaaataaagawttaaaggaaaattaaaaawstttgcgaanggtttttttknngnncncgnggraasaaggntttttaaagcaaggttgatccgtgggcgsc

SEQ ID NO: 5408 - DNA, 2000 bp, Oryza sativa
gaaatcaatgaaatatataagaataaatctaatgtaaatactatgacaagattgacctccgtaacctatggtggttctacatcagcgttaactgacttatttggttaagcatgtgtgcaatggggtggttttaccaataaaactaagtaggatgggtatttacaataaaatgtcttatggagtggaatatcaaacttcaagagatttttggggtgattttkgtaatttcccctttttaagtaagacaaatagttaaacataactgtgtatatgcataaaactcatgagcactaggatttaaaccctgctagatgaagccatgcgcccactactctatcaccgtgatgctactaacatacgaatctcaaaggaaaaaaaaagaacaactactccatgtaaccttagaaacacatgttatttttccataaattcttatgttatgtgcaacttgcaaggagttataagctctcgtagctaacaaaatcaatgtgcgacttctaggggcaaagctagagtatatgaaggcgtgccaaggaaccagtaaagaaaatttttagttataactcatctattttcaatgtaaacttagacgttttcattagcttaaactcgatccaaagtaaaaaaaaaattaacggaaatgctaaacttctgttgacagaaaatagaacctcaaatcttgtaaattttggatcactggatgtgcttcatgattcatgctcttcttctccaactctggcgtccacctcttcttctcctgcgccagsgaacccaaaatccggcaragggccgacgaattagggtcctgcggtggggttggggttggarggagggargggaaggggaaaagggggarttcaccggctttagagggatggcttttggargcagcagcccgacggtttggccgcggatcgagcgggccgcsaagcaaccgcggcggcgccstagctgctgggtccggaaccggccgccggggttaaaacggaaagagtggtaggaggaggcggctggtggtggcgccccgccggcgacagggaagacaacagacagctygccgctgccggcttgaggcaaaggagaggagagggagggggagggtgaaggggccggcccggaggcctcgccgacgccgttgacacctttcggccagccggcgaggccgggcggtggcgtgctcaggcggcggtggcggtggcggtggcggaggcggggcggaagcgctgaggagcggcggcgtgaggaatcgggagaggagagaggatttttatggtttggttgcctgcacgaatcttaaagcaatcgggtggtctaaaatttgcaagatttgtaagggggtttcctgtcaaatgatctatagacaatcccataaattaaacaagagatattttcattcattttgttctaattatgtccttagtgactttcaagagggattaagctcatctaacttacttttctctaacttgtgtcactgacatgtggaccatatatctattggactcacatattagtgcatcaaagtcaggggaacctcttccctctcgagagtcccctttcttctcgcggctcagttcttcagtttgttctttgagcttggtccctccccgaatcgatcaccggatttccacactttcccgtaaaaccgaaccccaatcgataaattcaaacaaactctcatcatcctagagctctactctagttttcctttttttttaaaaaaaaaatactacggagtagagctctacgccaccgtacactacggtctcctcctcatccccgaaacccaagctactatcctcttatcgccaactgacaatgacaagagggcccctagccccctactcctccgggcaccacatgtcagtgggcgtaacagaaaacaagtgttgacctcggggtgcgtggagtttttcccggagtcgtatcctttcgggtgacgcatacaagggcggttcggatcggacggctagtatatatccacctccgcctccgcgtcc

SEQ ID NO: 5409 - DNA, 2000 bp, Oryza sativa
ctacttggtttttctcttcttggaggagaaggcgccgcctgacgctggagccagatgctaccacttcttccccgagcccggttcctccgctatgcggccgctgcatggtgagcactcccagcgccggccacctcacctcctccaatccgctggagaatcatcactactataggtcgctttgccatcgcgatcgcccgctggaatgaaagaagagaaaggggataaaattttgcgtttccttggaccgacatgtgggcctacactgatggagaagtggtttttactcccggttggtaaccccctgtagttccggttttccaaccgagactatgaatccgggactaaagattgctatctttagtccagggtgaaataaccaggagtaaaaattcatttttaacaccaaccgggactaaagatggagcccttttagtcccggttggtaccaccaaccgggattaaagatggagccgggctagatctggttgctcctttattttttttcttttcttcattgtttttaatatattgatttcaccccatccccgaatcccaaatcaatcatccccgaatcgtaaaatctcaaatcaattatcacctccaaatcctcaaatcgatcatctccaaatacatcacaaaatcttaaaaaaattacatcacatgttctacaaaattcatcacaaatatatcacgtattcacatcacacacaaatcaaatacatctcagatccgaataacaaattttcaaaaaaaaaagaaacaacccaaatagatatttagtcccggttggacaaccgaaactaaagaaaatataggggtccactacctgccctcttttgaaccgggactaaaaatgctctttagtcccggtgtttaatacaacccggactattgtgaaatttggccaaccgaccaaagatggtttctccagtagcgctaccccggtcccaccttccctaatccacaacaataagccctcctcgaatccctctctaatcagtcgatgacatgtgggcccatacccgtggaagaaactgattaaaatcttgtttaagatatggtgtcactgacgtgtggtctctatggccaccatggcatggtcaactataaccccggccccacatgtcaataccacatgcccttttccttagagaaaataatttcaaataggaatattaacccgtagacccctgctgtcagtgattctaacgtctcccagaagggtaatttcggaaaattagtttaaaatgacttgagagattatttctgtgaagagaaatatgaattaaaatttgaaaactcataggtaattcaaataaagtccaaatcaagtgaaacttgtctctaaaattttgtaaattcaagctgtagaacccaaataggaaataacataaactaggtaattaaatatccgtactaaaaataatgttaactccaagtaatgggaataaagattaacatgtaaattgcaaaagacactaccatgagacatgaggaactcttgttttacgaatcatgatgaagatgaaatcttttcacaacatttcagatatgcaatccggtttcataccaatactgtaactgttataaaataaataagtcacatgcatgaggatctagtacagatataaaataagggaaacagctctaacattactgtatctatgttcagaatttcattgtattagcatttgctcgacgagatcatcagtaattagtaagtgtgaacatggtgagcaaagcgtacattatcttactacgaagctagcgtacgttcactgacgagcttacatacagagtaacttctctgctacgcagacatccctgtctacaacatcacacaagcacgggatgtacaaattaattacttaatctaagctctcctaagctagtatattaacccatgccatgctatatccacttcacaacccaaagccatcaaccaaacgagtacagatcagaagcagtagtgagcaaccactgacaaagtctgatcaacc

SEQ ID NO: 5410 - DNA, 120 bp, Oryza sativa
ggcggttccgtcggtggagacgccgcgtacgtggcagttttggtcaatcgggagcgtgatccggcgctgaagcggctcgaagggagggctctggcaattgccgcgcaggatagggcggag

SEQ ID NO: 5411 - DNA, 2000 bp, Oryza sativa
aattgagcctctgcctttcaaaagtgtagtgatccagtaaacaattctatccagccaaggcatgcatgcagatgagaaatgcatgaatgataccatctggtctcgctgtctggctgtttgatgagccctaattaacatcacatatactatttaatttaagcaactgatgatgatggaatgaataacccagcatatagtagtatgtagatatgtatagtggagtactctagtagaagatgcatatgatggaaaaagaacaagggatttttttttaaagacgagaacaaggaattgattcagctaatgtagacatatatgcatgcagcatctagctagccaagtcatccatcacatcatcagatcgatcagctaaccttaccttagtagctctctggttaattaattaggcacacgtggggaaatgaatctgtcgctaaaacggagtagtagtagtaagtgcacaaaccaatcggccaaaaaaacggggatcgatcgatatatactctacattatagactccttaagtccttattatatgatcgatttccccacctgaagccggataatcatgaaatagtccgcacaaattaatttcagtttctagaatctgaatatacacagatgcagaatgtgcatgcacctggaattaatcctgtacatacgagaaaacaaataatatgtcacattttgttctaaaacactgcgaggtggcattttaacggaaaggcaatatgcgtaatattttatccggtgtattgatctagtgagtggtattttatccaaatcacaagaatggagtgacatatcatttgttttctcatatatattattaggtgacggattcagaaaactttttaggcctgggcaaacttaataatagataactagcacacacgataatccatataatttaccattgatataacacatgtgatgtagtgaggtttaattgctttgctaattttcttgttaatgtggtttcattagtttgtacatgagtttgattagctaattttcaaaacaattacatagagtattgtgtactccctcgattttacactataaaatattttaggttttaaataaattcatatatggatcatgtatgtgcttcgtatatgtatctaattttatatggatgttagtgaatttagataagagataaaaagatcaaaacatcttatagtatggatcaacgtggaactaagggagtacctactactaaagatcttgcatagtattttgataagatcattgacagtaaactaaggcctcctttgaatcaaaggaaaaaaaaccataggaattttagagcattttatcatatggaaaataattctatagagttctttgaaacaaaggattgtttcctatcctttttttttgaaattcctatgaaattgattttactagagcaattttagaggaaaataagcatgattcctcttctcatgttttcctctccatatgtctaagattcttgtgtttttcatttgtgctaatcaaacaataggaatcctcgtatgttttgtttcggatctgctcagttgagtcaatctgtgtctcactgtcttgttagtgagtgggtgtgtgagacagagaaaaaaaatcatttactggttaataaataatgaattactccaattaattgtgcaagttgcatggggtttggggagggggaaggagcagagcagtatatataaaagggcaaagcctccgtccatttattcatactcgatctattattcggcggcggctgcctctgcttgcttgtgactgtcgtgtctgtgcgtgtgtgtgtacgtacatactccagtatatatatgcattgctgcatgtcgcttcatcctcaccgccgccacggcgacggcgacgtcgacggatcagcatcaggatcaggatcagcgcgcctcaccgccggcctcatcaacttcctcgaatcgcgtcgcgccggcgccatgagcaccaccaacagctcatcctctgtctctgtcccagcc

SEQ ID NO: 5412 - DNA, 2000 bp, Oryza sativa
ggccacttcacgaatggttttgagaggccactggcaaaggccgagtttagttccaaaatttttcttcaaattttcaactttttcatcacatcaaaacttttttacacatacaaacttttaatttttccgtcacatcgtttcaattttaaccaaactttcaattttgacgtgaactaaacacacccaaagcaagaagtttcgttttctgaaatgaaccataccaaattgatgcgaggtttcgtattgatacaataaaaaaaagattacaacctgagaagttgcaattagaaaaagaacacattaccacgcaacactccccaatcatccccaatcatccaccggcttaagaaaagaattgatgtcgagtcaaccgccgctggaagcaagaaattccgttgagacggaaattaaagcaaaccattggcgaagtacatactcctggatcaagcacacttggggtttgactctcccgaactcaatggcattgacagattaagtgggtgtttaacaacaacaaaggtgtggcatcaggtggtgcgtgggcgtgccgcgcgcgcgcggtggtggattccgttcctcttccctccccactgcaaaatccgctactttctgtacgcgtcatctttctcttgcgttggacgcgtacgtgccgggttatccactccgaattccgaacttccgatgcctctccgcaaagcgtgagatgctctaacgccaccgacaggtgggccaggggaggatttccgggtccactgtcagtggaagcagcggaaacttcaggaagtagtccccaccttggcgaatagcctttccggtgtgaccacccgcgcgggctcggacacaaacgtgcgccacgagagatgcgcactacgcgaagatgtcaccaccccggccgtgtgcccgtgtggctgaccagcgggccaccgtatccgcggagcccacctgttggtgagcgagccgagtgcgcgtagctttgcaatctggccgggcgggctgcttgtgaagaacgtgctcttgcaacggcatgagtgcacgacccgttccttccatgcacctttattcttgtactacgtggtggtgagcccgcgctaattagcctgaccgctgagtcgctgacatggtgtcccagcgcgcgacgccacggccacccaccgatagccccactagtttagccagcccgacccttcgccctggttaaggttggatccgctgttgtcaggtcaggtcaggtctaaagccaaggtatggaccccaggctatttatgatctgtcctgacaaactggagatggaaatagccaatcacaggagagtgaaggactagtaccccctcaaccccagctcattcagatatctcaatcatcataaaatcgtggtcatctccctaaacacaagttaccacgtacggcagcagcagcttcagaagcacgagttctgggaaccaacaatttcgttcagaaggttccatcttctagttaaccaggattttcctcataaatccgctcgtaataacttcagtacaagtataacccagcaataataacaccaaaacaacgatctccagctgatggatgggccgatgatccggtcaaaggatgcgcgaggccgagaccaaggccgctctccacgtcgattctccagtgtgtctaggactactagcttagttccacgaccaaagaccggtccaaccctttgaacattagacgcaccamgtccctttaaacaccctggaaaaatcccttttccgtccgtcctagtccagtcaaattctaatcttccaagtgaggagcttaagctgagctaactggtgccccagctccgtgcacgccggctataagaggccgccctcccgttctccccacgctgccacgcacacacacatcgtctcggcgacacacgcgaccggctggcttagctagcgagcgagtggcatgagcagcggcgcagctggctggtgagagtgagtgagtgaccgatcgatcgagcttgctgtgtgtgacgg

SEQ ID NO: 5413 - DNA, 2000 bp, Oryza sativa
accmaaattcacgggagactcctacagattttgaatcctataacaaaagrtgaggattcaaaactaatatgatttaaattaggtgttttgacatagcaaaagaacatagtggtctcattgccagaaccggttaaaaaaaaagagagcgcatacaatgtactaccttaacttttaatcattcatcttacccagtatatcttgacagtaacattttcctttgtgaaaaagaaggcaaagtaacagcccaactcacttgcatatttggccaagccggccaattgctactgtcaatagctgattagtgaccataattagttaatcccaaatgtattagagtagcaacataagggagaaactggcgcacatgctctgattactatagtggagtacagtactgctgatcactggattgcacaggccaagccaagcagacagtcctacaaaatgaaccagcccgtgaaaatgtaccaggttcactctgatcagtgatctttgcagcacagcttggctatacggaaagagaaagtgtgcgagatccattttagtactacttctgcatcaacgcatgtgctcagctcatacatcatcatcagaggcagaggagatccatttcaccacttgagaaaacacagaatcatcagaagcactttcataccctgcatcaccaaaatgtttacactcttttttcacttcaaatgtcagggaaaagagcaaagactctgatcgtaaaaggcagttaaaaccaaagcttcaaaatagattacgatgaaaaaaaaaactcttacatcaagttttaaaaaataaattttggctatgcacgaccaatcgacaaggaaacaacgaaagctgaaatgtatcatctctctttgagggttaaaagctagagcaacacaatgtggtatatgttctaaaaaacacacacaatgtggtatagtactagtattactttaggaggtttagagccatttgatttgcaatgaatggacaagattgatgtactacaggacccaattaaacgataaaattgctacggaaaatttccggaacaaacatgaaatcgctactacaaaatcactgttttgtacagtggtacaaaatctgtttgccctctgaattttcggtgttgtttagatcgatgccatttcaaaccatactatttttatgaagttgtcaaatatgtatatctattaaatttttaccgaactctgataaatacaaatcctaccaaaatttaataatattccctccttgccatatgatccgttaccatatgtaacatgtggtcacctcatacgtcatcatcggagaagattcacttatattaacaaaaatcacaatcattaaagccctcaaaattctaattaaactactgtactaatcacaccgaattagcagcccctccctaagccattcccaaccatctagaatgaaaaatcatgtggcaagtaaataaacgaggaaagagaagaaaatcatgtcttgaaatgttttctacacaatatccaagacatcatgtgactatgtgagataagtagcattaaatttaagtatgaaatagtgatatttgtattagaagagtagtgtctagtactaatttcttaatgacgtgaagtttatggaaactatattagtgttttggattgggaatgggatgcatcatcaacagcagcagcaaaagcagcgcgcacttcaacggggagagcccagctgacgtggcgtcatacagccactgacgtatgggccccaccccaccgtttttataacctcgccgcytcgcytccccctctctatcatcttctcgctcgcctctcgctgtctcgcactcgccgccgccgccgtcgccgcgcctctctcgccggcggggaggttaggtkagtgagcccgattccgcggcctcgtgagccgagcccacgtattgtcgcgtcaattttccgctgatttttctttctttctttcttttttttgtgattctcaaggtttttcttaggtgtacggatttg

SEQ ID NO: 5414 - DNA, 2000 bp, Oryza sativa
tgccacgccagcaaaagcggtgtaaccaaataacgctaccacaccagtgagaccggcgtagccaaatacctctatcacactagcgagaccggcgtgataatattgttttgtcatggtagtttggctagcatgattaaaacattcagattttaaaataagtatttaaaataaaaaaggttcaaaaaaataaaaaaatattcccccaatgttgcgtatctttgatatatcatctctacgttaagattttacacctgtttattaccctcgatattttaaacccgaaatattagggcccatttaagataactgaaattgattgattcatggataatctgatctttgtgatatcttaagagtataaatgaatgcattagcttgtaaaattttaaaaagttgttttacaaacgtatttcaagaaaaaatatataattttctttttgcacgaaaaggtgttgcttggaagcttgggaagcgtacaaacaaaaatcaagaatttttaaaaatatggcatactccctccgtcccataatataagggattttgagtttttgcttgctgtttgaccactcgtcttattcaattttttttttgcaaatataaaaaacgaaaagttgtgcttaaaatactttggataataaagtaagtcaaaaaaaataaataataattcccaaatttttttgaataagacgaatggtcaaacagtgcaagtaaaaagtcaaaatcccttatatcatgggatggaggaaataacttttagtatgggtcagtttgcgttttaatgatgttgtaaattacttgtatatccttccttttttttttcttaaagagaaggaaaaattttatgcctcatgagtcttgaattacatgtttttcttaagatataagaatttagtccggataagttccggtttttatattttgagatcgaggaaataacaagctttatttccaagtaatattcaaataactgtttaaaaaaattaaataactcgaaaaaggaaatgaccaaaatgccctcgctcccccctccaccgcttcccctccttcccccggcccccgcttcttctacagttctactccamacctcctctctctctctctcgctcgctcgctctcctctcctccctcgcgcgcgcggccggcgagcggagcgggtcggcaggtgcgcggacggcgtcgtctcctcccccgactccgccgcagcctcccaccctccctgtgccgcctcctcgcgcgcgctgccgccgccggcgagcaggtttggagttggggggcgacgtggcaggcctgcttgctcctctaaccgaattgaaggtatccgtttctcctcccctttgctacttcatgagccgtcatagattggagatccatccgggcgaacaatggattttgtgcggtttcttccattccacacccaatttgttaacccgtacaggttactagatggcagtttgcttgaagagaggattggggaattaatcggctgaacaccgattccccggcgttatgtcctcctctgctctcgtgccccattgactttttgcgttattgtaatggccaaattggccgggttgagtgagccttactggttactgagctgttcttgcttgagcttggagtgaccacattccccggcaagcacggttaaatcctggtgcccgtgaatattacgcatatgcatgtggactttcaaaaggattttagtaagatcagggatgtgcggctggtgtccgtctcttagagcctatgttaagtggtgtatatgcgggggtgtgagtgtggtgtcacgtgagtagtggtgtgtgtgcgtgtgtctgccgtgtaattgcaaaaaagaaaagcttctagtactttaccccactaaaaaagttttggatttctgatgctactagtttcagccacagaaaattgggttgagtttcatttggtggagtgctgtgctccagaaacaagaaaatcttggtgagaacatagaaagttgaatgttgcctgagtgctta

SEQ ID NO: 5415 - DNA, 2000 bp, Oryza sativa
ttcccacttgtatactacgattccctgctcaatgggtaagtgtcgaatcctgaatttttctgaaatatcaaattatccgaattttctctgtaggttcagtccatctgttgtttctatttcccacggagcaacagaaatcgcaaagactggctgccgctgtctgaccctctgactaatccaatccagagagtgctagtactatctccttcaacattaattcgagtttaggatctgttcataggtcagacacggcgaacatttctattagccatggacaaaaaaaagaagcacgcagccatgttcaaggggaaattttgactaatctctcgacacaccatcaaattggccatcttattcttaattcgtgaggtccgtctcgatcaagaattgacaggatcaaaggtcaaccaaattaagggaagcatgcagcagttgctgaatcgctccaaacgcagccaagtcattaatgtgtgtacagcattctgcgttttttttttcatgatcagccaattattattcgttgcccgtgtaatagttgcaacgggcatcatcggcagtcaatttcaggtcacaaatctatgaattaatggggggtagctttgaatttccgattacgacggttcttgcatctagaactggtcttatccagcaatcagggactcatgacagtaatgttgcaataataattagtatcctacttagttaatttatttggaagaccaattaagcagaaatggacggaagaaattcaaaccttcaactcggcgacggcgagcaatttaggaataccaggaaagttttcatcagtttaattattttatatgcagatggatgaacttactctgaaacctgattttctgaaagggaaacagacaaaacagaagattaagaacgtacatatgtccagaaagcacacacattaaactactttgtgcatttgtcggtgtcgcttcgcaccgattagaccggagttcatcaatccgcaattatccgtgctcttactcctcctgcttatctagaaccaaaatccagaagcagcatttgtccgaaattcaaacccactcattacagtgtgtgaacctttagcatttggggtcatagttctattaaaccgtaccgtgtctcccgggtatatcgcagagatagaacattctattggtaatttggtatgcaaccagtcacagtaaaaaacaacggaagaaatgataataatcaaaggttacacgctgaattttcatgctaatcaacgtccaaaaggttgtgctttttctcagggaaaaaagttaccagtatacttttactcttcgactcgcggcccatggcctaaactgcttcgcgttgtccaaagcgagacagtgtcctaaacgggccaacacaaaaggaggcctagtaagccggtgcaaattgggccagaaaagacggtggaagaggttaccatacgctgggccgtgtgtagcccaggaaatgggtggacgttggcgcgcgaggggcgggcgggcgggtggcgaggtgatcgatcgacacgcggtgggggagcggcggccggcatacgtgtccagcggcgacgggcccgtggcggccgcgttcggtacaacggagccgtatttctcggggccaatgccttcggcgcctytccccaaaccgsgcgccgcgcgaaccccccttgcctgccttgccactgccagcccgcacctcatccatcgcctcctcctcgatccctctcgctcgctagcttagcatcctgcatgcatgcagcgcagcggccgaaaccgcccaaaattcccagcgcagatcgctcgcctgccttgcctgcccgtccgcctaaccgacaccgcaacaaaccacagccacacagcttctctctgttgctcgctttactgtgcgtgctgtatatacacccggtggatgagggatctagctaactagcttagctagacagcgtgtgttggtggtggtggtggtgtgtgtgtgtgtgaggagggtgatcgatcgatcgagcg

SEQ ID NO: 5416 - DNA, 2000 bp, Oryza sativa
taccggttcgtttaaaacatttgagatacttctaataaaactttgataggagagaaaacacatgacaaattcatcgggcgatcctagctgctcgatcagtatgggatacaaacctgaaggcgctggagctagctgaccggcatctatctcagtgacatcgccgtcgtcgtcgcggccgcaggttggaccaaactaattaagccgaaactttttttgccggaaaagaagaaaacggcagcgaaatcaacagctcgatcggtcgctatacccccaagctaagtcaaaatttcccgggttcctttccgcggcggggggatggatggacggccggatctggggccacgtacgccgagccaggctgtggtcggcccgcccgcgaccaacctcggtcgcgacccggacacggactcggtcgcaccgtgacacgacgcgtacgcgacatgtctcgctgtagcgtgagccgtcgtcgcaccggcccggcccggcctgcctgcctcgtcaggtgaaacgccttttctgacaaattactacggagtagtagttacgtgcaggtttaggagaggtaattaatgaaacatttcyttttgacacaggctaccactttacatgatgaagaatcattatccgatcgagatttaaaattacaacttacatttggtcgcatttttccgtgcaacacatgtaatcgtggttaaaaaaaaagctgtaaatctgaagattagacacatgtaaaaaaagaaagctgtaaagcagtagtgyccttttttactaaatgtgattaacaagtaaaatcagtcacatttaatacgtgccagccgatgaattcctggcttgcaaatttcggttacgatttattgggcacgccgttttttttccctttgacacgtacggcctctcgcttttccaccgtcgggacgccacagccgtcggatcgccatcggacggagaaggaacgaggaggcatcggcagcgtcatgctaacgtcatcaagctggcccatcgacggtgggcccggtcacgcgagtgggcccggtcaaagcgacacggacacgtgccggtgagggatgggtttgaatggtttgaatggtttgacgcagccccgtcctgttgactcacctgaccggctgcctccggtggccgtcgctgactaaaccctatacgaccttggaccactccccttctagctattcccaccatgttcgcaattaggacattgtttgagccctaataatttttattattactactgttccaaatgtcatttaataaatccacgactctgcaattagaaagctgtggagaaagttagtgaaaggtaaagtaactcacaagccttgacatggtcttgtactcactttttttcttcttctcatttttttgtataagagattaaacaagagcaaaagtttggttgataatatagagaaatgcatgaagcattgagaattggtaaagcaaacaacaagatgttactagaaggtaaaacctgcgaccgaatactaactcgatctaagggtagaaaaactagtgttgcgcatgcaaagtacagtggcgtatagtacacatgacaagagcaaatcaaatcaattaatttttgttaatttcaattatgcgacaaagcccgtgattaactaggaattttcaactaagcccttggcctctcacccaaccacctagctatccccacacatgatcacactagctagcttcagcttgtgctagctcgcttacacacaaatacacacctctccctttcttcttcccctctctatctctctctcgtcgtctacctctcatctccttctcttcactgcatcaccacaccactagccagtagctagctagctagctagcaagtacgatctatatgtgagcaaacgccaaggagaagagggctagcttgcttgcttgcttgcacgattgatttcgatcagtttaatttggagcaaagcttagctcgatctgagctagctagctagctagtttgcttaattagctcc

SEQ ID NO: 5417 - DNA, 2000 bp, Oryza sativa
tcctttcactgacctttcaaaattctctcattattttgctgtcttgaactttgttttcttccatggcaagcaaagagtgcaagaagaacttgagttggatacagactgacagaggagagtgcaaacaaaaactttgcagtttttcaaaggggaacaagaacaaaaaggtgtgaaaagaatggcataatgtttgcatttggagtagtttgtagaatgcatttgcatttgtagaccggcagcattattggtggtaggactggaattggcaccagtacaacgactagtccatctatctatctatctatctatctgctggctcctcacagataagaataatataagatcatagtatgttgaaagaatcgaacaaggcaattaggcaaagagaggaaaaatagtagcagtggattggatatttggatactctggggaattctttttgtatttgtggtgctggtgcgcctgtccgcaattgcaatgcaaaccaagcatcagtaacaaacaaagcgacgaactgctgtactccattaagtggcataattgattaagcagataaattaacaacggttggaaatgaagagaacaggtgcatcatggttgattgattagtgtgccacttgtaagccattgatcattttgctggatggatttgtttacaaagaaaaattgggcgggatgacgggtcagtcagacgaggccaagtagcaacaaggagcaatacaactgcacaaagaaaaggcggtttcatttaagtttttttaaggagaagtttcatctgaagttcctcatgaaacggatttactgggttattgaaactgattccagggcattgttcttttcagcttattcactgaattattaaaatggattgtttgtttcacacttaaaaaatatgttaaaaatatgttaagatttagtaaaaaaaatatatgttaagtaatattcctgttgtagttttatttagaccactcattttgagcagtgtttatttagttaaaatatctaatctgttttaataattaaatcgataatccaccctaataatctagtagtacccaatagggtgttcaatctggaatagcgagagagcaacacgtgcgtggacaagtagtgtactgtagcgcgtccggtgtctcgtctggtcggcacgcacgcgcaaatgccctccctccatcccgcttttggccatttcggcatccactttccccttgtgttctccaaaacaaaccatcacaagagattaaggtcacatcaaaaataaattaaattaagcagtaataacctaatagaaagggcattggttcaactctagcttcatctcttttagagctgaaacacaaccaaatagtttcagcttcataaaaaaagggcttcagcttcaaaaaaaaaaaattaaactgattgaagtgctcttataaaataaacaaataaggtaaaactggatttagatagcttcacaactttatttcatatctaacttttaaagtaaaatttaaaattttgtgccctaccaaacaaccctattagtgctaatcaacaacaacccatgcccattgattactcagatagaggaaagagccacaaatcgcataaatttactagtaaatattattactgtcactgacaagtggtttatttaaggaggatgaaaaaaaaaggcaaaaaaaggaaaggaaagaaaaaagaaattacttgggcgtgtcgagggggataggaaagaaggaaggagttggacgactcctacaaagacgacgacgactcatccgcttcttcttcttgtttccaccgagcccaagccgccttcgccttctcgtctcgtcgataaaagccgcgagtccacccacccctcctcctcctcttctgtttttattcattccttttgcttcttcttctgccattccatccatccaccgccgcctccgctctctcttcttcttcttcctaccctttgcctagttgcattcggagaggagaggactgattgattgattgatcgatcg

SEQ ID NO: 5418 - DNA, 2000 bp, Oryza sativa
ccacctcgtcattgatccaaaatataatcacattgtatattcagtcgtacccggatgacaagaggacgcggacgcctcatccaaccccgattataataaggcgcagaattcagccatggcatttttctctccaacctgcaaagtccaaagctgctctgtcaaaacaaaaaagaaatccccctggcatggccagagacaacgccactatcatcaagtgatgatctcactaatgattgaagtcaaacggcatgtccgaaattcttctcagattggttggagccttggaggctttgagagtggatcggagtttggttgctttgcttgaacatttttgttgttctcacctgccccctcctaactcagagaagaagatgactcaccaagatagatacgctgacgctttgcagggtggtcgactggtcgtcgtggacgacggcaacacgccggcgcgccaagttaacaacctactaccccccttggtccgtccacgacggcaaaaatgcaaacgtttttctaaagttggagcttggtgcttttctagtgtcattgttcagactttcagaacaaggtgttgatgtcaactgcagaaacaagagacatttcattatcatttccccctcaattcaatattgcatcagcaagaacttcattgtttaggtgacgctaatgcgatttatatctggaatcgatgccaatatgttggagcagttcatatgaagaaatggaaattcgttttacgagcagttcatatgaagaaatggaaattcgttttacgacgattgatggatgcatgtaaagtgttaagtcttagcttccaagctcatttgcaagccatgcatgcacacccgccgtctagaaaatgggctgcaatcagatttggtgccaatgtgttattatcagaagattgatttggaggatttgttggaacaaatattgacacttgatattataggctagctaccagttccaactccccagtactaaggtcaatacaatatgactccaatcagattcagcagtggaaacacaaaaggctcacagctgagcagtgaggaattaataatataaaatgtgacagttaactcctaatcattataattccaaactaagttcgctttgcccacaagttttagcaaagacgcaattgacatgaaaaggcacaagtattactccctactcagctattgataacggcagactaactgatacgacagagatggtcaacaaacagtctctagctataggtttcgtctgaaatcagacaaggttcaaaaggatgaatagaactaaatcacaaagcaaatcagtagctagactgcaaaacaccaatccacccttaattatcgtttgcatgagatagttttgcttctcaaaccatggggtaaaaatggattaaccgcaacgactttgtcccattcaattgacggattaacggattggtagcggtacgaaatggaatgtctgtctttcaaactcgaagcaaaagctaagtaaagtaacaacctaatcagatgacacagcacacaaaaatctcagaaccattgtccaaacacaacttgacgcgttggcgcgtgcgaagaaagtgcttaagctttgttctgtgaaaccagggcgccaacgggggcagccgctgctggcctgggcaggccagtgggtgcaccaaactatctgcatagttgaaccttggtgacacgaactcgacctcgaggcatgcatgcgtgaatgagcatgtgtttgcgaaagttttccctctaccacgcaagaatcaaaacctaaccaaccaaccagagaagcaacatgcatgacgaaacacaacgagaaatcgatcgtagaaccatgtcctttttgaaacgctatatataccgcgccatcactgtgggaagtttctcatcgccacacagaaaccttcagggcaagagctatagctaagctactgtgtcacccgttcgatcggtgagccgacgccagcacaagcgccgcaacgtttgcgcttagccggc

SEQ ID NO: 5419 - DNA, 2000 bp, Oryza sativa
tactaactaacgtacatatttctagcgattagcttgcaactaaaagacagatatgtataaatggagatatatatcgtaggagtatcacatcatattctagcatgatgcaaagagatagtactgtagtttggccgacgggattgatatatcaatgcatgcatgcatctgcatggatcgatgcatttgctgcctgtcaagtcaagtcagcctactctggttgagaatgaatcgtatgctactatacttattattattattattattagaatgaattgtactctctccgctttaaaaaaaatcaatcctaagccaggattgttttatttacagagtttttttattgtccttgacaataagcggtaccaaatcgtagccgtcgatctagcgacatcgaacggctgcgattggtccgtactgcatggtaccgcaagccccgattgaggaggtaccgcgagtgggagggtaaactagtacttccacgtccgagctcatccgtttgcggtgctttgatttgcagccctttgggaagaagggctaaaatccaatgcgagctcgccatagttttcgttcgctggccgcaactggtgagcatcgtggacccaaatccattgccgccaggcagcatcagtgccgtctgctgcattgtcgactatcgccgttagggatggatttggaacccacggtggacgccgccaamtccgaccgtgccagaagtacaagtccggccgcatcgccagccgccgtcgacgaggggcagagagggagcagyttcccctgggaaaacacctcgaaggacacgcaactttccttcttactgcctatatgctcgattccacggcaaccaaacgcgttcgtcaaagtagaatccacgaagccaatctggtgattcaagacgacccgtactagcagcggcggcgcgacgacaacacactgagacaattcgctcaacaggcgaggatgcgacggtkgcctcggtgagggcgtcgatscgatggcggccgctgcggcgtggatgcgacggcaagggacaacaccgargtttgggattggcggttgagargctcgcaargggaccggaaagcaggagggattaagaactacgcagcgacgacatctgacggcctcacctacctttcggtctcccgcagcgacggtgtcgttcctcaccgattggattttttagcccgatcctacccctcctaaaccaacggtcagatttaaattggtacctggtacctcatagtaccttctcaagaataggaaaaaagtatactactatacttattgctattactgttactccatgtgaagcccatacaacactaataattatagtgacttgagtagcaccataatattctaagtttaaattttcatagattaagccaatgtgaactgttctccatagatcaagttttactgtgatgtactgaactgttttttttttcgtttttaatttctaggagctgaaaaaattaaggcaatgtgttgaccattcgatgttgatccaacggatggcacaaatccccacaccgcacgacacctcggctaacaactggctgagcgtcaggcaaggcaaaggggtccgtcctataaataaaggaaacagaggctgctcctttatagcttcaaggtctgaaatcttccatccccatccaggactttgatgatctcttctcttgagtcttgatccatccatcacccacaataatcctaatcacaagtgggcgtgagagagagggggccagaaggtcaacctttgatttaattagcaggcaggaattaagaggcagctaacagtagcagtagcacacaatcaagctcaaccctcatatatcccgtgatccattgttcagacctgccttattactagctgtagagatcttaattttattgtaaagcaaagctctcacctttatttataactagctgcccttcccttgcatcctattccttccctgcatcagagcagcgagctcgctctccatcccctgcgtgcc

SEQ ID NO: 5420 - DNA, 2000 bp, Oryza sativa
gctcgctctctcccctgccgttcgcgctcgctctcccgatcgcggctcgctcgcatggcatcttcacgcaggctagaggtttgtcagtgttcaatgggcagaagagtcatcggtggagagcggaatccactttcgatttaaacaaacaatcgtgatgccacaaaagaattgtccggttggctccaaccaaatgcgtgaggcatctcctatctccttgttttgaccggcgtgaggttaagggctggtttggtttgaggtctaaatttgacttaccaatatttaaaaattttaataatgtttagtgtctatttgttttgaagccaaattttagcatgcctacgaaaataggccatttcaatagttaacttaggctattttggcttcaatccaaatacaactttgccttcccaaaatttgtcatgccaaaacttactaaaatttgacatagtcaaaaattggtaaggtcaatttagttcacaaaccaaactagccctaagacttaagggtgatgaagaattcaagattccctgctgctaaacctagattagtaatgcagtcctttttatccctttggtgcgaactgatgaggatggcgactgtgccttgatggatagatctcatctaccggcagcttaaattaggaagcaatattctctctgttgggtagagagcatataatctagcctgtatttggctctgataagtgggtggagtcagttcagtttgctatttcagttctttacctgttccatgccatgccatattgtcctccgaaacaaattctatgaaacaaattccagtgattggaatattgtcctaagaaaattatcctaaccataatggaacaaattccacaagagaaacaaatccataaagtgttagacctgcacgctctttcactgtgtcctactataaaacgattaaattgattgattggaacggccactggtctctctttcccctccgtaaatttcttgctcagttcaactaatctagcagctgcgtggctgtgactgtgagccaccgaaagatccaaacgccaccaccaaaaccaaaccaagcaaagcccctctcaatctccgaataatctcgcgtctcttttgcgccttttcttgtacttcccttcgcttgctcgcctttgaattgatccatcaaccacaaaaaagagaggaagagaaaaattttgcagtctccatcactcctgctgtcccatgcgattattttgtcccggtcgtttgatcaatccaaggacaactcaacgagatgatgctggtgatgaggtgagtcatccttcctctcctattaaaagctgtttttcttgctccctcctcgctccctctcacacgacatgagcagccctagatcgtccggggttggagcaactgttgtgtgaggcacggaggctcccagattcctttttgggttcttttcaatttgagttcttctggcacttttacctgatatttttttccttctttcttcttgccgggtggtgccttatttgcaggagatcaaatcttgatggtcattattagctgaaaaggattggatttttaccgcagagacagtatctgagctgtgtttctcagtgcctcccatgttcttgcaccaaccaagctagaacttggaaaggaacaccaccatcaccaatttgcaagagaaggttctctcccttgtattataaccacaactatattgattcgagattaaagagaagggcacagtgaggatactggcatttggaggcttgttgaatccaggtgcgtgtgccacctctcccgaaaggccaaaaaaaaccactgctgcgagtgcgagtgtgcaactttcctgcaagaaacagtgagccgaacacaccggctctgttcttggctaattaaaccccaattgcggcgctgtttggattcagttcttcgcaattcttggattccccagcagcaactgttcttccccaaccgagagcccaaatctttgatccaaaactttgaacccggttagaagcc

SEQ ID NO: 5421 - DNA, 2000 bp, Oryza sativa
tagcgactagcgagcacgtcaaatttgcacaggcaactcttggaagacggttgatctcgcaaggtaacaacgactaatgtgtacagcgtactacagataatcatgagtttgtattgaacattttgacattattgtaaagtatggtttgtcaacggtttgtttaacttttgacctagttaacgtgaaaacggttatctgtcgcgattgtcaggatttacgtgggccgcattgggggcgggctaacgagcaggccagcttcgctatctccggccggccgggccacccgaagccgactcgaggggcataggcccaccacaattcgcacctagctttttttttttycgttgcagcaaaaggttttctgaatctactgaatttatctagtcacatatttcctcccttttttaatatgtaatgttgttgttgttttagatacgtataatcatttgtcatattaaaaagtttatgtaattattattcattttattgcgacttgatttatgctaaaatgttttttaagtgtggcatatttttttatatttacataaaaaatttaactaagacaaatggtcaaacatttgtcagaaagttaatggtatcaagtatttaaaaaactaaggtagtaactgaaatatagagagtgtgatctgtagcaaaagtgatcagtactacaactgtttggaaatgtaatcaaacagcgttgatgaaatactgaagctggctttgatcattgcaaacgctaacagaatgctatagcagaacgcaacccttctcatgttgttggtaagagccaagaaatgcgttaggcatgtcctgctgcttaacaacttaaattaattgattacataaaaacgttaactcatccaggtatagcaaagtattattgaaagggattaccaatgtaaatattaaaattgtaatataattatagtgtaacttacacataactataatataatttgtttaacacattatttccactaaaggagtacacgtgaccaaattgcatcacccgtggttgcgctatgattttttcctttcccgcttgcagagtcttaaagtaaatataacagattaaaaatacataaaaagttacatacatattatattataattacatacaagttataatattttttgaacgactcgcataagacggtgcgaagttctattgatagagcagaagaaaaattataagattacaaccctggaagttgtaactaggaaaaagggaaaaatataccaccacccacacaccgacaacgccaaaacactgaacaaggagaaggctagcaccggaccggccaccactaaccgtggccgacctccgctaggccaacaaagaaaacacggtcgggatcgcccaaaacccaactcttacaatcaacacaaagccccgctctatccaagtattcaggagttaaggagagagggtgagagagaagaatggaactcctctccccttaggccctccgacatggccagcttgtagagactagttaggatgccgccacaagaggatgtaatctagagtgagtttgtactaattggttgggtggttttagctaggggatgcctaaacgatggatcatagcaaaaccgttacttgaatactgaagctacctttgaatctttgatcatggcaaaagcttaacagaaggctagagcaggatacaaccctttcgtgctgttacctgtcggtacgagccaacttagccaagaaatgccataagcatgtcatgttgtttaacgaattcactagcttagtagtagcttaattaactgcctaaaagataaaaaggctaataaaacggttaactcattcggagacaaactcgtactgcaaagcctacgtgaaaatcgcgtttcccgcgctctcgtggcgcaccttctttgtctgtacaagaagtctattatataccccccatcctggccaagaccacacctcgccgtcgccaccacctccctcgccgccggcagccgagcgggtcggtgccgcc

SEQ ID NO: 5422 - DNA, 2000 bp, Oryza sativa
cgactaggtagctacatatagcattatcaaataccctcacaataataaatatctaattgtccttctaaagcaagtatttcctacgtatgttgaaaaaaaaacttatctttatatcttgggctactatgaaaaccgaactatctttcattagatacgcaaatatatattcatttgattatatgcattattatgaataagtgcgcgtagcgtataagcacatgcagttatactgtgttttaaaaatacacaatcatatttatagtcaggtaaacgtaaacgtaccatgtattcatttatgtaccgggcctgttcatctgcactatagcaggctacgacgcagtcacctcacacggtattttgtgtagcataattatgtgttggattgggatcaggtgcagtcccaactacaactgcacacgttagggactacacaggatcatgtccatttaaattttcaatggaaggttcagattaaatgctacagtagcattggtataataatttttgttggattatctaaatgaacagcgctctattaaatttgggcctttgaatttgcatcctgcggccatagtataactgtctaagttgcagtcatagtaataactgcataagaattaagggtctgttcactttgatgccaaaattttgacaggatttcttatatagttaccaaaatttgacagcaaactaaatgtagccacttttttttgtaactttaccaaaatttggtaaggttgtaaatgatatcaaagtgaaccggctccaaatccgtatgtgttgtagccgctttaacatgttgccgaacacggctgctgcaactttatagagatattatccttactaaataaaatacaccatcgatgtccgaagaagaaaggaaaaatcatattgaacgatcaaaccattgtcgccgtatgttggtacacggtattaaacgtgccaaaaccatcttccccctccccacagacgtcaaacgtggcgaaccacttgacaccaacgtgtgcacgtctgacttcttgcactccctatacgtcttgacccccccaccccccaaacgcccaacggatccttctggaacccaytsgsgccgtcaaaccacmaccgcctccgtctccttctccgttcccgtctccgtctcccccagagagctctcgtcgcgcgcgcgcacttttctcctctccgactgcggggcccaccagtcagaagagaactctcctggcgcctctctctcccccaaccccaccggatacctgatccgggccgtccgttcgatcgatccgacggcggaaacgttgtcctgggctcccacggcaggaattggatggttctagaactcacccgagtcccgaccaccccacccccaccaccacagccgcctctcatatatcaagcggccgcccacgcgcccctcgcatctttcgcraaggcgattcaggcgagaagagagagagagagcgcraggccggcggttctagaagcttccagacccttcggcgcgagcgagctcacttcccccgtaggtacggccmacccttctcttcccaggtcgcgccgcratttggatccgcgccaccgcccgcccgtggatctgatcgtgtttcggcgatttgttcgttgcgttttkgattttatttaaattttttctggggtctcagcctggggggatggtttgcgctgctcgggtttcagccgcggagggatgatgtttttcgttgttattttttttttcgcggtagctgcgcgggattttgactcgctagggttttagatcggtcgtggtgcttagagtaatctcaaatccttgaattgttacaaatttttatttttgcagctctgcagatcgagatttatgtgattttagtgttgatgtttaggtggttataggtttggatcctgctgtgagtaactcgtagatcctgatcctgattgattgtatttatgtgcgcaggagctgttcattagatctgaataagggggattgaagcagtgaggagaag

SEQ ID NO: 5423 - DNA, 2000 bp, Oryza sativa
aaataagcgaaacgatgggcacaaataagcgaaacgacagggccattagtatacttctgaccaataagagtctcctggccaaaataaaataaaatatataagcaacataatttgaatttttaaattaatttatgattaattaagtggattttctgttactttttattttttaagtcgtctttttgacaactctaaaatcattttcactgcctttatcatgtatcttctgtatatcgcagctataaagctaccacatccattttaaaatgtagctattcttagttatgaatctaacactgttttaatcaaataggcctacaatgtgagcaaaaagtttcctcaaataattaaaaggaaatgcccacagatttcacacaagttggcaaggcatttagtaaacgccaaagaagattacaccgagtcaattccagtgtagtacttaaggcccaatgcacaggtgacaagtgtctctacagtatgctcacgtgtttggttgtaaggattggatggaatggggcgaacccacttttagagatgtttgttttagggtgagtgggatgggttggtcgcaggaaagaaatattcctctcagatctgggactaaccgatccgggcaaatctcgcggacgaactcgtcctacttgggacgagcaaacggcgtcaccgcgccctccggcacctccgtgaccgatgcctcgtccgcgaccgccggtccgccgccactactcttagatccgggagcggcctcgcctccgcccgtccgcgcccgccgccacctctccttcgcttgcgccgccgagctcctccgcccccacgctcaccgttcgctgcatccctgccgctagaagccagacggcactaacggtcagtacaaatttgtcctgtccatcccatcccatctcaatcccttctaccaaacaaaaaaaccataaccatcgtataccataaactaaatagacaactgtaaccatcctatcccacaaaataggataggtctaacacatcccacttcgtgtccaaaccaaatacacgctaactttattgtgcatatgtcagttcatagggtgagtgtacgttcgatgtaagcatatgattttataccgtgtttttttaaagaaatatctttctttgcattcagaccaaattaaaaaaaaagtacttcctccataaaaaacacacttttgggttcttaaaaaaacacacgcaaatccataaagtgctatttttttggttattttcctccactgtatacgagttatgtcatattcaaatacagaaatgtcttttaacggagagagtaaattttacaacactgtatacggagtagtagtacactactaccagtagactacacacgtgctgtgtacaactgggctttcaaccagcagcgtgacccaaaagctgccaaactgggccgacctcgatgatgagttgtcaccctcaaattgggccacctgtccaccacccggcccatccacctgcccccatctgtcccacccaacccccctycccccctctctccactctccagaagcttctccgcggccagtggcgacgctaccctacgcggcgtctagaaccttccacacctytcccgacgcctctcgacgtacggcgagggtatttttatctctccgaccaccctccgccctcgctcttcttccccccgcacacgaagaatttctcgcttcgtttcatccccaccattttttttttgtttgacctcgaaagggaaagcagaagaagaaaaaaatatcccaaaatatccccgaaattccaccacctgtagcagcagcgatcgcgtgtgttcttggttccaattcgtcgcctgatactccgattcgagttcttgatcaaagttgctggggttaatttgggttcttggttgtaaaaggcggaaagggggtcatggacccggcggcggcgggcattgtgaaggaggagatgctggattcgcagcagcagcagcggcaggaggatggcgggcggcgccgcggccg

SEQ ID NO: 5424 - DNA, 2000 bp, Oryza sativa
ttcatcacacataacaaaagaaagaccacaacttcagttcataaaaaactactctgttcaaatgtttcgagttaccgcacactgaaaaattcccgtgcaaaaatatcctaagtacaaggtttcccgtgcaattttacatagatgaatgtggaattgaatttgatgtgcaactcttatattttatttctataaatataagtatgatttctataagaaactgaaaatggaattgaatttcttgtacaactcttgtgcatgcaattgtaatttgtatacaatatattctaaaaggagtattgaattcagtataaagctcttatcttctgttttgagagatatatattgtacctggtatagaacaatatcagtcaatctgtaccgttaaaaccgtcaatatttttttcttcaatgtgagaatttctaagcccattttcgagctatcttttataatatatttcatctgttctaaaatataagcatttccaagattcaaatatcaatatatgatgatccagtctttcaaaagcgcttatagggtagggtgtacgcgtgttatgagcgtctatacttgtttttcaactaaatatatatgtaacaatataaatattcctgcactaattcccatcatttcaatgatttaacatccaatcaaatgctagaaaggaaatgtaagcaattcaaaattcaaaaattgacaactgaagtaacaaaaataatcttttgatccaaccttactacttaggggctgtttaattcccaaaacaaaaacttttcacccatcacatcgaatgtttggacacatgcatggagtattaatgtgaaaaaaaaatcaattacacagtttgcatgtaaattgcgagacgaatcttttaaacctaattgcgccaagatttaccaatatggtgctacagtaaacatttgctaatgacagattaattagacttaacaaatttgttttgcagtttcctagcgaaatctgtaatttgttttgttattagactacgtttaatacaaatgtgtatccgtatatctaatgtaactcgcaagggcaaaaaaattttgccaactaaacaaacccttaagaagaacctataaattgttatactttaaaacaaagaaaataatagatagatattatatgagagtgtggtgcgcataagtagaagtgtggaagattgttctatatcttccgtgtaatggaaaatacatccagtaattatagtttttgattttaaaatttctcctgatttcttctcgaataattgctccgatacctatcgcacaacaattccaaagatgtgctgttgttgaagcactgtatatatacagcgtaatgaacgggaagtgttaaccattttattaatacaaggatatttcatatgaaaaaccgaacaataaaaaggaaaaagcaaaaaaaaatcacatttttgtctttgtcccccccaaatccccatccccaatccgtccgtccattcgaagcgacacgcccactagtccgccctcaacccaaacccaaaccccaagctacacgtacgagttgaaactcgaaagccgtgggaacacgcgacgctctcgggtgggccccacaccccggcgtctccttccccgaaaccacacgtcgtcgcctccctccctctcctctcacctcccggcgcgagcctcagccgcctcgtctgaccggtcaaaccgcacgagctttgacctcacccccttcgccgaagcatccccaaaccatcacgttcacattagcctccctctcccactgacacccggaccccaacctactccgccccacctgtcagagacacgtgcctcgcctttacgcttctgcccccactgaccggagcagccgctacttaagccgccgcgacacgagcctatccaccactcccgtctcgtcgtctcgttctcgtctccgatcactctcctcctcatcttcgtcacggtctcctcgcttcgctagctcgcttgcttgctggctgagctgtggtacgctcgcc

SEQ ID NO: 5425 - DNA, 2000 bp, Oryza sativa
ttacaccatgtggatgtatttttttatctcttaggcttcattcggtctacctcattagatgagcttatctaggacacgcgaaaaaaaaagcatgtcgtcagcgtaagattaattaagtattaaatattacaaacttgaatatggatttatttgatcatttaaaaaaactttgcatagaaagtatttgaaaacatgcatcattttaggaacatctcaccataaagggagtagccaatccgataaaattttagaactcaaccttaaatttactataaaatatatagcatataatatattttgtcaatcaggaatagagccaaatatatcaatcatatatccctactaattcctatgtgtataagtttcatatacaaaacactatccaccaattatcaagtcatattaattacttatgaggcatccgtgcttaatacacctaataattagatgacatctaatatgcattgtgttatcaagtactgataatggacaatactaagtgaaaaaccatcaacagatgatagataagtattgatactagcaagccgcaacaaattatagttgactacaaatatgttggaactattgggtaatagcgttcccacacacctacatacattcctaggatgccacgtgacgttctaataaataagggtagatctaacaaaagttataagaaaaagtaaaacatctagccattgatttacacttaaactggtggataaattatttttaaccataagattagatctcttcaagtaatccattacgactatgactaatagcattcctgcacttccaagatgccgcatgacgctctaataaattagagaaaatataagaaaaaatatattaagaaaagcaaaatataactgtttatttacacataaaccagtggatatattattttcaatcattatattatatctattcaagtaatccctcactatgtacgtacacaagagatgtcataaaggaaaaaaagaagagtgtgtatacgatcagccccatcaagtagttttctctttctttctttgcagcactgagattttccacaaattgtgcatatgagtagtgaccactcctggcgagactgtcgaagaagccacgctgcactgcaccgctttacgccatctcgccaattttcttgaaagcatttttttactattaatgttaaaggcaatctcgagcgcatatataaaggtgtgcacacccatcataggaataggcatacgcacacctaccctaagagaaaaaatatttgtcccaaaaaagaggaaaaaatatgtaattagtatttgccrggaraaacatatatatatatatatcatcgaaaatgtcgcatgtaaccacattatatctttttaattatataattgccatctatgtaataatatgctaattattaacattatagattattccatcgtatattacccatgaacatgcataggtgaatcaaatatataataaaagaaaagacaaaacaaaaaatatattaactcatatgttagcgaacgatggtgatagacgagtttagatataaccggaacaattcgcactgttattatagtttaagggtgtaattcagactatttcctttaaaaaaaagtcacttccacataataaggattcataatacaaatttaatcaatactaatttagtaaagtgcccgcgcatatgcgcgggccaccttcctagtttcataaatagggccaactaatttgtctcccataattaccttgttaattagcagccaattatggtgaagtttcttttgctagtacatacatgagctaacatttacgcattgtgtcgacactccactgacatttcagtagtccactgccgttttcgcacaatatatgcgttaccgagcagccacgtctcatgaacacaccgcttctaagtacagcaacttccgatctctctgcagatgacgacgccatgtgcgagctccagggcgaagcgcgccaccgcgccgctggacgccgccgcg

SEQ ID NO: 5426 - DNA, 2000 bp, Oryza sativa
gtcggagatgtaaacaatctcaaatgaaaaaacatgctcaactataaaaatgtactagctacttccatctcaaaatatagcatctgaccttgtccacataatagctaaaaattgctatattttaagatggaggtactacatctcatcaaacccggataacttggtacttgatgaggaactaggtcccgatcttccgataggtactagataggtcaattgtaaagatccaacattaatgatccagaggatctaatcagaatgatcgaacccctcacagtcactacaccactcttcgttggttatcacccgagccgagacacggttgacctcgctgataaggctatctcctccaagcgaattgagaacacaagcaaaagagtggaagatgtaatcttaatatattgtgaatattcgatgaaggtcacaaattggggttccacagaccggactagcggcgaaactacaatggcagaataatctaagaaaaatcaacccctatttcgatgatggttattgaataaataggttatagagtcaaccaaggacccttgtacgcgtcagcaatggactccaacacaatacacaggctaacgaccccaaaaactatgatgcaccacttgaacaaattctggatgccaacttatttcgacgggacatttaattatttgccacttttaagatgtatcaattaaggatttgccactcgctgtctatgacatgtgggccctcatgtgtctatgacatgtgggcccaatggcaagtcctttagaaccactcgtaagagtggcaaatagttaattattcctatttcgactattcatgtggactcaaatggaatttcgatgtgagactaggcccattggaaaaatgacatcgttagctttccatacatatgtgtagagtatcgaaaacagagtccaaatgagttctgagtgatgattttaatgagggttgctcctagattttaaggtgggggcacaaacttgatatatataaactagatgattcctgcgcattgctgtgaggtggttgtatataccattaatgactgaaaaatgtatacactataaaaataatgaataaaaaaatgtgatgtttagtagctaaacaatatttaatattagaagacttgagctaagatgaaaagaaataaacattaaaagaatcaaattaaacactatttacaatatttttactttttctttgtttattttgatgtatggttaggataaattatattgatgattagttattcagatgtttccatattgtgagaacattgtcaaatattgttggcgccatatcctaatcacaataatgtatttacaaatataaattaaagctgcaacttaacatagtacgatacattcataatgaatatcttaacctttttgggccatggttgttcatatgaattcacacatgcataagaagctaacatattaaggtcatgaatacaaataactaaagtcataaatagaaataactagaggactttaatttatatatggtcctatagcatatttttacggtcattttttttaacctggctacgtctgtattaatgagcacgtaatcatcatatgagttgaagtgttcaaacccacacatgtcacgacagaaagtgttccttgtcgcctctataaccaataaagacaaaaagaatataaattacgaaatgcaactgttcgcgcgggaatcacggattgaagttgacaatagtgagtatattagggcatgtgatcagcattggaggagaagaggcttttcactacttcaggagcaattgattaataagtccaacaattaggtgtcagcagagtaagcattattaactgattattatcacatgccactattactcatcccacattgtacttgcaggcatattccttgcagcatctatctatataatgacctgctcccatcaccatcaccatcttccacaactccagcaattaatccttcaagaatcacagaaacatatatagctatccacc

SEQ ID NO: 5427 - DNA, 609 bp, Oryza sativa
atcttttttttttcctttacaagraaaaccaaaaaacgatgtagaaaggaaggtcgaaaaggaaaggaaaagaaaggaggatgcagcgacgaagagaggaagaaagaggctctctgatttgtttgcgtttgtgcagcgcgtcttcccttccttttgacacgcgacacatccagcagccaaaaaaataaaaaacccaaaaaataaaacgattattttatttttgtgtaaagagaagggaaaaaaaaaacgcccgaaggagaaggagacgagctgcttcttcgtctccaacttcccttatctctatcaacccccattcctccattactctccctctctacatatacccttccccacccacctcccaccctcccctctccaaccacaccactctccaaatccatccatcgatcgagaattcctcttctccctcttcttgttcttcttctcctctctgaatttaacaagaaatcaagaactaggtgtttgttttgactaacaagaactcggtcgaacactctgcgtgcgtgtttgtttgtgtgtgtcatgtgctctgggccgcgcaagccgtccacaccgccgctgccgcagcagcagaaggaggcgacggtg

SEQ ID NO: 5428 - DNA, 2000 bp, Oryza sativa
agtgtcaatatcaaggacagttttctttctctttctctcagaatctcatatttaatgcaaggtatccgaatcatggctaataaaaccccgtcactcccattgtactatataccggcatactatctctcttgatgctccaaaagaaaaaaagagtacttccaaatcaaaggacgaacagaccaagaacatcgcaacaaacatagtacgaaagratcaaggaaaaacatcaaatcgaccgctgaattcgatgttaaaaatgggcaactggcataataaacaacagggaatatcaaagatcattcgtagacagttcattggcgtcaggatgggcaaaaacaatgtgtactttttccgtgggtgcgggagcccgtgtgcgcgtagcccgaccctggaatctccgggggamatctatgccatgtgggccctacggccaaraaagtcstggggyycacggggattgacgcaacgagtcctcggtggcggcttcgcggytgcctgggtcgctgtcggtgggcctcgtgggggtgaatgctggggcccactcgtcctcgttgtcctgctgtgtggggcccactcgtcgatgacacgtcggacccagcttggtgggcccgtcctagtagagctggacggtagtggttgccttttggcttcaaaccgaggttgctacccgcgaatcctcagccgtggatgttgaaccgctggggattgccatcacacgtatcacatggtgagtgttgtgaattcgtgattgatcgtgtttttcatgtggcgtaatggcagctatgccagtatattaggagcattcctctcaactttctttttctaatgtcaatgctataacttgtttaacacataacgaaaaaagtttttcatcgatataactggaaaaggatccataaagccctacaaacacaagattgcttgttggcaacaacagataatgtaaagaattggctaactcggtacacatcaaaacacagatttgaccaacgatcaaagtacaaatttgaccaacgatcaaagtacatgaaacgtatcaaagagtaaacccaacgttacaatgaaccaggttcatccaaaccttgcctagcaaattgtcaactcgtattaaatacgatgacttcacttcacgataaatatcatggtatcatacaacctaccgtgacataccggcaatagcgtaccgactgaatccgtcgtttgccactccaaaagaagaaggtggctttaacacgattgaacaaacaatgcagctagccaccctcccaactgctcgactcgaaaaccaatgaatttttttaaaagatagcttatgtaaccaaaacattaagggaaaatgataacttaactctctagataaaggaaaaatgattttagataacttgtgtaacctaagcaaaatgacttaatctcttattatgtttttttcccagaaaacatgttattgtgttttcaaaaaaatactccctccgaacaaaaatatatggcggcgttttaaacagtgaaattgacttgcgctcaacaatatttgccttatcggaaacgtcaagtaacactgaagaaagaaatacttaacaactaaatacttatctgagagttatagattacatacatgactcatatacacaacatggaatctacttcctaactcaccaacataaatggaaattcagggtgccattcccatgctaggtttgatatgattccagcaaccaaacgggacaccggtcaacaccaacaacacccataaattctcaagctcccctgcaaaacccccttgcaaaagccatccgatctcatctcatctcatctcaccctcgccgcgcgccgaggaagacgcgcatctcctctctccctctatataagcgcgcgcctcgccacctcacccgaagaaattccccaccattccatctctctctctctcgaatcttgatctctctctttcatcgcctcttgtgttcgcgcgcgcgagcagggtggttgttgttggtgggggtgca

SEQ ID NO: 5429 - DNA, 2000 bp, Oryza sativa
gattatcttcattatctaaatctaatgatttttacacactaaatctaacggattagttacgcacgccgtgaaaaaaagaatcccagaaaaaaaatcgcgccgacgcgcggtaccgcgtatacgcgtgggccgtgggccggaagcgcgcgccggcagcgcgtacgcgcgaattaggattctcgaggtttgtgtaggcttgtcttggtgtatgttagcttatcttggattgtctagctctgttggtatgttgcatgtattccctcctcctaagcggttatgtatttatacccaacgatgtccactttgtccagatataactagtaagactaatatggatacgatccgagtagtccttatagtgctcgagtggaactttgattttcctttcttatccagatcacttccttatggtggatcccgtcgagcccaacccaaaacttttggacatgctttatccataaccccgacaatactcatggactttcttattatccgtttcctagtgcatctattagtcttatcaaatttcaacgcaagatacaacttatacatagagagaaaaaagaaaaatgtttttaaaagtaaagtgaaacattttcaatagtttgaaatgtaaaatgagtcaaaaaaattatttaggggctaaatactccaaagcagggtttcccaaaccgtcggtgccggggttaccgcgccccggcggtaagcacggttaccgcgcggtaactgtgaaaaaccgtacaaaaccgtgcaaaatttatcaaaaattcaaattatttttaaaaattatttgaatttaaggaggttaccacggtatttatattaccgtacccctgcggtaagcccggtaaccgcggtaatgacgcggttaccggtggtaagggaaaccctgctccaaagatgtagttcgagcaagtaaaatagatactcaacatgtacaagtataaaactttagatacgtgggattaacacgtcatcaaaaggtaggggaggggaggggggtgcatatatggcaatggcaagaatagcaagaggcgagcgtaggttcttcccatttggcggttggcagcggaaggaaaggagagaaaagagggggggaaggccaggccaaccggagcgaaggaaagccagggagtaataaatcgagagagaaacggccaaaaaagaaaccaacaacaagaaagaaatcaagcaagcaagaagagacgagacgagggagagaaggagaagagggggccggccgcgggcgtcgtcgtgttcctccccccctctctctcctctcctctcctctcgatctccatccttccttccatccattcctccccgcacccttcgcattgctctcgtcgtctcgattcggtcgaggatctccaggaaaagaggtattactactgcttctcccttcttcttctttgattctttgattctactgttgttgttgttctttggtctttgattttgccgttgtttttgttgtgttattttggttcttgatcagttgatcgtctttttttccttttcttttaatctttgtggggttgtaagatttgttgtatattgttttgattttgttctctttttgttttcatcgatgtgcaagaaattaatcttcgtgtttcccgtcgatcagcactcgatcgatcttccccatgagaggaggaagaaaaaatgtaggacgaaatgcatagccgtttcttgttcgtgcaacggccgcaagaacggttaccgatcaagaaaaatgagtgatctgtttcttgattccttttcccccaccagtagatgaaaaaaacgggtgcaataaatgcctccagcttttttgatacgacctcctcttccgatttacgtttcgatgtcagatactgttgtgttttcagtcggctggggtttgatcatcggataagtaaaatgttttttttttcttctgcgcatctcgattgaatatagtttgatgcaaatgcgtatttgttttcctgtcgtcttggatgttaggaggaagcgat

SEQ ID NO: 5430 - DNA, 2000 bp, Oryza sativa
gtcagattgattgttgacttgcctgtagctgaactcagctccttcctccctccctcctttcatcgtcgagattcgagagctgcatcaccttcacctgatcacatccatatttgcaattaatttacaacctaatttacatgaaacttggcgttcaagaatctgaaatcacaaattaatcaagtcaaagtcaaataaagtaagctggtgatacgcctacataaaacgcaggccaccagctgcgtcgttgcaaattgcaagtttgcaaccggctcacagatggacaggagccaagaaccaccgcacgccgccgcggcgagggcgccgccgtggaggtcagcctccgtcggttcgacctcgccgacgtcgacgccatgatggtctgggcgtcggacccccaggtcgccgccgtctgccgctgggagccgtacgagtcgacggagcccctgctcgcctacctccgcgacaccgtgctcccgcacccgtggttccgcgccatctgcgtcgccgccgccttcgacggcgacggcggcggcgaagaccgccccgtcggcgcggtgtccgtgtccccgacggcggacgcgtgccgcgcggagctcgggtacgtggtggcgcgcgcgcactggggcaagggcgtggccacggccgccgtgaagcgcgtcgtcgccgcggtgttcggcgaggtggaggggctggagcgcgtcgaggcgctcgtcgacgtgcggaacgcggcgtcgcagcgcgtgctggagaaggccgggttccggcgggaggccgtgctgcgcagctactgcgtgctcaaaggggaggtcagggacatggtcatctacagcttcatctccactgatccgctcgtcagctgatgctgatgcatcatccgtgtaattagttaaccacgttcaaattgcgtgcaaattatgagagtggattgttgttacagatcaataagaacaagtttaatagtatagtcaactactagccccaaatcatttatagccaatgtaataactaattcatacaatagttgtttactatactattaataccttgtttcacctgtcatacacacgttacgtcttagagtccgtgatgtaactagctatagatatgtagtccacagctctcctctttcttcctttatctctttaaaatatgtttatagctggcttgtagcttgctattatacttgctataaacagcatactttctgctagatcatcaagtcgttaatgggttttttgtgctaattattcagtcaacctctgcatattgcaatttgcaatgttcgctaaggaccagatagtagtagaatggaagtgacaagaaaaacgacaagaatgatgaatccagacaaaaacaataagacgacgagaacacgacatgattttggacactagacattgtcatttgtctgtgcttacctttgaaaaatactgggtgaaaaaagaaaagaaaaagattttggatccaaatcttttgaattcccctagacgacatcatgttacgatacgtggcagagcaaaatcccaataaactaagtgacattttggcatgaccatggcccagtttgattgtctgggctattaaatagtccttcacaatcttgctatctagaagtattaaacgtagattactgataaaacctattacataacccctgggctataactcttgggttattttgcgagatgaatataacgaggtatattaatctatgatttgctacagtgatgctacagtattcatcagctaactatgaattaatatacctcattagattcgtctcgtaaaatagcctaggtattatggaatatgttttatcagtaatttacgtttaatactcctaaataacaagattttagaggagtatttaataccctgaggatacccatgtgttcaagttcatgaaggattcgatcaaatcaggaagaggcagcgccggccgagtagtggagaagcaacccatcgcaccgtcgccggcggcggtgcggcggcgagcaccc

SEQ ID NO: 5431 - DNA, 2000 bp, Oryza sativa
cttgcatgtttgtggagtgatatatttcatatcaatatatgttgccaaattttttttaaattttttgatgactatttaagtggtatacacaaaacaagtggatattgatccccttcagggatgaaattactttccccgaagatgtaaatgacacgagattcatccgagcagcgtggagggtgagccgttggatcgatggagatcataaattaactcaagtacttcctccgttttataatgtaagtctttctagtattgtccacattcatatagatattaatgaatctaaatatatatgtgtgtctagactcattaacacatatatatatatatgtatatatgaatattagcaatactaaaaagttttacattataaaacggtataaaacggagagagtaacaaatgttagcgatcacctagagggattcctggacgtggtccgctgcccatgtcaactccctgctgcgtgtgtggacaaggcatcgacgctcgttgtgtggaagtaccagttccagcaaaggcggctgacgacagagggggataggccatcggttggctttttttcaaataagccaaaacggtttattaggaaataaaaataaatttatagataaaacttttatacatgtgtttttttaacttaaaagctaatgctaaaaaaaactacgttgaaaatatcttaaaatcaatcttaaaattaagtttaaaaattcaaaatttggcttattctttggcttattgggccatccaatgggagcctaagatattcattttgttataacaaggtaatgtttagcaagaccaaatgatatactccctccgtccctaaatatttgatgccagagggggatatgtaagatattcattttgttataacaaggtaatgtctagcaagacgaaatgatatactccctccgtctttaaatatttaacgtcaataactttttttaacatgtttgatcgtcttatttaaaaaatttaagtaattattaattcttttcctatcatttaattcattgttaaatatacttttatgtatacatatagttttacatatttcataaaaaattttaataagatgaacagtcaaatatatttaaaaaatttaacggtattaaatatatagggacggagcgagtattttgcaactcacttctccgaggagcactaccgtgagttgtcgtcgttataagtggcacgcacaactcaagtgcaagcgctgcgaccaaattcgctgcttgatggagtacattcctttgattcttaggtatggtttagttctcaattttttttcctaaaaaagtcacatcgaatctttgaacacatatatagaatattaaatatagataaatacaaaaacaaaaactaattkcacaatttgcatgaaaatcgtgagacgaatcttttgagtctagttagttcatgattaggcataagtgctgcattaacccccacatgtgctaatgacgggttaattaggctaaaaaattcatctcgcggtttccaggtgagttatgaaattaattttttcattcgtgtccgaaaaccacttccaatatcatcacacatatgatgtgacaaaaaaaaatgcgaactaaacacatccttgttgcaattaagatgtcatagtcagattgattgttgacttgcctgtagctgaactcagctccttcctccctccctcctttcatcgtcgagattcgagagctgcatcaccttcacctgatcacatccatatttgcaattaatttacaacctaatttacatgaaacttggcgttcaagaatctgaaatcacaaattaatcaagtcaaagtcaaataaagtaagctggtgatacgcctacataaaacgcaggccaccagctgcgtcgttgcaaattgcaagtttgcaaccggctcacagatggacaggagccaagaaccaccgcacgccgccgcggcgagggcgccgccgtggaggtcagcctccgtcggttcgacctcgccgacgtcgacgcc

SEQ ID NO: 5432 - DNA, 2000 bp, Oryza sativa
tacagtacagtttgagaacgagtcaagcagtttccatgcaaaaggagtagagtaccttcccttcacgtatcttccaaaacgtatacgtctaactacagcaacacaagacaaggtcaacacagtttaaataacatcatcgcttaggagagacgatttactaacagaaccacggaaactacacaaagaaaatgagaacaactacctattttttttaagaacacgaacaaatatctctatatcgagtataactttatttgtttgaaaaaaatcaatttccaattcctacaataacaccaaaaaattattactattcgccgatgagattggggcaaccgtccatatcgttaggcggtggctctcagttttaccttggttaaaaagcaactgttttttaaaattgacctgaccaatataattatagttagataaagcatgttatccaaccttcatgattcccccaattgttatatattgcagcccataatgatattattatttgtaacataaattaaaaaagaaaaccagttagccaaacgaaattattagaaccaactgtttataaatatagttaaagttttatcatttgatattcttgaaaaaacagataagtacaacttaattatacctatttatttacatattttgatgtaaataaagaaaaaaaataagaatgtacttatgaactacaaataaaaggtgtgaaaccccagtacacgacaccagcaccagctgtagcgagggcttcgctcaactcgacttgactcaagcgacgccaccacccctctcccctcggacgcagctcctctaccttacgtcggagggattacgatagataagtacaactttattagatataatttatttactcatttcaatttaaataaactaaaaaaaaagagagaatatacttccgagctattactccagtaaaaccccagaagattagcctagcagagagcgtagcactcgcactgcacgccaccacaccaccgcagctcacctctcaagtctcaagtctcaagtcgactcgactcgagcggcgccgccacccctcgcctctgctcttctcctcttctcttttcctcctctttcgcttttgcttctccaaacccttgcctctctctctctctctctctctctttctctctctctctctctcctcctcctcctccgccggagaccacgggcctccaccctgctgctccgagctccccctccggcggcggcgaacatccacggtctggctctaggctgctgctcctcctggggtggggtggggtgtggcctcgtcggccggcgagcaggttcggaggagatagccaggaggcggccgggtggaatcgggctgaaggtatttgttcctctctccaagccctagcccttctcctccgcgccacctcgtgagccggcgcggtgtagattggagatataatggataaaaattccttcttggattgatttttattactgctccgtttaccccatccggtttcgtcccaatcccctttctgaggagcaacgacttcggtgcaagtttccctttttttttcttcctttcttttttttttttgggttggctaggggttcagcttaaccccctcattccacacgttacgttcgcctgtggctggtggactgcaacatgtagcctattagtattatgtataaccttttattgtgctactaaaaatcttcatttttacgattagccagttccaccaaatcacaagttttccttactgcctcatttgtatccttttgggaggtcctgaggttgtgtagcttaatgtttttatttatccacagttgtttctttaccctattcaagaagtataattgggaacttgtttgcttgcaccaatctaatattgttacctaatgcattatcgaacctagtaaattctgaatagccagacttggaaagtagcaaagtggggaatggaaattgcaaatgtattcgatggatgaacactgaatattcagtttctctttgcagtgtg

SEQ ID NO: 5433 - DNA, 2000 bp, Oryza sativa
agtactatgtttggtggattgaaaaaaatatatatatccgactcaaaatatattaactttttgaatccaaacaaaacttatattttaaagtaaaggaggtagtacacggcaatatcctataaagaatacaaattttgttgagtgctaggtatgtatcatgctcctcgcaaacaatttagaaaaatgttataaataaaaaataaaacctaatagtatacatcaccaagtcatatactatctctatttcaggttataagactttttagcattgtccactttcatatagatgttaatgaatttagacacatacatctatatgaatgtgggcaatgctagaaagtcttatattttaaaacggatgaagtagatatttaacaatatgaaggtgcagtgaaaaaaaaaaagataatttcaaaggttacgttgtgttccttatcatcatcgtccactaaaacttccgtcacaactctagtctagctctccgtgtgtcctccagccagtgtagtgaggttttagaattagtattccataaaaatttttgaaatgattgcacggtaattgatgaagacccataaaggattgcttgttgggctatcgatgatcaaattggcgatacgactttatagtacaggttgtcgacttgttctgtgtgatattggttttgatgttgtgttggaaaaattaagatgatggttgatatccgttcatcttattttgcgcatgctgcagttgatcgacattatggttgcgtggctctactcatctctcgcgasattctmtaatatggrtccyttttttcttgcaaggtaaaaatctctatctagtttcacttcaaagrgatatattagtagatttgaagattatgtcgacatataatttgaagtgacatgtttwatttatcatagagatgatcaatatgtggtgattcacatagcatgaatcattttctcacaataagttttgacatacattattttgatcatgactgcaaataatttctgccaactccattaataccctctcggttcaacggtacccttgattgctatagagagtgatatattatcaaatttcttttcgagtcctaccaatcgacgtgtatcataaaatatgtatatttttatgtgccacaaaatagtatcacaacccggccaccagatattgtagacgaagatatctgataagtttacagaacaaaccaaccgtatgaaatgaattcatttgttaggcaggacccttgacgcggactatgacgacgtggccacctcttgtaatacaagttgcaacgccagaacaaaacaaaatttgcccatttggacctgtttagttgtaaaaaattttatccctacatgttacatcgaatatacagacacacatttaaaatattaaacgtagtctaataataaaataaattacagattccgccaaaaagttgtgagacgaatttattaagtctaattaattcgttattagcaaatatttaccgtagcatcacattgtcaaatcataacacaattagacttaaaagattcgtctcgcaattttatggcgaactgtgtaattgattttttttctacatttgatacttaatacttaatgcatatgtccaaacattcaatgtaatagcgccaaaaaaaaattgtttgaaactaaacagacaaaaaaaactcaaaaaaagagacgtcaaaatcgtatttttgggagttgggaaaaatccagcgatgcggaggaggagccgagccgagccagctatgaaaaccggagggaggagtcctcctcttcttcctccttcccctccgctcccgataaatcggaacaatctcgaagcatccgcccgtctccgcctgctcctcccaccaccaccaccgctgcttcccttctcccctctcgcccgccgccgcctcgccgcracgcgcatcggsgccgccccamgaccgcagcagagaagcccamcamcaagcgcggagcggcccaggaggcctcaacactattggtgcggg

SEQ ID NO: 5434 - DNA, 2000 bp, Oryza sativa
ggtttcgacggcggttggcgcgggcgtgggcggccggaggttagggaaagggctgacaggtgggccccacctgtcagcgcccgagggagtgagggggaggcgacctggacttcgggagggggcgggagagatgggccggcggcccaaaggaggaaaaagaggggaaaaaggaaagataaaaaggaaaaaggattttcccagggatttaatattgcactttgcttattttaattggttaaaattatttccaaggctctgaaaattccactaaaaatcctgttagcatattttgacatgtagaactcaagaaaaattccacatgccaattccgattattatttgcatttattaactagggattcatctctaggttaaattaaacaatttcttcggacgatttattttatgaatttagagcaagggaggggaacttcagggcgtgacagccggctgggccgctcggccacgcgcggctgagaggagagttgggccggaaacggcccaacaacttagaggaggatttaaagaatttttcaattaaaataattcgtgccatgatgtttcatttattaaaaatacttttcttgctcaaataattctcagaaaaatatagaaaatagataaacaagcaaagtatttaatggaattttacgttgaaatttttcctagattattctagtttaactcataggcttttaaaataatttctaaaaatgatttaaaagatgaattattaaattaggcgattttcagggcgtgacaccctagcggcgtggtggagatcagccattcccaatccaagacactagacatagtttccataagctccacatcatcaagaaactagtactagatattactctttcaatgcaaatactactattccatacttaaatttaatgctacttatatcacatgatgtcttatatgttgtgtagaaaccatgtctcatgcaagacatgtttccttctctttcctcatttattcacttgccacataatttttcatcctaggtgacagcttatttaatgctatggacactatcctagtcattgggttgggaatggcctaatacaggtggtgatcgtcggcactcggcacacgctggagcttagaggacgcttgatcagaggtgccttgcgtggtgcacgctactacaaagttgcataaccgtagtctcaactttcgcatgcaacttttagaaaatctttatcttcatcacactttgcagtggtttcacaataatatggaccgccstaytattttggcttattcatggattaaaccaaatggtatatttgcaaatgaaaaataatttgttaataaaatatgtgttcttagctatctaaaagcagggactgaaaaataaactttgataaaaaaaatcacaaaatcaactttaaatttaaggttgaaaatttaaattttagctgatgagcataagtataagcgaaaagatgaagccgcaaaattatttagaatgaacatcggagcaatattctgcttactagaccgtactttatttgtttccaaggtatcaaaatgttatattgtggtcattatgactgatagcgattggaattgattcccagaaccgaaagaaaaaaaaaacagtaattctcatttctccgtccaatttcagatatcacatgcacatcgtgccactttaacgaaaggagagaaaaaaagcagcagattaaagatggaaactggacagaccaaagtcccaactagtctttaacaacccacgagtaaaaagcgaaagcccaacagtgcagtgctacacccaataactagcttccgtactaaaccaaagccgaaagaaaaaaaatactcaaaattaaaaagcaaaaccatttcatcgacacagcgcccacaaaaccgcaaaatcctccgccgcctcctccggccggtagcgcacgccgccgaccacccgccgccgcggacgcgacgcctcctctccccgattcggccccggatcacatgcggccactaccccg

SEQ ID NO: 5435 - DNA, 2000 bp, Oryza sativa
aagatggcaaagtaacctggtacaattggtcatactgctgacattgaaattttatatggtacaaaatgtgcgcgccatgcaccgagctatataaactatgctactctctgtttcgggtcataagacattttgactttagtcaaagtcaaactgtttcaagaactgttttaagtttaacttagtttatagacaaatatagtaatatttataatactaaattagttttatcaaatcaataatttaatatattttcataataaatttgtcttgggttgaaaatgttactacttttttctacaaacttgatcaaacttaaagtggtttgactttgaccaaagtcaaaacatcttataacctgaaacgaagggagtactatattggaaaggctaatcggcgaacgtttgtgagcttgtcgtgctgggaaaggccgaatctgagtggtggcctgcttgaccgaattatatgggtgttttgtttttttaagaaaattgcacagttgcttgtatgggtatgtttggtacagctccaactcctaaatataactctaggagttgggtctaactctagtatattttgtgagagagctccacccaactccactcccaattttggtggagttgaaactgtttggttgagcttcagcttcaggaggggtggagctggagctggagttgtgccaaacaggccctatatgtcatctagtttttgaatttttaaaatgtagttttaggcatccgaacttattaaactgtgtctttcaattataaattgccacaacatggcatagcacaaaaacattgaaaaatgctatgcgtacgatttgaacttacgatcgtggtacgatctaacgcggatgacaagaattcatggcactgggttaacggctgcataccagcatctacgctaataaacacaagttgtttcatcgtacaaatattgtaaacggcaaatcgtatgtatagcatcactccataaacattcggaacccaaattttctttttatttttgttccttctcctctacttttttttctcttttttcctccttgtttttcctcttttttgccacacagataggaaggaagaagagaagagaaaagggagaagaagaaaaaaaaaggrgcaaacacccgtgtgatatgtcacgtaggatcttggaagggttatggcattttaggacccggaatgacaaatgtatttgagagtttaggatctagatgatataaatcaacgagtttagggattgaccacacacttcaatcttttgataaattgtttttttattcttatggtatgtttgatagagctcgaactcataaatttaactaaaaaaataagtacgcagtgaagttttggagcaagctaaactccgctcccactctagccactatagtcccttttgggtagagccaaaagagccggggctataactaacaaacaaacacttatttcattttatagaaaaattctatatataaactttttaagtcaacacatgagcttgcctttcaaatagatgttcgaaacaaagaaggaaatagttcaaaataggatacgcggaggcttagaatttcacacgtgggcctatctaaacattttcatggatcatgcatacattcgcgcgcatattagacacacgtaatagttaaaaattttaacaccgattttattcctagagtatcaatgtatgttataaaacaaacatgtatgatacttgtttaaacaacaaacatcaataaaaaaaatgatcaagttgtaaataaattcgtaaaaagatggaaagaaaaaaaatcatcgtccctgtgactggcgagttggcgactgtcctcgcattcaacggacaacggcccatcaagtccattgcctcaaccctagtccccaactccgcccccaccgccgcaggcgcgccgccgcctcgccgacccgtcgccgtcgtcgtcgccgcctcgccacgcctcatcatacccctgtaacatcgcgtccgccacctcgctcgcggcc

SEQ ID NO: 5436 - DNA, 2000 bp, Oryza sativa
ttacttacggagttcacttatatgcatgtataggaaaattacttaaggcacctgcaactgcaccgtctgaatcaatgtgaattttggagttcctgtatttgatagtgtgtaacatatattgaaattatagccttttgttttgcaattcaacacattaactgttgcctcgctagagaagatacagagaaacaccttccaactagtttggctatctggaaatttcagcatttcaaatactaagctcattgcatatactggataaggaagctatgttgtttctaatcaggagatagcattccttctgggacatttccaaattctgagactaatttctaatgattatctttcacgccgcaggttttcatcagacatacagaaggaaagaactctttctcaagaaaacaaactcaagggaggcattcccctctggatgtagagcagatctaacatcagaataatcggaacacagtaatgtggcacaaactggtcattttgtctcgtctatagaaaactaggaatgtagtcatgttacatctcagatcttgaagcagctaaaattcggtcgctttctcgtaagcagtgacctagcttgaaatttagtctaatcaagagtactcctccattgacatgtgaattctttcgtttgttcttgtgtaaatacccgagcggtgaacattgaaggtaaagaaaagaccaagcctggggatcattctgcatattttgttacctcccattattgtgattgttatgcatcataatcgttgcagatcctgaagatgtgcggtaattattgatgtagaggtaggcacaactggaaaagaaaattggtaaatagctggccactccattttttatggaagctgtcatcatagttatggttgatgtacaccagccgtgaatcctgtggtgattactggctaccgattcatggaggagtttgattgatggcgttcttattgaatatttggataggacgtatgcacgtacatttgtctcaagaaaatacttgcgtagtaatgtattaaatttttagcggcctttacggatggcaacgggtcgggtcgggcacgggtagagcaaaaccatgcctgaacccatgcccgtcgtcgcccgtccaaaccctacccactagggttagcgggcaaaactctgtgcccgcacccatgcccgacgggcactggtatacctgacgggtacccaatggatctcacatgaatagtaactcgaaagatacataatttaacaaagagaaataaaatcaacaatttaccaatttatcagttatcaacaataatttgaattacatcacaacttattagtattagttagtatcacaaatgaatcaagagaagggggtataagaattaagagataagtcgaaattagctaatacatatgtatcgagtcgggcatgggttacccataggcaaaaaatgaaacccggctgttgcccacgatgtctacggatttcgggcgggcgtgtccacaggtaaaaaatcacacccacgcccatgcccattgggtcgggtatccgcgggtacccgacccatgggcaaaattgccatcccttaccaatgaaagttatatatgaaaggctaaatttatgggtaaaacttttatatatgttctagccaatacccaaaaataaactacgataaaaaaacatcaaaatcattttaaaatttagtggcatttggagattacctatcaaagttatacatgaaaggctaactttatgggtaaaactatatatatatgttgtagctaataccgaaaaataaactacgataaaaaaacatcaaaatcaatttaaaatttaattaagaaatagattacgatgaaaaaacatcaaaacaaatttaaaattaagttttaaagtttaaatgttagttacggttgataagctaaagaggctgatggagtgtctataaatatagtgcgtgtttggcacgaacatatgtgcgtgtagctagctgatcagtgactcgaggccggggcac

SEQ ID NO: 5437 - DNA, 2000 bp, Oryza sativa
tcagcacgtagctcgcggagtctctgtctgaaagctccatcagcctgtctgcagcaagcttccctatgtccagattcctgtgcagcttgcaagatgccagcagcgtcttccatatcagggcatcaggctcgaagggcatgtcattgatcatgcgcagtgcctcgtcgaatctgccgtttcggcccagcatgtcgatcatgcaagcgtagtgagaaggtgctggcgtgaagctgtactgatcgatcatcagtctgaagaacagctctccttcctctaccataccagagtgattgcaacccattaagactcccaaaaatgtcgaatcatctggcttgatgccattggaacgcatcttgctgaatacctccagtgccttgtttgcatcaccgtgctgtgcgtggccatgaatcagcgagttccaagatgtaacatcatgagtatgcatgacatcaaatgcaagccttgcagagcccatctgaccacacttggagtacatgttgatcagtgcgtttccggtgcagatttcggagtcacatcccagtttcagagccaggcaatggaactgcattccttgatccagagatgccacgtctgcgcaagaactcagcacactggagaaggcgtagccatttggtgtgaatccttctgaatgcatctgacaaagcaatgctatggccttctcaccaaaaccattttggaagtttgcagaaatagcagtggtccagctaacaagatcaggattttcaatcttgttgagcatggcctccagttcttcgacaagaccagttctaccatacattgacagtagagcattcgacacccggatatctgtgattaaatcgtgcttgattgctgagcagtgcagttgacgccccagaccaatggatccacaagctccaagaacaattgatagtgcaaactcgttaggatcaacaccctctgaaatcatatcaccgaacacttgcaatgcctcttccagccttccatctctgatgtatagctgcatcatggagcaccatgaaaccacgttcttgcagtggagactgtcaaaaaccgcctttgccagtttgaactcaccgtttctcgaatagaaatcgatcagtgcagtcgacgagtagacgctctgcgaccgcaaaccaattttcttgatcaaatacccatgtatctgctgaccgagaacccttgggcatgccgtcaaaatggttgtcattgtgtgctcatttggcttcaatccctgcttcaacatctggatcaaagcctccgccgctagctcaaactcgccgttccggcagaatgccgagatgagcgaagtgtacccaaccacgtcaggtgaatccatccggtcgaacacttccttggccgccggcaaggagccacaccgcgagtacatctcgatcaagcagctcccaatccacgcgtcgccggcgaaccccgcccgaacggcgagcgaatgcacctgctccccggcgcggagcgcgccaaggtcggcgcacgccaccagcgccgcgttgcacgcgaagtcgttcggcgcgacgccggactccaccatgtccgcgaacatcgctagggccgcctcggggcgcccgttgcgcgtgtacccggacatgaccgaggtccacgcgacgacgttcttcctcggcattcggtcgaacaggtcgagagcatccgccagcctcccggacttcacgagcctgttcagccgcttgcactcgagaacgacatccggtgactcggcgcagccattatccgccgccgccgccgagcatagcccatcgcayacgcggcggcggcggcgcgaaggcacgtggcacggcgccgccgcgaggacccgaggccgaggcgtgggcgggagcgcggccattgcgtcccatggcgaagagggaacggataagctgtgacgaaaattgcatttagatccaagcgagactgattcgaaaatattttccgatttccgggggggttcatgcaaattgcaaggtcgagctcgaggargagcagca

SEQ ID NO: 5438 - DNA, 619 bp, Oryza sativa
  misc_feature (1)...(619): n = A,T,C or G
anagggccttgsgcgsgctttttccgcngccggcgacctcgccggagccgcgcgggttctgkgtacgcccaccccttccctccgtytcccacccccsgccctagccatcttcccttgcgcggcgggcaacctcgcgcgcgcacggccagcagcgagcgagcaggtttggggggggagaggcgacgcggccgcgacctcgttccaccgcgccggcctccgtcttggctttgttcgaatcgaatcgaaggtatccgttcttctctctcgtagccctcctcctcctcctcgccacctcttgagccgggcgtgccgtagtggccgaggttggagatcccaatacgaacttgatttcgtttcctccaattaacccttatccatttgtaatccatttgtttgaggatttctttgatgtgtagtgcggcgctcgcagcaatttcctccaattaaccgatgtattgtcatcaccaatgaacaaacacgctaggaaatttgatatacttttggaatgcttgtgttggttcttgcactagacctgacctatgccatgcggtatatctttattttgttgaagctgtgatgctttttgtatctgaacaaatcttccttctgcgtcgcagag

SEQ ID NO: 5439 - DNA, 2000 bp, Oryza sativa
tagtgaattctgatcttgcaatgatcctatatagcaatgaaattatatttaatttatagaaaatatggagaaaacatttcatattaatttttgtcaataatgcgtgcatggttgaaaaagagatgggacaatttgcctaacaccattgaaaaattcacggagctgaaaaaaccatcgtacgtgtcattgacatgagggtcctggtctcatatgtcattctcacatgaatgatgatattttacaactcacgtgcacgtatcacatattgcatacaatggtattttgattttagattttcccaaagggattaagaaagataccacctcctccgtcccaaaatatatgatgctgttgacttttagcataatgtttaaacatacattttattaaaaatatatataaataatgtttattttgttgtgacttgttttgtcgtcaaagaaattacaatattagtttatacttttacatatttatactaatatttttgaataagacgaattgtcgaacatcgtgttaaaaaaatcaatagtgttatattttatgatagagggagaacataaatttattcaagctagtagcaagcttgcatacaaccgggcatatgctagtaacgacaatatatactacatgtcaatattgtacgtacctttgactcgttgtgctatgtacaggctcttgactactcccaactgagcttagcagtggtcaacattaggttaacattacatttttacaatttgcacgttgtcacttgtcaggttagttcacattatttaatcattgaaagctcaatctgttacatttgcaggtacacttgattagttgattacctgtcctaattcacaaaaggaccgagtttggcagcagacaagagatgtaccaccagctcaatccacgactccacgtgtaactgaacctgggcccgtttagttcctcaaaaaattttcccaaaaatatcatatcgaatctttggacacatgcataaagcattaaatatagataaaaagaaaaactaattgcatagttatgagggaaatcgcgagacgaatcttttaagcctaattagttcgtgattagccataagtgccacagtaacccatatgtgctaatgacggcttaattagtctcaaaagattcgtctcgcggtttccacgcgagttctaaaattagttttttcattcgtgtccgaaaacccctcccgacatccggtcaaacgttcgatgtaacacccaaaaatttactcttcctcaactaaacacacccctagtgtactagtgtcctgcccaaaagtattaacatttcacatgataaaaataacaaaaggctataaatagagcatagctgcagacgtacgtgcgtggtgcacaagtatacacgttagctaagatagtactcatattatgtttcagaatataaaacgtttctactttggtcaaagtcaaactgctttatatttgactaagtttatagaaaaaaatagtaacattttcaaccaagacaaatttattatgaaaatatatttaattatcgatttgatgaaactaatttagtattataaatattacctatatttatctataaacttagtcaaactgaaaatagtttaactttgccaaagtcaaaatatcttgtaacttgaaacggagggagtacatatataaaaaaaataatgtgaaaatttcttgagcagcctagctctcctggaaagaaaacaaaacaaaatcttaagcaaaaaatgattaaatcgatcgatcaggttaattaagaaataagcacggaataagacaagcatataaacatcaactgtatagtggtggcagaagtattttaacacacaacgcacgcgcaccaatctcatttctagtttactccaaattaaagaccagtcagaattttcgcctttgcaaaactcctctcatttcatttcctcccaagagtcaagctagcccttcttgcttgctccgttcaacgcctcttccccagcttcacagtactcc

SEQ ID NO: 5440 - DNA, 2000 bp, Oryza sativa
tcaattcaaaatacgtaccctgaaaaagatcccacgctataccgtcagaaaattgatgccttcaaattcaaatcactcatactatccaaattaaagaaaaacgatttatcgaagtttccttttacttttgttccctccggtgtgtatatatgcgaagtttttcagaacttaccacaaacgctgtgtctgtatttatcaaaaaattggttagtagaaaatcgcctcaaacaaataaataaggacaatgttatctcatcagtacttgattagcttatctatcattcttgaattacgtacgtacaagtacgtttcagtgactagctagctactttctacttgctaccattgttacatgctcaaagagctccaattaacagtatagtcatacagtactagttagcagtatcatataggaccatcatggtatagaaaatactaaccaaataatttacaatatcttcttgatttaattatactatcctgctatgatatggtgctcactggtactactagtgcttcaaattgcaatattgtatctttgtttatcttgcccactttttgagtgtctaggctggatgaaccattgaacccagcccaaatatgagatataatgaacctaactagcttagttaggttagtacattgcctcatcaatgcccgcaagtttcgccgagtaagctccaattttgtcatattttgtacgctctatttatatatagacacatataaacatatcaatatagaaatattaaagtaccacctataaatttaatactagagctttttggtgaswagccagcggtacacatatatacaattcccgcccatggtctcgttacacagtttgaagttgatttggagtctcgctcagagttgcatcctattaaaatgatgcttcaattgtggcttagttcacctawatggtagtaacttttctttttattttgtgaaagcaatgtttttattccgggttcatacacaccgtacgtgtggacgtagcaaataaaccacgtgcaatgtctgctttgacttggagttgtagtactgcgcatgcacacaggtcgaggagaaagcaatggtttttggactgattcaykggtcattgcatggcttgtgtgtaaccgttctccattctccacatcacatttttgactcggttttggattaatgtcctcatattttattatggtcatccaaatcctccagattcatcacccccattttctgcagccttatccccaataatattcaatccccaattaaaatacaacttgtttttttcaatgtttttaataaaaacataaatttacttaaatttcaagcctaatactattttaaacttcacttccaaataagctaaacacggaaggagtttaatacctaataaaaattgtgatttttttaacttcttagtattatacttagaatctgtttttcaaaatttaattccaagagctggatttggagtttaactagctccacttctattctggatggagccgaaattatttagctggacttgaactttagaataagtggaattgaagctagtacgaaacagaccattaatcttgaattattttgtttggatcattgtattactcccttcgtttcaaaaataaatcaacctcgtattaaaatgtgaatacaatgaatatggatatatatctagatttgttgtgtattagtaagagatgatttattttgagacgttgagggtacaatggtactattattactccagccaataggggagaagaagtcaatccagaacctagacaaaaacctgtctctcttctcatctttttcttcttctctacggcgagcgcctccgcttgtttgtgtctataaagttgtggactttctcgccgccattgtcacgtctcacgtgcgcgccaccaccaccccatgcagacccagcagcagtagcggcacggctctcctctctcgtctcgtgcaccacgccgccgcgcgcgctcgctttgcttcgagagtaatcg

SEQ ID NO: 5441 - DNA, 2000 bp, Oryza sativa
tcgggtcgttttcttgactcgtaatcatttttgtacacgacaatgatatatccagactgttttagtggtgcttcacaacgaggcgcaggaggagccggacccgttctgaagttctggcacggttccataaaactacatttttagtgtaacacatataatgattagtagtactgtctactgcctgtttagcattgctttcatgctggaacgagtactcttgtttgtttgttttttccttaatatttttgggggaaacgagtacattcacgaacataagggatgtaaaattttagcatatctgcatggggtgttcggacactaataaaaaaactaattacagaattcgtcagtaaatcgcgagacaaatttattaagcctaattaatccatcattagcaaatgtttactgtagcacaacattattaaatcatggagcaattagggcttaaaagattcgtctcacaaattagtagtaaactatgcaattagttattattttaatctatgtttaatatctcatataggtgtttaaacgtttgatgtgatagagtaaaaaaatttgaaataggatctagacaggtccataaacatataaaggtttttgcgcaatcagagaagtatattcgctttgatgctcctagattactttgggtacaggtcatggctcacacggttacactagtcaaggtcactttaggaagaagctcccagatgcatctccgattctccgtgctttattcaacggtcgattccggctcaatgcaaacatcttcggaagcttcccttagttttttctttactcgtagaaaaatatgagtagcagtagtaacaaattaaggtcatatactctcctacattgaacattagtgtttcgattttaaccattaatacatttaaaatgattaactaaaattcttgaaagttttatttatgctataatttatattgttaatgcatatcccctcttttttgcataacgttcaaacagtcatgaaaaattgcaaaaagaaacaaaatagattaatatataatatatcactttataaacatgcaaggtaaaaatataaaaaaaattgtatatactgtttacatataaatttgttctttttattacaactcaaatattgtaaatctgaacttatatatttatgaaatgatatatttaatatttatttatcatgttaattttaaatttttaaaattgtttgaataatgcgaaaaagaacggtggatatcacattaagaaatatttttttctcaatctaagtatatagtactataaaacttctacatagaagatgagtgataaatggcctgttcactttgatgccaaaaacttggtaacttgccaaattttggcaagatttcttatatagttattaaaatttggcagcaaattaaatgtagccattctttttagcaactataccaaaacttggtaaggttgaaaatgtcattaaagtgaacatgtcccaaatgttaaaaactggatagtaacgagtgacaagtatatgaaaggcaatgcttcccttttgtaagaacatgcactttatatttttgtgtaaaatttgccgaccccgtgacttttgtgtgttcccatttcgctggctgactccacctcgtgcactcgtgctcgtggcacgtactcctatatcccagcacgaatcttgacgctgatgcctatataaaggaagcgtccgatctgccgaccagctcaccccctgttgttccattcctcctcgtctcccacacgggcaaagagattctccatttctcccggcttcctcttctcctcctcctatacataggcgtcgccgcgtacgccattgccagcctcgtcccaatcccaccacctgcgccacgcgcgcgcgcgtccttcgggcaccctcgcaccgcaccgtccgttggcgcgcggttggtggggcggtggtggtggtggtgccttggctagtttggccggcgcgcgcgggragggagggagggaaggagaggaggaagagg

SEQ ID NO: 5442 - DNA, 1374 bp, Oryza sativa
ggtttsaacatkttcgcccccggtaggatgagwtcaacggggtgttcccacagtcccastacaactgcatcgyttcggtgcccggacccytcctgctcggtcgccggtggaggcaagcgcggcgacctttcctgaggagggcscgggggcgaaaggcgktgctggagaacagccaccggaggccgaggcaaggggaaagcggcggcggcggcggraacatgcggagscggcgragscaggcacggcaggcracgaggagagggcagcggcagccggcgktaggcccatggggscgggaktggaggaggccgcgcctcgacgctgtccgcatctccgccggtgagaggagagaggaaaggggagagatgtgaagatatgtgagatggggagagaggaggaagaagaggtggggattgagatgagaagagtgagtgagagagagctgacatgtgggacccacttggggcccaccagttttttttaacttacatgtgggcccatggttttttattattttcagtgatagaattgccacgtaagcgccacatcaaatgccatgtaggtgccacgtcagccaaaaccaccatcaaaccgtcgagggacctcatctgcaccgattttaatagttgagggatccgttgtatctggtttttcggttgaagaaggatgaaaatcgggatttgttgacaagttaaagggacttcagataagcttattccactcataaataggcaacaaaaaggccttgtgtttggtggaccgggatcctcgcgaggtggaatttgtgagtaaataggccctaccagaatcgggccaaaagttcgcgcaagtaggcccacaactgcgcctcatttcggccgaaagtccacgtaaatttgtaataaaagagagcgtaatacgtgtggaaataaaaattagagtaactttcactgacctaaacaaactatcataaaactatatatttaactcagtgtatcaaaaaagataaagttaatatcaaatttatcatatagctacatgtttaagacagagtgtcacaaacttatataggagtatttagcaacaaaactatcacaaaactgtaatgtttatatctccaacataacaatggttctaggaatttaaactctaaaattacatgtaatttcatgataaatgcaatactagtaagtatgtagttttgtaataaatttattgctaaaccaaccctgttagtgatactgatacaatgcatgaaatttacttcaaatattaacaagtggcttctgtaattaaaagttaacgtgggccgtgttacggctaggttaagcccactcgctgtggactcgtcgtcttcctcccgccgccgccgcctagggtttcgcgctgagagcc

SEQ ID NO: 5443 - DNA, 2000 bp, Oryza sativa
tggagaaatactatgtatgcaggggtatgctacaaattaaggagaaattgcaatggcatgcgaagaaacacacttccgacgaatcacgtgagagcacacggattaatgggcatacaagtcagatcaaataaagctaaagtggggccaaaccacagtgcaacattctaggggttcacacgtcagctcttgaagaaaggcgattgagtggggtggggcccagggttcggccaaaccgccatcacctcctctcatatccaccctccacgtggcgcttcatggttgcttcccgatgacgattgtgcgagttaccggccttcccgtcataagcaactataaaaggaaatcacttcttctctctcaaagcacacactcaaggagcaattctctcattccacatattgtagttaggcttaaagtaatctttggtcctcttgtcttctcggagattccggtatgtcttcagtactttactcttcttgtaagactatagttgcattaaaaaattatcttatttacttattagtgttcatagttgatatattagtttattaattttgtgttctacaaacaaattgtacttcatttaactgtttcacttgattatgctagtcgatctatgccatggtaacggtccaatactaatgggttgcactagctctaactcatgacattatttattagcataaacatggtgtttaggttagttaaattccattggatgcgggtataccccacggaaagtgagttaggcggcaggtgatgacaactctatccgtcctttgtattcctccacttctaggtatgacataagagtttgtaaaatgtcattaccatgttggcaggctagcagggagtggtctctcagttgtaccagggtgcgcagaactaagtcctagccttgtaagcatgtatttgttaagtgtaaactggatagtaatatagaagtacaaatgaaccttagatctctttagtccatcttcactgccaagtgtatcattattagagacgaatcttctgtgtcacactagcctactatttattattatcttaacccatgtttagatttttggtatattaattatagcatggttacgatttatgaatatataacccaactctgtataccgccgcattcccagcagaaaaacaaatatgtacccttgggatactcctagatgaaaggctatagcggtatctgtgcgcttgcggatttatctatgatcttaacaaataccaacactatatatataagaatagaattcaattaaggacaacaacggatgataggcttaagctagagaggattcatatggattaattaactgtacttaagttgaggtaaaactctatcgattgctttggacaccggctctcccatgatctgccaagttgagccggcctacctaattttctacgaagcacacaacaaacaaaggtaaccactaatctagacaccacgcctaagttatcaattactactctagtctcgcgtagaaacttcattctttatggagagtgctagtactagagtacttaatataatagtaagcgacaaacccacgacgatgagaatgtacctcacttacgtaagtcaattaagtacgaaaaggaaatctcgaacacttagtttattaaagaagtattcaccgaggtacaggagaggagagcacgccaataactccagcactcctccggaacctttctcactctctaccctttttctccacacaactaaaatgatgcctaatgtatgaaagtgagttgtactctattttgttgtgtgtttggaagtgaaattagctcatccttttatagcagcttaatggtcggttgtaggtcggtagttaagtcggtaaacactcacaaccaccatcgtcaaccaataggagatcgccacatgatcgaacgctgacagttaggggtgccaaccctgttttgtccgaaccaagcaaacaacctctagctaggacctctcttctatgtctgacaagtcggcccat

SEQ ID NO: 5444 - DNA, 178 bp, Oryza sativa
taaamcccggktttttyccccttcaawtcccccccccccctttcctctgtcccagctcaagctttcgtcttcgtcttcgccatcgtcgtcgggacatcgccggcggtttggtttgttctctctcggtcgtcgtcggcggcaattgcgacattgagcacggtggtggtggtggccatct

SEQ ID NO: 5445 - DNA, 1790 bp, Oryza sativa
  misc_feature (1)...(1790): n = A,T,C or G
yantnkntnnnnnnnakntngantnnnnannananannnnnnnncntnnagnnacnananatgnrnnngnncnngnnangnnngannatnannnngnnnanntnnnkatnnnnnangntnmngnanngncnannnnganatnanntgtnnaaassggrgaaagkggrggraaaatcrgrgntkttamrgsmgggkgrtwtgmctagkgttasgrgwttcaratnccaaggkggtttaaaaaaagggkgtcaaymsbygrkttmcrawkgkgwtccsyydmrscackarrakrtttdtmmasgssbvmmyvttkkkmrtgcgrraacraayrdmrarwwwtaktamccctmvsrrsggggawwwwwwtyccwyytywwygkttaaaaatkttcggcgcaaaatttntcmaacgggggggrgttcwntttcccrrsccctttttaaamwnyccgmaaaaatttgcccngggtycccsggkgccnccraawkwncyktgaaaaaawcccygggggnaamaatttkgccnaggncmaaakktaccgcytangggacccayttccsggaaagrgtccccctaaagcccnggggggaaattngggtgawtcmmanggggamcttkggggtcccccggatttcccttttnttttccccccyyttttwtgaaaaacgaaaggtttttggrcccnttttaaatyyatttttttcmmaacaaatttaamcggaaamcccgaaaagggcctgrgttaawtgnacttarrgcmcccccccccccctgatagctagcataattggggatttattagtcatgttgcttcagtggcggatgtgccatggagtgacgggaagaacaatgagcataacgagccatgtggctggaaacatatccttgtaggtgaagtctgtacatgccctagtggtgccatctactatgccggtccttgtcttggttcgcctctcatcctgttgaatgtgtctcacgctatcgtccactagccgtctgccccctacatttcgcaccattcatggctggtccagcccgaattctgggaaagccaaatggaatccgagttagggatagcgcctcatgcagcgatacaatcacgtcaatatcagttcgtgttgcttttgcgagggcatgtgcagcattgtagaagcgagaaatctgcctgccagtcgttgatcagtgagagaaaatacacaccaagctgttaactgatcaaacacatgccacgtattgccatgtatttttcagaaaacataattagaaaacgaaattgctaaatggcatttgacggaaaatcaaggggaatttcttacagattttgaaccacctgatttgcttgaagattcgtgcacccaaatccttctccagctccgatgaatccatccccagtatcagggaaactattttaacagctcgagtggatgtccacccgtttattgcatgtcatctaaatggttatgaaaaaaattaaaaaaatatgaataagatagatcaatatgtaatgtatcaatccacaaacatgcaagttaaaattcaacttctacagattgtaataaaaataacaaacaaaactcaaattactatatgtatatttacagttaaatttgtkgtttttgtwacaacttgtagaagttgaattttaacttgcatgtttgtggagtgatatattacatattgatctatcttgccaatttttttaaaaaattttcgtagccatttagttgacatgcaataaacgggtgaaacgtaaactcgagctattagaatccatccccccagtatcagc

SEQ ID NO: 5446 - DNA, 2000 bp, Oryza sativa
gcccactcgactacttcagctttatcctttgcttaaaaaaaaaacttcagcgttatccgtgcaataatcgtctgccatataccgggagcagcagtcagattgcacaaaggaattgcagtaattagataatcactttaagctggaaccaatgcccgaaatactgttcatccccctacaaacagccccattatctggcttattcgaggaataggacaacggctatcgcaaacgaaaaataaaatttgctgaaaaataaattatgatgaaaaaacattaaattattttawwttaaaawtwwaaatttaaatttaaattkatrrstgataagtataaryawaakcswaaatkctwaatgggcttatggatctgaatactgcactaattgtccggctaatcggtcaatcgagatctacgggtcgccgtcgccggcgccggccgcccaccatgatggcaggcagtgattgacccatggcgcatcatgacgacggcgacgtacgagcaatcgatcgatcggtcacctgacggcggcgtggcgcgcccgcgtcagtcaccgctaacatcactggatcaaaacccatctatctgtcttaattagccagatggagtatatagattactggaagtaacacgctgttattatcatccgatgttggaacaatcgatgatcctatgactgcacacagcttgctggtcaaagctagtgtgctaaatcgtcttacataactaatttacaagacagggggaaaagagctatatatgctttatttgtaatcctactcacagaatctttctcgggtacacatcagacacatcaactaataaattttatcaaaaatttaaaacaattatttatgtacttccagtactacacctatgtgtaaatacttagcctcaaatttattatattttaacgttaataaaaagatgataattctgacaattttaagagtataaatgtatctgaattttgttttttttactcactaaatataatgattttgaagatgaaactttatacatatatgtaatactactaaaattatagatatatattttttctagaatttttagtgaaatttgttaggtggtgtgcacacaaaaagatttatgtgcatatgatacttttttttacttgttcatcatattatttaactattaatttcatgcttgaaaaaaatacattctaaaaaacattttctactgtattacttggaccactttaaactattcatcatgtttatttcttaaaatttctaaatcaaatcgataatccgctttaatagtccgttcaataatccaaatcaaacgtaccattcggctttcctttatgtccttccaacaccaaagccaaattcaggcaaccggcaccttatctgaaatcagttaattactttgcaagacatttctttatctgaatacaggttaattctgcatatacaacaagcgatcagtgggggtgtatccctgatgttcacagcatatgctacatgggaaaccagcaggttgcgattgtacagcatggaaaccaccaaaaaggcttgtacaccgacaaaatgcgtcgaagaaacgccaaggttttttatcgcctttagcggttagcgcatcagaacgcaacagcaaagcaaaacccaatcaaatccttttcctccaaatctcgccaaattcttcgagcgagacacgtataaactctcactcgctcactcacacctcacacgctgctgctgctgcttctcgatgaggaatattttttttgcttcggttaaagcaacgctaattccccgcgtcgcaagcatgcgtttctaggagaaagtaaagcttgcgtttttgagactaaagcttgcgttttttgttttttaattgtggagtttgggaggaggaggggaaaaaatcgcgatcaggaaaaggcatctcgagaataattatttaagtccccagagcgagcagtgacgcgaaattccccaggagagatctccatctccacctccactgctcaggcgggg

SEQ ID NO: 5447 - DNA, 172 bp, Oryza sativa
  misc_feature (1)...(172): n = A,T,C or G
acgggaaaacggtkctkggcctccgaatygttgcctggttyraccggaacaacagcngccgccgacggcggaggcggcaattggcgggtgttcgacgactcgtgcccgcaccgcctcgcgccgctgtccgagggccgcgtcgacgacaagggccgcctccagtgcgtctacc

SEQ ID NO: 5448 - DNA, 2000 bp, Oryza sativa
atttgccttcaggttggtgctggtgccctcctgcagcgaccattttgactgttggctaggactgcctttttaagtgtaggagtggattttaaactttcgagaggacgtacactcgttgtttgcatgtaatttaaatggttatagaaaaaataaaaaattgaaaacatgtattatcatatggcatatcatttcacaaacatacaagtttaaattgaacttctacactttgcaaaaaaaaaaaaacaaactacaactagttaacacatgttcacaatcagtgtaaaagttaaattttaccttacatatttgtggattgatgtatcgcatattaatctatgttgtagaactttttttagtttttttcataaccattttagtgacatgtaaacaacgaggggacgtcccctcgagagtttaaaatagtttgtacatagcattgggacaatgtagccgtctttctttctctctctgaactcacatatcctgttcctcttatcacattacaaccataaatacaataccgtgtctcatggtatgatgtcattaacttttaaacaagccgtttgatcatttatctaattaaaaatattatttgttgtaacttgttttatcatctgaaatactttaacatgatttatactttttcatatttttttagaagggactttttcatatttacactaaaattttaaataagatggatagtcatacgtaatatcctaaaatcaatatcattttacactaaagattggagggagtaattaactgttgtttgtttgtcagcttctagaatatctattattttattgttaacagaggtcagaggtgatttgatccaatatcctccatttgcaaattcccaacacagtagcacactattattcctctacccttcaaagaaagatgcctgccatcttccaaagtttgacaacatacaacacaacgatcttccttgattgttatacctcttctcttcttattaatacatgaaagtaataaggagaaagggcccttattatctctttgctcatgaagtgtcagtttctgatcaatatcgatgtgcttccccctcgaatagtttcgttcactatagtttcgatatcacctttgccttttattttacccttgtgagaaaaaagtatggtcacggtgagattgttttcctatacaaattaagggattaaaatttcggaccccctccggcaagcaactatcctagccaatttttttgaattttaccttttttaacttgcaaaattaattcaaattcagtaaaaaaattgttagatttttaaataatttcatacaaaaagtttcgaaagtaccgaaattcactaattttcggttatttaggaaagtgtaaaccctgttcctacattttcactcctactagctagcacgtgaagaaaagcatcatatggtccaagaaaaaaaaatgccacatacaacccgacatccgacggataggatagttggatgatgatgtggatgggcaggcagattcttactatacatggtactgtagactgtacaatttgttgcgagatccacctcaacctacaggctacagctacaagaaccacctggagcttcaaatatttaacatcgcgcgccacatccaaagtccaaacagccatgcacactggcacacacgcgcacactgtgttgccaacgtgaaagaaagccatggtcccctctccctcctcctccgctccggcgcgcggcctgcttcgcttcccctccgtgtcgatggcgccgccagtcagagaatagctagcctagcggcgccaccgcgtcggccgtggatcggccgtggcgtggcgctgcggctgccgacgtcggtctcggccgtatcggcggccgagaccgagaccgagacgccgccggtggccgaggaggtgcgggcgccggcggcaggggaggagcggtttgactggctggaccagtggtatcccgtggctccggtgtgcgacctcgacccgcgcaagccgcacgggaag

SEQ ID NO: 5449 - DNA, 2000 bp, Oryza sativa
cgtcgggttcctcgccgccggcargggagacgtgtacggtggtcacgtcggcggttcagagagccgccgtcgtggctgcggccgcgctgtgcttcgctgcctcccgctggctcgccaacttcatcgagaaaagcttctacttccaggactatgtccatgcttacaagtgatcgatgtgcccagtaaactctgtgagttttaatgctgtggaaaataaatttggtcgatcgatcggsgtccaacgaaaaggraaaaaaaaaccacatatgtaaaactctaaatctggccgtgtgtattcaccttatgatcttatgatgtagaggccggacgctgcccattatctaaaaaaaaatgtaaaactctatatttgtttgcatggggaatggagcgtctgtatcagtgttcccactaaaattgttttttcttttcacatttcgatgcattattggaagtaaaataagacatgaaagttgcagataaccactgaactaaaaatttagaaccgtttttgttgacccgatgctttggtttctttcatgatttaacatagatatgtgaaatgggtgatgcttttgattgagagaacttacctgcaaacgtttggttttattcgatcttctcttgattgaactctaatttagtctgacgtttgattttattcgatcttcttttgattgaactctaatttagtctgaccagtttgttattatgcactcttccttttcattgctgatgtatgttttcttataaaaaaaaatctaaatcgcctttgtgtcttcggcagcacacgtgtcggagaaacgaagacgctggatgttgagtgggcttaggggaggcctagaatgaaaacgactgagcgtagtctcgttttcgaaaagtctctccccgttatttatacggaactgctagatgactgtcaaaaaaaaattttggccgtcaattccgctctaagatttgtgctgagatattttactattggatctaaaccctttttttacaagctagtcccatcatcgcatgtttatggtagatttgttcaagttacatctaagttatattccaattacakgctagttacatcgtagttacactataattacattataattacattgtaactacagkgtaactacattataactacattgttatctctatataaattagatataaagttatatatattattttaatacatatatataagttattattattatagtatagttctagtgaaattatatactatagttagatttgaaagttttcccctcaaaaaacactcgacattttttttagctagtctatgtcatctaattggttatggaaaaaataaagaaaaataacaagatagattaatatatgatatatcactggacgcatatgcaagttaaaaatcaactctacgagttgcaaaaacagacaaattaaactatgtctacgtttaaatttgtatttttcgttgcaacttgtagaagttaaatttgaacctgcatgtgttgtgaaaaatgatttattccatattaatctatctagttgttcataaccatttggatgatatataaataatgaaggtccaaagagatcgttttgctttactctagtgcaggtccaaagagatcgttttgttcgttgacaagttgtcctagaaaaatagctaatattttattaatcatacgctaatgagtcactatgttttgcatgcggaaggtatctattagttcccaactcagtttgccaacacaatctaaaatatgtttgcgttttccaaaaagaattgtactattttaagtttgtaatctagttattatagaaatcatttgcacgcaacacatggatagctaaaaaataggtatacatacagaaataaaagatagcatgattcctcttatggaccctacgaaacaatattacccactgtagcacgtttcattcggccatggtctgcgtaaccactttaaaaaagatgtcccgcgcttaagctccccctcggaagcgcc

SEQ ID NO: 5450 - DNA, 2000 bp, Oryza sativa
ctccagcactagttttgatgggctcgtcttttctgatgagcagattcagatgtttatgacatatatactgtcacggaggtggatgatgatacaacaatggagggcacatcttcagctccatacccactgtaatctgattgatgtgtgtttactatggtatattcttctgtggggatattttctgaacattctcttttttacatcagattacaagtggacaatgacgatgatgtatgttatgatgatgacgatccttatggtacagatgattcaaatggtaattgtacaaccatccacctgcttccatggtgaaccagtgagtccttattatctgattttcttaacttgtcgatcttgaatatgcagcggaggataacccattatatgattatcctgaagagttgtcagaggatgaggatgatgattccaatagcgagaatccattttcagagctagacggttctgatcccgagtatgagaaggaagaggtggaggaagaaagggatgaagacgggagatagaatctatgctcggggtacaaatatgggtagtaactagagataagatgatgtatgggctagcgcttgagctggctgtgatgtttcctgttgggctggctatatgtgagagaacttttggtgttagtatgctgatgaattgtattcccagcctcagctgttagacctgtaactcgatatgatcactgaaggagaagtgtaggagtaagaagaatgaattattaaggccgagtttagttccaaaatttttcttcaaactttcaatttttctatcacatcaaaacttttctacacacacaaactttcaacttttctgtcacatcgttccaattttaaccaaactttcaattatagtgtgaactaaacacaccctaaatctgggagaatttcctggggaaacctgtaatcattgaaggcatgcatgcagcttgttgttggattagatagggtacaggtctggtttaggtccaaaacaaaaattttcacgttgtcacattaaatgtttggacacatacatggagtattaaatgtaggaaaaaaacaattatacagattacgtgtaaatggtgagatgaatcttttaagcctaattatgtcatgatttggtaatatggtgctacagtaaacatttgctaatgatatattagttaggcttaataaattcgtctcgtagttttctaacggaatctgtaatttattttattattaaactattaaatgtgtatccgtatatccgatatgataactaaacctaaaattttttccccaactaaataaggcggtagccatgcgacgctcattgcttgagtcatcattgtagaaaaaaagtctcattttactcactgtgtgaagtgatgatgatccaggcccggccagcccaaatagatggaagaccmgaaaagtctggactctggaagaaagaaagcggcgcggcggccggcggggcacggcacggtggacatcacagggaaggagaaacgcttcttcccgttgttcccaaatcccaatccgtgggagcgcagtcgcaggccaacgatcgagtggagtcgagcacaaggaaaaggaacgcatcgccatcgccatcgccatcgcctccctccctgtcctgtccagctcacctccaaaccctccatcttcttgatttactatacttgattccggtaacttcttcctccttccttccttccatgaatcaataatttgtgagtactcgttaacttggttgggtaaacgatatgagcgtgtttctcaagagatcagatgggggatggatgggataccttcccttcctttattacttttaggcttgcccaccagtaattgagataccctcaatcctgacttcctcacacgctcgctaccaatccatctcatcaacttgtgctgcattccattccatagtcttcctcttcgctacttattgcattttctattctcgttgcttcacatgtagtacaaccgctcatggataaagagccaacc

SEQ ID NO: 5451 - DNA, 2000 bp, Oryza sativa
taactattcctatgatcaaaatgaccacgttggaaaacttttatacctgctctttcgtcaaccgatcaaaattatctctggtattaatttctccatctacttatttatatatcaaccaaaaacaaccatcacatttttttatctactttctgaattactgtgtaatactgaaataaccattatattttaggaaaatgatgtacttgttttaggatattttagggatagagagcggtactgttagagcacgtctgatggggtgatggatgaggcatgggcagcttcatgacaaagatgtatcatgcggttgtcatccaccggatctttcttttcaacgtgagagattcttccagatctttctttcttcttccttaggagtagtgatccaagatgattgattattacggcacgatatcaatcaatcatgcatgggatgcagctaacttaccccctctgtcctaaaaaagatcgaatttttcggttttcgtgttcaacgtttgactgtccgtcttatatgaaatttttttatgattagtattttcattattgttagataataaaacatgattaatactttatgcatgatttatcttttaaatttttttcataatttttttaaataagacgaacggttaaatgttaaacacggaaacccaggaattgaattttttttggacggagggagtaggcttgtgaatatcaaccttatcaattatttggcagtacaaaaatttactccctctgtctcatgatatagcaacctaaaatagaatgtgacgtttcatagtacaacgaatctggacatgtctcctatctagactcattggattatgaaaggtcccatctggtccggagggagtaacacattttgatggtatatagcgaggtcaggagaatgattttgttctaatataatgacttatgaaccattaacgcatttaaaaagaattgattgaggttttccgtaaacgcgtaaaaagattgcatattaatatagtagaagaagcagagtttaattacacggtgtaaatggccaggcggtcattgtcaggggaaacaagagaaaacgaaaaacttctagggaaagctaaacgtgagaaaacctgctcctacagaagagagagggggtggctgaattgattgaggttaattttggccgaatctgaatggcattaatactcaccaaataagttacagacccaaaatagttaagtgttgaattggcatatctttttgcaccaaattatttcaactaattaattgtcgtccaaagatttatgtgtcaaataattataccatgactatatcaatctagacaatagtattacacaattcataatgaattataaaaaggcaagctaaaatacatactatctccgtctcatatactccatactaaatgcatttcgatctgacgttgtatctggacaagacgtctagattcaaaactagaaatacaattactttagaaaatatgtggaaaggggtaatgtgggaattaaaaattacatttactcttttaggatataattcacgtctgtcatatgactcatttctgtagttgcacccgtctaatctcaaaaagaagtaaagaaaatggaatatgaaagtaaaccgaaaaattccaaaatggcaataagttgaaacttacaatctttctaaactttcatgaaaactgtcggcgcttccatccaatggctgccacgaaaaacattagaaaagcaagagaacttttgtaagacttctccaacgtatatgagtcattttgatcatctgtttttctatatccatcgtcatgtcgatcagaagctagctgtagtgagtgattgacagtacaaaaccaacagatgcgcacgtgtcccaggtgtacccgccacctgttcgtccaaagatcgcgccacgacctcaatataaagcacagaactctcgcccttctctctaccataagtagtaaaagccaaccaagaaagagttcgacgagggaatcgaagctcgaagcc

SEQ ID NO: 5452 - DNA, 2000 bp, Oryza sativa
tccaactctatcagtttttggcttacctctagcttaggggagggatataattttcgaacccagaaacgttcactctcgtttagtacatgttaattaaaaaattaaaaaaaaatgataaggtatattaatagataatatatcatttcacaaatatacacgttcaaatttaatttctacaaattttaacaaaataataaattaataactaatttataaaattcgattcgagtgagactaaaagagtttccgcttacctccatcataaagcgtgcgtatagtaacggcgttatcgtcatgctatcaccacagatttggaagagaaattaatgatagatgcagcttcatttcatgcatgaaaggaacccataatgaaatccttatacgaggcaaaaaaatagacatcacgcagtacttggttacatgtacaacctatcattttcgccacaattaacgtagaaaacaaccgctgcgtggtgctacctccgtttctggaataatatattgacattggtagtgttcaatttcaaactttaaccacatctttttgaagaaaaaagtttataaattttatttgatcaaatccaaccatctgagatgtaatttgcggttagagttagatagtaatagttgtcaattattcgagaacagaagaagctagcactcaaacatctatcattccatatcagttaattattgacactaattaacgcaccgctaatatgaatacatcaacgctactgaatgtatggtcaattaacagtttaacaccatgattgtgtttaggagagctttctaaatagctatagcttctgacataatctcaggtcctctagataatccaaattatcatcccagattctgaaatgaatatctacaaaatttaaaaaataaactagtggccatgaacttagcttctcactagctggatactcccaatggcttctcgaaatctccacctctctaaggctgagtttagtttcaaaattttttcttcaaactttcaacttttccattacattaaaacttttctacacacgcaaattttcaacttttccgtcacatcgttccaatttcaaccaacctttcaattttggcgtgaactaaacacaccctaaagtccaaacattgccaataataggtatagtagtatgtagtacctctctttattaatctaaagactactagatctattttaggaaacttaagattttgaaaaacatccgataaatagtcagtgcgtgagaatatgaaaagttgtgtttagcagctcatggttttaaatttatctttttttaattctataactacaaattctcataaacagtgccctatattcctagctactacttctatctttaaaagaatgagttttaagctatgaaggtgaaaaaaaaaggacagatgtacacatgcagtagtacttgattactatggtctatggacgttacgaaataacaagtgctgtgtgtcactactctcgtgaatttgctcacctaaactagacggagagagacccagaaaagaggataaatcacggctgcacaattttataatctgaattgatcatggcaaattggcattgctgcttacttaattaaccactccctagctaattggagtaggtaatagctatctactaggagtcaaaatcaatcaggaaataaatcagcttgaaggccacgacaactacaatgttggtgaaaccaaattacatttgtgaacttcgttttttgacagtattcgacaacttaaaactgaataaaaattatcagtagctcgaccacctgacacgcgagcacagtataaaaaccgtccaagataaccggggttgctcgtgcaagcgtatcacagttcacaaaagcagcacagagctagtctagtggcagccatggcgagctcagagcgcggcggcggcggcggcatccacgtcgtcttgctcccgtacccgagccaaggccacatcaatccgatcctccagttcggcaagcgcctcgccggcc

SEQ ID NO: 5453 - DNA, 2000 bp, Oryza sativa
aaagaaggaaggagacaggggggcccaacgtcagtgggtccgcattttcttttgtgtgaatgattaatgggtcccacgcatatttttttaattctaatgtcacttaagcaccacgtgtaaagaagacccggttaataccgtcacgtatacgccacgtcagcaaaaccgctctctaaaaccgtgtaggaagtcaaattacaccggttttaatagtttaggggtcgagatatccggttttgcggtttatggtttatgaattagattcgggttacttttaaggagtcaaatgaactttttcctcctcaggacgatccactttgctggcttgggagttactatactagttgggacatcttcatgcacatgcatagtatgcgataataacatgatgatgtggggagtttactgaaagtctaaatttaaactcctttttgcatgattagtaatcgggcattctctgatctcgataactatattcaaactatggctgcatttggttatgccaactaggatagaatgcgtttgattggtttggtggatggaactgaacggaggatgatcgttcgattttttttgtgtgtttagttaaaaggcgagatagatgagccggtcaaaaaagagaatattatctccatatactaggtgaagagggaaaaaaattgaaaataataccctttttcaccgattttatagaatatacatgtttagcatgacttggtagaagtatacccattgccacggatgagtgtgcgaagtcacggcgagttcacacggaactcgtgatgtgctcgtgatgtcatcacagttcgtgcagtaagtacgtgaattcgtgtggagagccattgcgcaacttgtaccgagcactgcatgtcaacgagatttgagaaaagatcaattacatggcgtagactaattttgtcataacaattgaatcgagcagccccgttctgaatggcagcaacattctagccattatctaagtttctactactataattctataaaatattttggactgaagatttgatcagcggtgattcattacagggcgatcgcgatcatccagaaataccatgagattaaattgttcctacagtgacaggctctgactgcaggatggaagattgtaagtactgtactaaacacgaactagagctacatactttacccgtttttcctccttatctcttgctgtgtgtggcgcctgctttcctcgaggataactgacgccgagaagagccatttgccggatagaccaagtagcatacgcctgaactcgttgtggcgatgcgtcgcacgcagcaaatcaacctttcttcaagttgacaagtaccaggggcgaagcttgcacggttttctaaaccaaccaggcggtcagaggcctgcatcgatgcgttaggactggaccattgggacgatggcacggcctagcaaccgttgattcgcaaccgaacgacgctcgtagcagggacgagaacccgctgggcggtgcggcgtgcgtgcagagcaaaaaggcggcaatcagtcggcaggcgcaagtgggcttgcagcaaaccaaacgcccgtctgtcttcgtcaccctgccgctgccgctgccgctgcccaatcgcatcgcaggtcgcagcacggagcggcccgtcgcgctcggcggtcgggtcccttgtccacgcacgcctgcgcagttgcgcacgcagggccggtaggccggctttagctgcgctgcgctgcgtcgctcgatttgtttgtcgtaccgttgtcgcgatcccttcccgttccttgaaaccaaagccaaatcgatccctccctcccgtctccgcctttcggccgcctcacgcctcccctttttaaccccttccccggccgcctccctccggccccttgcctccacccacgtcgtcgatctcgtccactccaattacatccatccatccgctctgcaaccttctccggttgctgcgagcgagagcgagagcgatcgctacagccgccggtggccagcc

SEQ ID NO: 5454 - DNA, 2000 bp, Oryza sativa
atgtataattccgtttgaattcgaatggaatactgtaatatgctatctccgtcttaaaatataataatttttacatagctaaaaatacttatattttaaaacgaagagagtatcattttccgaaagctaatcacgattgaaatggacaccaggcaagcacgcattggttatgcgcatcctccataccgtaccataccagcatgagccatatatcacctctttccgactgtatcttccttgaagaacaatgcagatttgcgggggatgaaagccagtaagccactgcccactagtcctactaaaatggaagcttagcgtacgattaaactctgatggcgcggtaaaaactgtaacgttaacacgagcggttttgtgacttttgtgtgaactcgacaaggacaaaagattatgcgcatcggctggggcgtcgcgaaagcgaaaggaggaggaggagagagcccgtggaatgatgcgtcatgagtttcgttctctgcagtaaaaaatcgacggggcaggagaggcatcatcgtcgttctctgcaccaaaactcatgccatcgatcgcatcgcagcatttttttcacaaccgggggggcgcctttgataaagggtggtgatggctccctgctcattcacagctggagcctacgcctccctgctccctcctggggaactgttcctaatcgagtgattagcattaactaaattggctaatcacgtggattgacagccttaaaatagggtgctggtattaggcttcgacgtcaccgcctgatccttgaatgttttttactgcttgtagtatagttgctgcagctgagattccatttctgatctgaacatctagcatttcacatttctaatccaagtaccccgtatagtgatactttgtactgctgtgttagttctacttaatcaaagacttgactataatccacacgggtaagtgggtcaatagatctgcatcaggtttttgaatgctccttccgttgcaagccatcctgcagactccatcaagccgtgctagccgtgcaatgcaagtgcaagcaggctagcaacagagggcgcagcactttatgtatcgctgatcttctacttcccctgcacgactctgtttgggccaagctgtttttactgtcacctttttttctctttaccgtgtcacgtactagtcctacatacgggcccactcgccagctgtaaccaactagtgtactgtttcacgtacggctagctggctagctgtgctgagcaagcaagagcaagcgaggcagaaacaattctttccccgactggtcacagcggctgtggccagtagccgcgtagctcagcgagagaaagaaagaaagaaagggtgtgtttagatggggaaaaggaaatttttgggtgtcatattgaacgtttgaccggatgttggaaggggtttttggacacgaatgaaaaaactaatttcagaactcgcctggaaaccgcgagacgaatcttttgagactaattaagccgtcattagcacatgtggttactgtagcgcttatggctaatcacggactaattaggcttaaaagattcgtctcgcgatttccttcataactgtgcaattagtttttctttttatctatatttaatgcttcatgcatatatccaaagattcgatataatgtttttgggaaaaaaatttggggaactaaagaggcccaagcgtgctgaaagctcgctgtgaacaaagccgcaaaagttggagaaatccacagcagctgagctgtgcacgcagactgtagtagtagtagagcgctagactgaccactggtccctatctcctgacgcgtgggtcccccgttgcccaacggctagcttggcctccgacgtggcgccctcgtgtcacgtgccacccttccaccgtaagccaaacgtctcgcctatataaacatcgcacccagcttcagcttgagattgagcccatcagtcgagtcgatcgaacagcacagcaagtgagcagtgaca

SEQ ID NO: 5455 - DNA, 2000 bp, Oryza sativa
tgacaacgcaacaaagatggtgcaatgcaggctacaaacaaaatattataggcatcttgatgactcactcggtccacaggccttctactaggccaccatttcaaaaagattacatgagttggtgattgtttccatgctgagtgaagaggtgatacctagacaaaagcataatatacaagatcataattccagtgtcaagtgatagactgatggtaactcaggtgaacagtctcaaaggacaagtttgctgaggcaggtttagattggaagaagtttggacaacaaggtgttaatcctcccctgttagtgacatcttaaggtaccaattcaactgagatatactgaaaatcaaggggtcatagttgtttttaggccatcaacaaattatctttgtttctatgtgaccaggtatgctattaaaatcaaggatggtgtaaatattcagtgcaagtattctctgttgaactcaaatattggtgttacaatggatatttgttattccatttctgcgaaaataagcatgccagagaaatggagcgcctgacggtcttacacgagcagttggggttcacataaagattcattgtcagtgcagctaaactttgcatgatatatcagatgcggctatgaaatcgtgagaagagataatctgtggtatctgatcaggttgctatcatggtgcagcaggcaagtagcacagtggctgattatgtgttgccaagctgaagattctgttcagtgaagtctaacagtggagctgtggacgcatcttcatatctgtggctccctctggtgttgtaagttgtacatttccttacaatacttcatcaaactagttgcttaattcatatactttgcctgaaagttaacatggaaagcctaaggaggatatgtgttgggtcatggcagcctgataaaacaaaacaatttcaaccaatggttttgaatcgtgatttatacggttccagggcagtgtgcccaaaaggcggttagtaacatcacaacagccctcaatttttcattccacagccaccacgattttatatacacatgagcttatcatttgaccaccaaaaaacatgatagcgccatgacagcccctgatttgaaaaacactggttgcaagtttcaacatcttgtttagaaagctgtgtgccaaacatgcttcttagttctcagccacaccgcaagcagaaacgtgcacgcacgcacgcacgcactggtaacagagtgtcatcatcttgtcccaaaaatcactacgtatgcgtttctgaactttgactgatcaaggttcattcactttgggcagagcctggattgagctgatgctgaaagtatctggcagaacattcccagcctgaaccggaactgaagaaaaggatcagaggaacatggcctgccggaatccggcaccgatcgccacccatgtgaaggagaagaaggctggccgcatcgccgggtggacgcatgtcgccgcagcccgcatgtgttgggtgcagggatttagctttgcgaagatttcaaagtaaaaaccgctcctcaccggttttccaaaatctgataaaaaacccggtaaaaaccaatgactttgggttgacgcccgtgcgaaaaccgtctaataccaatcggttttcataaaccaagacctagcggtttcacgaaagtcgatcggttctcgctaaattccatcggttgggtgcataaaaaaaaaacagaagggcgaaacagccatcagcagggaaacctgattaactgacagctccaccccgttttgctattccaggggggccctctgcaacaacacaaggtttgcctccacctctcttgcatttcctattctctcaaatactaggacgcgcaccccgcgcgccattccgcttccccctcccctcctctcgctctcgcttgcggccgcgcgcgcgggcccccggtggtgcgagcagtcgtcgtcgtcgtcgtcatcgtcttcgtccggggccaggtggtcggggggcgaggcg

SEQ ID NO: 5456 - DNA, 2000 bp, Oryza sativa
gggctctaataccacttgttatccaactggccccgaaattaccatcggaaaccaaacacagaagaaacaccatagtagatccaaacataatgacgacaccgaggcacgatatttgataatggagttcagccgaggcctacatctccagggcactgattacgggcgctcctccccgatccagcatatacagcgtatcagagttacaacgactcacagccggtcaccgccggcagccgttccctctcgctatgctaagtcgtcatgcggttacaacaggcatgcccctctatttatgagagatcctaagacagagttcgactcttattctagttctaatacctcttacagctccaagtcctaaactgtaaccgactaagtacacatattcgacacaaactctaacaggacactgtgctccaagtttaggttccgaccgtgcattttactctatatttaaaacagtgtaattgtttagcatcaaagttgcactactagaaatgtaatctcaagtactttattagcatcttatatttcaaactatcctatttaatttgatgttgcttgaaaaataatggtcaaacttgatccattgctagtcaaaaccaaaaggtatgtgtgaacggagggagtacatggcatagtcgaaactagaatgttcgcaaccacacttgcttgattaattgaagaatgaacagacaccataagccacagatgaaaatcatgggtaaaccagtaatttaaaaagacacatactaaggacaaccaaaaatccagtcgtggaaaaattgaagaagaaacacatcaccgagttgaaatttggaaaccaaccgggaagaatcaatgaaaattttgcaaatattgtttttttataaaaaaaaacaatcagaggctaatggttaatgcataatttcttaccattacgtaagcaagcaagattgtgcatcaatcctaatcctggaaatttgcgaagatatggcattcaatttgcctcacatacgttgtcagtcgtatttgtagtgatgtgtgttgcaatcagactttgatctatcagaaaataattgagttgtttcatgtaaactgtattctcctaggtaggtcgtcccttgggaaatatccaacgacatgattccactttaatactgatctagaaagcatgtgaaaattagccatgaccgtagtggcatttcgacatgactcggagagagagacgtcacttaaagagatatatcaaccattaatcatgaatgcacctctaatacattatttcgttattattataagcacctctaaaatatctaaactatgaatgttatcacaaggaaaatacattttcaagccccatgtgacccttcaaggtataacttttggttaaaaaagaagaagaagaagaagtggtgcctcctggtacctctcaagaacaatagaataaaatcactcattttgagaagttacagtgaagctcttccataccctttcaaggatcataaaatttctccagcaaaatagtgaatacacctccatgccctaaatagtgaatacacctccatgccctgatggtttttcgagcttttttttttattaaatccgtatcctttgcctctttacaaaatagtagcatgtttaacaaggggaatttagcttgaatctacctaaaccaaaacttggacgaattatatggtttgtgaggcctacattccctgtatccacaggtcaccccatgaacacttccaaggagtgacctgtgaaatgaggtgatgggcagtgtcatgtcactggtcttgattagttgtggcaactatcaaggggtactaatcaatctcaggcgtaagaatggcagctaatttcgctgataggccaagtgggcgatggtgagggcgcctcatctgtctacatatactatgatccatccccatgctagcactcaagtgacatagctaacttagctagctagatcatcttagcttggagaagacagaagagcgttatcttggaaggacaac

SEQ ID NO: 5457 - DNA, 2000 bp, Oryza sativa
ctaagaatataagtataaattgagatccttgtaccattcaatgggagcctacagctcaaatttaaaatcgtgtagggtttgaccataccaaagataatgtatattttaaatatatataggtagaaaacttttctaacagtgaaaacacttaattttgtacataagtttagtgccatgcaaagataacaaaacttatattccctgtaatcataaatatttaatgttataagataagattcggacagacattttagaaattttaccatcattttatattataaaaatttataaaatctagtttgtgatattatgatagtagcattacttttttggacaactttgcacgtacaataagtgtttgtttttgaattaaacatttgataaatatagattataaggaagttttaaaagtttaattaaattttgtcctaaacctcaaatattaataaatgaagagagtatgtaggataccctattttgtgccaatcaaaaaattataataccaaatattgaaaacataagcaaagaataaacataaaaagcaattcatcttctatttatttatcattattactaaaataaaagctaaaataaaccaccacatttactctaagggaacttgcccacccggattcaaactctagacttggcaagacgtaccagttgacagcaaggcggctatggtggcttcattaatctcaagatatgtcaacccagtttttaggatgtgctcataaatgcgataggtttaaattaaaaaaaaaactgtagaaaaccatagttattatgacacgtgacatttaaccctagttattacggttttaaagtttcataaaatcccattattgtgggttttatgcgtgaatttactcaaaaatctaagatatagtttgtataaaaaataattattaagttttttactaaagttgatagcttaattcttcaccacttttaaaaaaattgtttgagatatgctgaaattcatcaagattttaataaagatggggtttataaaacattgagaccataaaacatgtgtttgtgtgcaacatgtcttagtacatgtgattttctgtaaatttaactatagatcatgtggttttctaaaatttactatataaattataaacacatagataatcattataaaccaacagatatcttagaaaaaaaggtaatatctcaatccacaaaagttgcacattatttttatcaccaagatcaaggagaaattaaattatcttggatatttcaaaatcaaggactaaatgtaaacatgcaatcaatgagtatttaaattactccttggattctcatcaaatatttaatttatctcttcatttaagttttaaatgcataaagtctataaataggaacaacttatgtggaaaaaactaaaatatgaaatatgtctaacttttgtggatggaggaagtattattcctcatcacaagaaaaaaaaagtcaatgcattatgcttttctaaataatctagattaattcatagttggacagatatgaccgcatatcaacgttaattactgccgatttgactgttgattaggcatatcttagcactaaaccttactgaaaattcggagaattactattggagagaagaaaaggcatccatcctccttgtcttcactctgcaatgcatcatcatccgccggaaaccggaaaaccaccgaagctcgaaaaccggcggaggcaagcagcagcagcatgcagcagacgcagagccttcctcttcttccaagcaaaaaatattcagatgacgcctcctcctctttcccccctcctccacttgcttgtcttcaggcgtacttgcccgcgagactcctacmactctctgatccctatatatacaccccttcttcccytctcgtctcctcaccagaattccaagcaacgaactgcgagtgattcargaaaaaggaaaacctgagctttcgatctcttcggagtggtttctggttctttgaaaaagagggggatta

SEQ ID NO: 5458 - DNA, 2000 bp, Oryza sativa
acgatctgttcttcctcccatgcatgactctaattcttttttgtgtttctcatatgtgtataccaactacaatttttttaaaaaaaattcttatatttttaattcgtgtagaaactcgatggacatgacattatatacctaccttcccattcctgggttttcttattaatctttttttcaaaggggtctttttttttccttttgaaaattgggcttgaaactgattaaaacgacattttccatgaatagagggttagattttgaatgtcacgcaccgtccccgaaaagctagggttatatgcttcacaaaatacagccgtattgcattctcatttgtacttcatatttttacggccaatagaagcatacaaacaggacagcaacgcagatgatgtggccaaggcacgtaatgttagctagtaggcgttggaaaattgtttgatactaagtagtagagtataaataaattgtcacctccatccactatcaagtagtcgatatgtccgagtggttaaggagacagactcgaaatctgttgggctttgcctgcgcaggttcgaatcctgctgtcgacgtacttttttctttcaagtaaaacagcaccagacggcttattagaaataaaaataaatttgtatataaaactttttatatttatatatgtgttctttgtgacttaaaagccaatgctgaaaaaaaaagtaggttaaaaaattaaatttaaaaatttaaaatttggttttttctttggcttattaggccatccgatgggagcctaatttcctctagccccactgcggtgttttcatttcttgtcaggtaaaacagcaccagtacaaagtttaatttcctctagccccactgcggtgttttcattttcttgtcaggtaaaacagcatcagtacaagtttaatttcctcgagccccagtgcggcacgatcattccttgcacgaacacgtatgatccaccaagtccgcgatccgttgaaaacttgaaacggcctcacgggcagtgtcaacaagagcgaacgtaccaggttttggtaaatgattcttcttcttctcatattcagttctggtgcgcatatcctgtacaaatccgggaatcgcgtactctcacaatttattttctactaataataagaaactccagtatacccgctgaacttcacgatccgttcaatctaccgagatcagtgtaaggtggtgtttggatcaagtgactcttatatcggatgaatttgaagtattaaacatagactacttaggctgcgttcgccaccgtgagattgggagatagtttgttccgttttccgcgcgcacgcttcccaaactattaaatggtgcgttttttaaaaaaattctataggaaagttgctttaaaaaaatcatattagtccatttttaaaatttaaaatagttaatactcaattaatcatgcgctaatggctcacctcgttttgcgtatcttcccagtcttctctatctcccctttctcaaactcagccttataaaactaattacataaataaaagctaattcacgtaacaaattttttaagcccacttaatctataattagcgtatgtttactgtagcatcatataggctaatcatcgattaattaggttttatagattcgtctagcgaattagtttaggattatagaatgagctttattaataatctatatttaatatttataattagtgtccaaaccttgatagggacttgaaagtctacacagtagtacagtaccactcgtatatccgcccaaatttttgggttcacactcggcggcacactcgaagctcccaacaaccaaccaaaccccaaagcatatcacaatcagtggggagggaagggccccttatttattcgcattcctctcctcatcatcactcatctcccttccctgtcgattaccttctctccttcctctgttcctcctctcctccacacatccaggcaggcaacacaagaatcatccgggagagcgac

SEQ ID NO: 5459 - DNA, 2000 bp, Oryza sativa
tatttcatatttgacctattttttttaaaaaaatcaacgattataacacatgggttcaaatttcttgaatggtggggaagcatcagtggtagttcaataattaagaatgtatgatccaaactaaaattaatatgtgattctacttcttatacagctactatataacgttttgaagtcctcactatcaacatgtgagataggcgcacaagtagggacggatctaaaaaaaatagtagtgaggctgaataaactacatcaatataaaccgaacctccagtcccatatcctatgaatctatggaaaaaaatttaatgggagcttaggaggatctccactgtcccgaggacggtagtccgcccccattgtgaatccgccgctgcgcacgaggaggtcaacataacttatttctttacaagaaaaaagaattgcaaaaggagtgagcaatgatttgtggcccgttgtccacgttgctgccgagtgtgaaaacaaaaccacaggggtagtacaatatwaacaacacgtcagagatcagacacccacctctccacctccctcctctcctctcctatcgtccccacgcgcactccaacttgcgggcgatttgttttcccccgatttcctctcgtccgatccctccccatcacgaggccggagcgccaccccacactgcctccgctgctcccaaggtatccctcccctgccctgccctgccccctccacctccgccggatttctcagccggcgtagagcggagatccatcagtggtggctcggatttgtgttyttttcccyttttgggtggtgatttgactccaactttctcggaccgtgtcgagagctttgctccgatcttctttttgaatcgctttgggcgatctaagcgtagactgttctctctgtctagtccgcccattttgtttcggattggtttggttcgtgcctgcgtggtggtggtggtgggggtaggtgtggctatttgtttccaggagaattgggggtggttcggctgaatccccaagctctatgataggtggcgcccctgactggatgtccactaattcgcagtattcggatgcccgctaatttgttcgatggaatcacacaatgggtttttttacccactatcatgttgcttgttttggcacctggcaacgtttgttcttatcccttctgatttgtagactagagatccaaacattgtggttggtcagtggtcaccacacaaatatcaaagccctgtttttcaactcctccttgatcggtacagatttatgtctcctgctatttattaccaatacaaaaactacttcagtgattgtatttctctttgaactggtattacttcgggttaataagaagtatcatgtaatttttaggaattccaattcctgcttgataagaatcagtgattgtgctaaggctccagtgttgactgcaggtgattaaaaacacagaaaatggatggaactgctggctaacagtcgtcaaaatttatatggccataggtaatgcatatcgctggcatatttgtgcttgttaattatgattttttkggcttatttagcaaatatattgatatgtttcccattgtttctgtagataattgtgcgatgtgtgtgggaggtaaggtttctacctcaacagtaaggagacttccgacccttcaaggaaaaaccattccaaagtctctcagtatcggatggcatttgatgcaccaagaattmctaaaacrgmgacatcaaagttgaagaacctcatttcagcatcattcaaacccttgtctcttaccatccccataggcgacggtttccatgaattgtttcctgtgggtcactgtcatttatagcagataaagtcttatagataagccaaagtttttcatttctgttggctaacaaggggaggcaaaaattgagttgcgctctcaagagtgtacaatgcttacacttgttggcacaagagattcttttgctcagtcacaggcacaactttgtgctggc

SEQ ID NO: 5460 - DNA, 1593 bp, Oryza sativa
gtcaagtcggcgtttyaaacggcgacttgaaggaggaggtctacgtgcaccagccgccgggatttgtgatccccggcaaggagggcaaggtgctacgcctgcacaagggcctctamgggcttscggcaggcaccgagggcgtggaatgccaagttggattccacgctcaaggggatgggcttcgagcaaagcccgcacgaggcggccatctaccggcggggcaatggaggaaatgccttgctggtgggtgtctacgtcgacgacttggtgatcaccggcaccaaggatgcggaggtcgcggcgttcaaggaggagatgaaggccaccttccagatgagtgatctggggcctctctccttctacctggggatcgaagtgcaccaggacaactccgggatcacgcttcgacagaccgcctacgccaagcgcgtcgttgagctggctgggctcaccgattgcaacccagctctcactccgatggaggagagactgaagctgagccgcgacagcacgacggaggaggtggatgctacacagtaccgacgtcttgtggggagccttcgctacctcacccacacacggccggacttggccttctccgtcggctacgtcagtcggttcatgcagcgaccgacgacggagcaccagcaggctgtgaagaggatcatccgctacgttgcggggactctcgaccacggtctctactacccgaggtgtcctggcaaggcacacttcgtcgggtacagcgacagcgaccacgccggcgacatcgacaccagcaagagcacgagcgggattctcttcttcctcggcgagtgcctcgttagctggcagtcggtcaagcagcaggtggtggccctgtccagctgcgaggccgagtacatggcggcatccgccgcttcgacccaggcgctctggcttgctcgactgcttggtgatctcctcggcagagacactggagcagtagagctcagggtggacagcaagtccgctctggccctggcaaagaaccccgtttttcacgaacggagcaagcacatctgggktgaggttaccactttcattcaaagctactttggaggaaagggagcatcmaaggcgragctacattcaacamccaagggaccarctttgcgggaatttgcttcahcaaagagcctmagttccycgagcttgstccaggatcgggatggccaaattttcccacaagacgacgcacaagacttagggggagaatgatggaataagccttgtggtctttggtcctkgtggtccttctctkgcttttaggttgtttttcccccttttaggacagcatcctttcagttttgcttttagcatctttcggttttgtttttagcatccctaggacagcatctagcatctcctttatgctttattcagtttggatgctctctaggacagcattgcgttcaaattttagactagtgtgggcagcaattagctagcagccatccagccagctatggctatatatatgtatccaacctccctcgggaaggtatggcttttgtgttttgtgaatgaagaaaaccagaaaattgccccatctcgagtgccatcctcttctca

SEQ ID NO: 5461 - DNA, 2000 bp, Oryza sativa
actcccctcggtctctcccgtcctctgtccacgcagtggcccaccgcccgcaccaagaaaacgccgcatcaccgtgcgcgccgaggggccgagctacgcgggcgagcgagcgcgcatgccgtggcgagcacacgtggtcgggcctatgctaccgaggccgaccgtcgagcccgcacccgcatgaccatctcgtcccctcctgctccctaaatccataatccctgattagtttatcccaatgaggttgcatggtgaaattactaatttaccatctctagccctggccagccaacccaaaccaccactactctacaactacagtgtccactgcccccgtcacttcagtctcgctacctccgcagcttcgccacgcactcccacccccaatgccggccgccgcccctcgcgtggcctctgccgcctccggatccgcctcaggtacgctctcccgctgccaccccgcgaggccgctagctcattctccgctggattttttttccctcagtcggttcacattttccggctctctctctctttctctctctgcagcgacgaggggcgtgcgggtggcgagggacaaaagcggcggagggaagctggaggagcggacggccgttgcagttgcagttgcgtgcttgctgattcgagtcgttggctttattagctactgcatgtgctgaactctgctgtgttcttgagtgggcaggtgaaggtggtggtggtggatccgcagcgcctgcgcatggcggccttcgagccccatcggtaagaggatgcagcacgatgccccccctaacccccccccccccccccaaaaaaaaaagctactactactactactagcacaatgcatttttggtctacaagtctgaatgggtcagttattagctttcgagctatggccttgggttgttctacaactgattgtttacttaccaggaggcatttttttgttgcatggatggttggatccgctttattctttgacatagtcactttaattggaagataaaagtatgtactgtatgttggctccaagcattgtattttgtctaggtgatactccctcctttttacaatgtaagtcattctagcatatatgtctagattcattaacatcaatatgaatatgggatagatatatatgtctagattcattaatatcaatatgaatgtgggaaatgctagaatgacttacattgtaaaacggaggaagtaatgcttgtattttttttctcaaacatttgctgttctgttggtagtcttcatgaatagtgtttcatatttcattttgtgtagtactgttagcgaataaaactttgtcatttctatctttctatttagaaaacgaactgaatataacatgatcggtatgcctttttcaatcaatggagtaatggcttactgtgccatttgctctttggacttaaacagtatgctctcgaaacttcttcaagacataattatttaaggttgggcatgtgtttcttttggttagtagctaggtgctatgtttttgggtaatggtgacaaatcgtaaagtagaaactaaaggttaatcagctgacaatggtcatcagtaattggaaattttctaacaccctcctttacatgtttgccataatccatgacaacaactttttgtaattcacggcacattgcccttcttgtctatcatctccttaaaatccattttttattctaacttcagaaaacagctgtaccacatttatgggcattttcattttcttcagtggagtgtttttttaatgagaactcagtgaagtgttgttatgaaaacattctcaatgctgtgaattatgttctgaggcgcaattgaagccaaaacaataacctttcttgctgtcctgttccttcattacctccagcacaaaatatgcccattgaatacatatcatacaatctatacttgtgttgttgaccttgcaaaccaacagtgtgttagtccttatcagccataatgtgacagagtgcagcac

SEQ ID NO: 5462 - DNA, 2000 bp, Oryza sativa
gtttctcgtgttggtacatcacttgtgcaggacatccagcaacaggggatgaagctgaaggatacgcctgcgcctatcgggtatcactgatcatcattcatcaacgggcgatgcctgctcagttcatcaccatcactgctactacatgcgtattttacatcctatttgggataaactttgttctgtgtatatatgtaaataagctattgtcactccgttttatgcctgtacctatatgcatgctgagattatgcaaattgtgaataacaatatagtaagattttttttggagtagaagtatccacgtgttcagaattgcagcaggtaacacttgtcaagatgctctgctgctaacaaaggaagcatggccgttggctgacccgtgcacacaaccaagaccaaacatccagtccaaatgtgtaaaggcaaatggaatctcttttagacaagttcaaataccattcacactaaacttttttctttttctggactcttgatttcaatatgccctcagaaaaaaatcaccaaagaagcacaaacacaatggctcacctgcaattcaccatctgtcttagaaaaatcaactcctaacttgaaaaatcagtcaggattttttttatggaagtaagtgtagaaaaataatttctttaagccattttacattttttaattaaggaggtgccataagttgatataattttaaatgtcgattattttttattcatcccaatattccctctccacttcagtaataaaaagttggtgtgttacatttaatcccttttcttttagtattcattattattggcagacgaagactggaccggtatataccatatagataccatataggcacctcgctgtgaaatgttatcacctatcactgaaaaataaatttgagctcccgtgttaaacttagaacttaaaccgacgaggggatgtccccttagaatccacgcccacgctacgcttgatatttccttttgtgtccattatgcgcatacaagcactggattgttatttcccttgtgtgcgttatatattacgggcgtataaacacttactgagttgtcatgagcgataacaccattgacacgtttgcttattcagattgtggttcatgtggcaagcacgtacgtacaccgccatggaggcactttccaaaagcaacatcccagatgtttctagctgcgtatactagtcgcaattagcaatagagctgtttagtcacgttctggaattgtcagtggttagattaaggatctaataatagaagttgcctaatttgactgccatcctggatggttggagtctttcttggtccacaagacaagcaacagaatcaggattcgtttccagtttggctttggctttgttgtacgttccgttttccttgtactaccgggcacttgcaaattgcttgcgcattactatccttggtgtgaaatggttctaaacggaatattctacttgtagtacgtacacttgtactccacctgtacaagtgacgcatttttttacattgactttgtgcactttgttatattagcctcttttgatattaggcagtagtaccatcctaagaaaaaaaaaactcaatcaacatgtgatgcgtgtaccaacgacacatcacatactttaatttggcgataaaacacatgtgaaccttttattattagtcacaggcagtttgaaaaaaaaaatcacaagaattagtagtactgctacagtactactaaccgatcaacttggagaagaagaaaagatttcctcagagtcgggaaagcccgaggaaagcccatttcccccgtcactgacggtgtggccccaccaccggttcctctcctttcgctcttcctccctatataaaaccctcccaaaaaaaccctctccatttgcaaatcgcaaccatctcgtcaacaaaaaggcgcctctaagaattcctcccaaactttttggtgttgtcaagccgtgcgtttcggggtacatcaacggcggcg

SEQ ID NO: 5463 - DNA, 2000 bp, Oryza sativa
ggcttaaaacttaaaagtcctttgagccgtcgaatcctttttgtggagaagcaatggctagtaagttgtaacctctatccagttcatatactggtagtttacaagcgggattgattgttccacttagatatttttttcagctaatattctaaaaactttccacactttactgggttaatcatcatcatgtaatcctgagtttaaatggaacaattatctgcattgaaattagttagagcaggtacaatagcaggctataagccagctgtaaacatattttaaggagataaataaggagagaagagcagcgggctacatatttgtagtcagctgtagtacggactctaagacgcagtgtgtatatgacaggtgggaccatgtattaatagtatagtatgtaactattgtataaatgagttattagattgactatagatgaattggagctagtagttggctatactattaatcttgctcttatcgatgcacaggtaatagttgaactaactgcacctataataccttgttcttctagacttgctcgaaatttaggactatcttcaattaaaagtatggtgtaacaccttttatgcaatagtactccgtcgaccgaaaaaatatggaagaatacaatttttagctaaaatttatcatagtttaatacgccgaattgacggcctagtaaatctatatccctttaaaagaaaagaaattagaaataaagtagtgatggtaatagtgaatttgctacttcacctactgcattgaaatttttgcaagttaactcctgaactttttaatattaaaaagatcgaatctaaatgggtagctcctaaaaaaaataaaagtaggatgaatattctctatagcaaaaagtgaaagtacattaatacattattttatctgtagcgagcatggacatttagatggtttctaaaaattatatagtattttgtgtttatcatgattttttcttaggraaacaacgcttactacacgtactattttcagaatggggctttctttatagaagaaaaataatccatcctttcggaggatcggttgtggtcgttagcaggcattgcttcctttagggatttgttgaaagtgtagcgtggctttgccctctcccgctgattggagktaggcgtwacctgtcgtacgagttatatttttcttccttggttgttttttttctctccttggtataagttggtctagctaattacattgagtaatatattgacgtataatctttttcgcgttcatgaaaaaattatagaaaaataattttggagcggaaactagtctccgcaggaactctttgatttctgacggactcaacgcctgcgggctgcagcttctccctgctatcctccttcccttttgatatcgggtcgaactttccaggaccggtgctgcgcatgcaagtgatcttctggtttactagatgttcacattttctcctttccagccacggcgaaatgtcagtccatcttcgccggttgactagcaccggtcgccaaacttcaaggaaaccgacgtgcaggattctttcgttgccatgttgtcactcacccgtgccaccatcgcgcagcagaatccttcagcggcaaaccaagaaacgacatcccgttgaaaggtcaggtcaaccgtaatcctcatcacggcatcagtgcatcacctgaggccgacctgctctcccgatccctcgcgaactccccgggaagacgacgaagaccagttacttctacaacgcaaatcgaactatagccgccctgctctgtccaggaagcaacgcgccggcgcgggatgctccactataaaacgcacccgctaatcacatcgacccgccacaccacctatcacagcaacacaagccaaccacaaagaattctcatttccggtaacttttctcaagcctttttggcgctctgagaatcatcacacggaagtcaagcctttgttgttgtcgtgattagtttagtttagtcaccgag

SEQ ID NO: 5464 - DNA, 2000 bp, Oryza sativa
caatcatcacagaacagcaatagttcatcaatcatcacagaacagcaatagttcatcaatcatcacagaacagcaacgcacatcagtccatcagtgtttcagtacttagttcaatcacaaaacacatcaccctataaatacatagttcatcacaaaacatagttcaatcacaaaacacatcagtacatggttcaaacatatctcatccacttgtgcagcaggagtacactaatttgaaatggaaacttgaaattagatgtaacttgaaaattaaattgaccaacattttcttcaaacatccattggcgcaatgccatcctcattagaacattccgcttctactgtctctgtctcttgttccgttccattagccttcaaaaaaaatgatagagcattagtaaaagtgcaaagtcaatcactatatacacctgctgctgctggttgctcagatgctgccgctgggctgctggctgctgcgaggcgaggagccgtcggcgttggtggcggtgaggaagagactgcagtggtggtgtcgtcgtcgcctcgtcggtgtggtggttgttccgtcgtcggcggcggtggtggcgacggtgaaacggcgagacgcggtgggacggcgccttgagatggcggggaccgagcaggccggcggaggtgcgagatggtggcggcggccggcggcgaaacgacgaagagcaagggcggcgcgaggayggcgggggccagccagccaggcgaccagcggtaggcgcsagggcgcgccggcgccgtgcgagatggtggcggcggccggcggcgaaacgacgaagagcaagggcggcgcgagatggtgggggcgaggacggcsggggccagccggccaggcgaccagcatagggcsgtggggggccggcgccacgggcggtgggcgtgagggcacgctggcgccgcgatgccgcgatctggacgccgcagccgccgctccgcctccaactcgcgagtcgcgtctgagttctgagtctgacggtctctctcctatagggttagccggttagggtagatgccgccgcgatttgggttgggctgggaagctagggatgaattatggactattgaatctatgggctttttaacttcggaaattccgacaatttttctggaatgtttccgatcgtttccgggttccgacggaaactgctattatcatattcgattccgtttccgagaaaatatttccgttttcgattccgattccgagaaattccgaaaaaattccgactggccgattcggtttccgaaaacatgaccggaatccggaaaattccgtactgttttcacccctaatacgaacacagcgatagttgcagtagagagttaagtgcacatgtcttttttattaattccttgttttctccatcacctgcgcaacatttttttattacatggacgcgtatgcacacactactgtacacacaacaccatatgcacacactcgcacatgatttatatatgtttatgtatcacttttgacccttctagtagtatgtcttttttatttataaatcatgtgcctactacccagattaggaggatcgaattcaacttaagaacgaatggaaggctatgtaactttaattttggacatatttaaattagttttaactaaaatttcaaaagtatgttagaagattttttttgggaaatcttgcttgaatttctgacctccacttgaagattcccgcaacacgtgttacccgttctctaagagccagattattataagtcggattataataagccgatatagaataagttgttagatgtttatttctctaaattgttagctgtttgttagttgttagccaccaaataatctaaaaaagcacctttcgaatggattatcagactatagtaatatggtttataaattgtaataatctatcataataatctatctgtttgttttagcttactcctaaaaatgtgttgtgtgtgtatgaatgtgtgcggtgcagtacggg

SEQ ID NO: 5465 - DNA, 2000 bp, Oryza sativa
acctaacacgcgtgcccagcctaatccttccccttccttttctcatcatcatcgtcgctggtcaagctcatcgtcgtcactttcctctcgccagtcaagctcaagggaagaagccggtagaaagaagaaagaaaacggaaaaaaaaaagatggagatggatggaaaatgtgatggtagtggtaccattcgaattttgtaaaatttcagtggcacgattaataaacaaattgtaatgatatttatttgaataaacaaatttgtaatggcacggatcgaatctaccctttaaaagatctcgtaaatttcgaaaaccaagcacatatacacgcgccggcagttaaagccgattaaccggattcgttcagccccggttaccgcaaaattctaaaattaacaaatatataaattgtagtgcaacttactaagtgtcatgcacaatgacgtaggttaaacatgttttgagtcattatcgttgcacactgtttgcaacaagataacaaaattaggtattgtcggcgtggtctgcaactaagatagagatacaattgtatatacagaaacaaaagagaagaggtgtacgctaatccaatctcacatttaatatcaaccatatatggagtataactacaatagggaaataggaataaaaagttgtatacaaatctaattcatcttttcaacgctaaattgcatgcatggaaacccctaggaacgaaaatgatcacggaaattcccgataaccgagtgccgtttatgcaaaagggtattgtttctgactgttactttttttgctatataaattttatttttctaatttctttatacatcgtactaatattaaccctaagtagttaaaataataaatatgatcaattacccgactgatcgagtattgttcccgaaaagatactatcatttctgactgttttcactcatagaaacccctagtttcctataggataccataaaatttgtacacatgtttcttcaaaaaaaaaatcgtacacatggaaataatttgtacagtaagcagtaatatgttcccataacacctgccaactacggagtaataataaaccactgggtgtgtttagttcacatcaaaatttgaagtttgattgaaattggtacgatgtgatggaaaagttagaagtttgtgtagaaaagtttcgatgtgatgaaaaagttagaagtttgaagaaaaagttggtaacaaagggcagttttggattgctaccaaaatttgctctaccaatattttggtagcctaaatagtacccaccatttgtttggattgatgccaacattttggtaatgcccatcctaaatttggtagcaatctagaactttcttcgctatggtatcacaatttggctacattttgatagcaaaccaaataagatgaatacaaatttattctatcaaataattgatagcaccaaaatttatctatattttgacactaccaaaaaaattgttagggcactgaaccaaataagccctaaaacaggcaaagtacataaagcggccgacttcaaccgtgcagaaaatcccggtcaaacccggcggttcgcccgcccatccgtctgatcggcatcgaacggcccaagctggcagaggccatagccccgtaccaaaacgattgatcgttaccggcccaacgggtctcaactctcaagtctctagaaccttccggagatctctggaaccgcgtctccaacgcgcggccgagtccaaactctccaaagtcgcccgtttcccacgtccgctacgaacccgccgcccctccaaccaccgtccggatcgcatcggacggtccagccggtccacggaacattctagaaccacgcagacctataaaaccgatcgctgcctcgctctcgtccactcacaaatcgatctctctcctgccatcttcagatcgcatcgattttctccttttcgagtttttttccccttcgcttgagagctttcgacgagagcgagggagagggagatc

SEQ ID NO: 5466 - DNA, 2000 bp, Oryza sativa
aaaccttgggaatataaatcatgaataactctcaagttgttgagtttaaaaatgtaaaaattatatatatagatttgtcttgaaaaatactttcataaaagtatacatatatcacttttcaataaatatttttatagaaataagaagtgaaagttgtgttttggagaccgtgtcactgtcctaaacgacttcctttacgagtatggagggagtactagatatctctttctgtgtaattaataatsgatcgatctgacctactgttacgcttcgcaacyacgttcgcatatcttatggagtactagttttgcatgatgtatatctgaaatacaacactatgcaattcctagttattatatcgytgtcatatcggtgggtgtaactaaccaaactagaagtctacaagcytactgctaaactataaatgatcagtacactttggtgctttaggttgataattaataacgcttgtcttatcatgttcgatcaataattttcatcgtaagatcctaatgatatcttctgatcagtgtagtgtatatatactataaaatgggcaagataatgcatcttgctaagagctaatccactcatcaatgtcatagtaaaatacgacgcgttaggttgccagtcatattttgtcatagtttactatgtccaagattatataggtttcactaacttagcaactactccattcgtttcatcttatcaatcgttttgacattttatcaaatctatctataaaaataattagcaataatactaaattagtttcattaaatataacattgaatgtattttgatatacatcgttctcacgattgtcatcaatcataatacaatgagcaagataatascaccatctgctaycatmtrcatggacaagatctccttctcagctacaacatctccttctcgctttgagtgatttcgtactaagttgatyaactggacgaaaggggagccctcaatgctccacacgccaccatcttgaagtccaagcaaatctacgagtacttgcatgaagaccgccaagacgaccaaaattggaaaataatttggaaaagtaaatctcctccgaagattcagttcttcatttggttattatccaaagaacgcctccccacaaagcagaacctgtaaaaaaagaaaattgtttcgtccgcgaactgcgatcttttggtgttttagaagaaactgcttttcatttctgtgttgattgttcttttgctcaggcgttctggtcgaccattcagattgtcccaggactgacaagctcagccaatctcgcaagtttaggccgcctagatggcattcccatcaagcacttcagagtcttcttctttctctgcttttgggttctgtggaaccacaggcatgatgttgttttcagggggctgcaaacatccttgcgtagactagtaactaaatgtatagatgatgcaactctttgagcagagcgtttcaattcggatgataggggcattgtttcctcgtggaaggaaacactagcgtctgcttttcaaaactctgtaatttaacatgtaactgcaagtcttccttcattttataaaattcaggtggggaaactcccccgctcccccctgaactttctaaaaaaaaattatacaatggacaagataataccctccgctaagagctaaatccatatgtcacggtaaatttaaccctccgaagcattaacaacttttttcaatctcaagttgagcatcacgtgcattaaagaaacaaaaagagataaaattaatctacataactagagatgctattgttcaacgaaatcttcaatgatctaaaaaagatgctaacacctagacataataacaagttaatactaattaatgtcaacttgaatactttattattacttccggactactctcctctccgagatagtactatatatttgcacttcatgctcccagtggatcaaaaaaaatacattggtcattggtgttctgctggattcattcttc

SEQ ID NO: 5467 - DNA, 2000 bp, Oryza sativa
tgattgtgtgatgactggtgtgcagttgccctttttggtagacttttggatgtcttttgggttgctttgatgcattggcttcgctcaaattgatccaagctggattttttttttacaaatcatataccttaaaggtgtcagttcctaaaccggcacctttgagtcttttcattactaccgccttcgtggtgccggttactttgtggggtttctaaccggtaccaattaccttttctgtggtaatgcgtgcaccttttgtcttatggaaaagatttgattgtttatctataattatcaaattaataaatataccgacacaagtacaaaacagttttttccgtgcggttcaagaggctttttcgcgtgtgctagggctaaccacatggacgaaagggtctgctgaaatgcaattttttcgtgcgggtggcgcacccgcacgccaaaattctgattttcatgtgagggtgcttatgtcacccgcacgcaaaaattaaaaacccaaaaaatatccaaaaaactgaaaccctaaccctagctgctgccatcgtggtcgctgtcgtcctcgtcgttgccattgccgtcgtcggatccaccgcccccatgactcccatctgtcaaatgcgtcgacgtcgaggtcgtgcgtcactggaggggccccgcccgcgcgaagccaccgcggcaccgaccgcctcttcctcctcatcgtcgtcggcggggcatgcacacggatccaaccaccccctccttgccgttgagcctgcccgcctgaagtcaccgccgcgcccgccgcctcttcctcctgatcgtcgacagcagaggcgtgcgcgcagatccggccgcatcctcctcgccacggagcctgcccgccggccgccgcacccacaagcctgaagccaccaccgcaccgactgccgccaccacgggatccgcgcggatcctggtgtgagacggccgccgccgccagatccgggcgggggccggtcgcccgtcaaccctygccgccttcaacacggggccgccgtcgtgtgccagccaccatgcaccagccggctacctagcggctcgctgccgctcccgctgccacgcctytccatctctcgagccatygccgacgtcgtcaagaagtggtggaggaggtgggagaggaagagataaggctatggggggggggaggatggaagaaacgtggggaaaaaaaatttgaaactgatgagatggaagagatgtgggaggataaacttgtagacggacctttaagaggcccgcacgtgaaaattgattttcacgtgcggacccttaaaaggtccaccacaaaaatatgcttatttttgtatgcggaccattaagaggcctgccagtgaagatcgatttttatgtgcgtcctcttaaacgtccgcacgtgaaaatgatgagtcgatttttgcagacgcgaccaattacggtccgtttgcaatctaaagagctccttgtacagacaaatcgttttttaagcagtgcgagttgaacaaaataacaccccggctagaaagatatcgatgatatcctttagaccacgtgacttgaatctgtacaggttaatcccagaatttgagataacattatttcaacgtacagaacggatatttaaaatccaactgtccatcactgaacttgtattttatttaagttttattacatcaaaggactgtacatttgaagttaccgtttgttacgtgaaccatgaatttgatcaaatcttcctatgttcctcctgtattcctttaagaatgtgcagtcgcgaaagtgatcttctcatcctgaaattccaccgaagcagcacttctcaaataattttgtacagtagtttatccatataatatcaatattgccaatttttacaaaactatttacgttattagtttcagatatatgactcgacgatcctttcaagggatcgaaatagtttcccctcacaatctttgcttcaagttatatcacattgagtggtacacgacccgcga

SEQ ID NO: 5468 - DNA, 2000 bp, Oryza sativa
agagccacaggtggatacgactctgcttttgccgcagaaatatgtgttctgcatgtatggtgatattattgcaccatcaattccaagtttgactgatttcaagtttgtttgatgacattaattacaacgaatagagaaatgagctgtactactagcgatatgaaaaatgtggaaaatcatatttatctgtgatttgtgtttgtttttttttcttcaataaatatctatgaagccaaattgcaccataaaaatgggcgagtttagctgtatgcctgtattatacagcaaagcgatttagatttggtggcaataaatcagtaagataatttgcctctagtttgtgcttaataatgagttcacacttcaaatgctcagttgtcttacagtctttccattagtaccgtttgcctcaacttgttaatggcaaggtttattcgatcatggaatcatggatacgaaaccacacgaacaaaagaaggtttcacattttcaaaattatatattaggcattttcacgctttgtcccattaaataagtggacacagtctctctgaaaattaagctggtcgaccaaccaagctggccatgttcactgtaactgatttttttccatctccctcaaaacggaatgttaaaagaagactgaagttgaggaaacacaaacacaattcatataccacctcatatgtcccaaattgctcgaaaattcttcgcaatacattcatgtcgtgagagacaagtaaaatcatttgtcattttgaccatccctgctatatggctctcacacaccatacctcgctttcatatcatttctttcccccacaaaacataagacaaacttataatggacgcatcacttgcccgcctatcattagtcgtcgccctctctctttccctctaaaagcaacaaaaagggatgagatgtaaggcaagagagtggctaagcccgcgtgaacgataaccacattaccaacctctcatgttttcgagcgtgtgctagagagactcaggtggtgtttagatccagggacttaactttagtccctgtctttagacactaatttagagtattaaatatagactacttacaaaactaattacataaataaaagctaattcacgagacaaattttttaagcctaattaatctataattagagaatgtttactgtagcatcacataggctaatcatggattaattaggctcattagattcgtctcgcaaattagtccaagattatggatgggttttattaatagtctacgtttaatatttataattaattttcaaacatccaatgtgatagggacttaaaagttttagtcccaatctaaacagggcctcactcgcaaagtcgcaaggcaccactccgcatagatgtgtatctgtgtgcgtcttctatttataatgagaaaaaaataaggaacaaataacctcccgtcctagcgaccttcctcacttttctctctctccagtctatatatctactgtcagcgaaggggagagagagattggggggggggagaagaaaacaacaaatcacaaccaccagccagcagaagtaacagctcatccatcacagccaaaaaaatacaaaaaaactaaaaaaaaaggaaaaaaacatcccgggcccacccgcctccgctcaggtgggccccaccccgccaggccagcatcaccaccagacctccctcctactactactactctctctctctctctctcgcgtcgcctgcgtccaattcaattcaactgcggcggcgacggcgagcgccccacgcaagcaaaatttccccagaaaaaaagcagagcgcggcggcgacgacgacgacgactacgcgaggcgacscraaagcggaggagacctgagcscscgggagcgggattatgggaggggttccsscarargtggtggtggaggacgctgccgcggcggcggcagctgtgcccgcggcggcggtggcggggacgggagcgggagggggggaggaggggagg

SEQ ID NO: 5469 - DNA, 154 bp, Oryza sativa
cgacctctcccgaatccttycctcctttgcccgcctatttaaacctctccctctattcccaaaccccaacatctccacttgactaatccacagttccactctctgattctcaattttcaatttcttaatagagaagaagcgatcggattaagcg

SEQ ID NO: 5470 - DNA, 2000 bp, Oryza sativa
gatgtcttatattaggagttaagaatactcaataatgttcaagctgaaacgcagttctatagggaacaaaaaataccccttattatgttcattcaattcattggttttcattatggctttagcacctaacaagccgaatactctgtgaagtttgtaacacacctaggtataaacaataatctttgtttgtgaaaatggagttgcattttctatagcgcttattgctgaaaaaacaccgtacttctgcaactactagtggaggtaatcaaccaatgtatgtgtatgttcccttgttccggcagagcaaccggacccgggtgtggatcagccccgtaaaaaaccaaacccaaacgcatgaaagaacctagtaattactcagtattaagtagccactagctaacatctagtatcaagcatcttagtttagcacttatccactaggcattcatcgcgtaataaaaaaaagatgcagaacttactgggatcctcgtgctgtgctgaactgctgatcgatctacagcctgcagggccgtcgggaaggcgagctcctcttgcgcggatgctagcgcacgtactgttttcatgcctcgcctgcctccggtgggggtgacctgccagcgacgaggagtcacggcggcggggcgacggcggcttggggaggggatccctgggaggagagagaagacagtacagaggccctcaagactgacatggcatggcatgggctgatgggccatggaggcttacgttatgtgccaataaacagtagtactttaggcccacgcactgtcaaggggacgggcgtcaaactttgctggaccacacgttgaagaaacggcccatacgaacaatagggcccagtttggacagtccatacgaatcccactgacctgaccatgacgcctcgtcgtcagttccacttccctcgccaatgaccgtaaccgggcctcatccacagtcctcgcataaaaaggctaatcaacgaaaccatggtccaatatgttgagacttttctctgggatggataagatgagtcgtatccatggtcaaaaactggctttggtatcatcggtatctcaccagatcgtgctatctcaaagctcctgttcgaatagaccaaaaattttggatgaatttctttaaattgtttgaattctgttcaaactgctttaagttcagtgaaaagatatttagatttagatttctcgtggtgtaattttgcccgagatggtgagatgagatgtctcactaacgccgggtctacagtgactggtcaaaagagtaccaatcagcccccacaaaaaaaaaagaaaagaaaagagtaccaatcagcgtgtcagactcgatcgatcgtcggctatattgtactccctccttccaaaaaagacaaaccctggtttccgtgcccaatatttaaccgtttgtcttatttgaaaaaattacgaaaaaaattaaaaagacaagtcacgcataaaatattaatcatgttttatcatctagcaacaatgaaaatacgaattataaaaaaatttcatataacacgaacagttaaagttggacacggaaacccatgatttgcttttttttttgggacagagggagtacagtcctacatcgtgttttcttttccagctgtccttcagaatttcgtcagctaatctgcagattgatcatgcatcaaacctcatcgcagctagtcttggcctcgtttctgctccttctctgccaccacgcgcacgccgactgcgagccggcgacatgcggcaacctcaccatcaatcccccgttctggctggacgagccaggccggccgccgtgcgggccgccgacgttccagctccagtgcaggggcagcgaagcgttcgtggcgcacagcttcttccagacctaccaggtggtccgcatcttcaccggcaactcctccgtcgtcgtcgtcgacaggagctccgctggagagcggctgcccggtgccgtggttcaacatctccatcggcttcgtc

SEQ ID NO: 5471 - DNA, 2000 bp, Oryza sativa
cataaatgaaacttctccgtgtgattttgacggtaagatataacgcgtcaagcaactaacatgggcttttgtccaaggtagcacgagtttacgccattagaggcttagagcacaaaccttagttatggtggggctgacttttttactactgtatttgtcctaaaatatactccctctgttttttaatagatgacgccgttgactttttcttacatgtttgaccattcgtcttattcaaaaaatttatgtaattataatttatgtgagtgttgtadcactcatagtacttaattgtgattatatctatacatttgcataaaatttttgaatagacgaatggtcaatgtataagtcaacggcgtcatctattaaaaacggaggtagtaagaacctaaagctgaattagatatttccaataatacgggscctgttcggctggctggtacagccactgtacgcagccgttgctgctgcagctgcagactcaacttactgtttgtgttggctgcacaacagtaaagttaagtacagccgaacaggcccacggttacggtggcgatcacggggagtctatgttatggcttgcgggaggggcgagaccacgagatggaggcccgcggtcgatgtttttccataaccaggtttgccctccttgcattagggcatccacaatgtaaagcaaaagtagtccatagataatattatattccattcagctacctattaccattgtgcaactagtctatatggagaaaataacaaaaggtatccataagcatatggactacctatatgaaataaataatactatctctatttctctttcatctcctaatgctaccttgtatctacatacatggtggagattgctatagttaaagtctctttatatgggtcctatccatatggatcacttttaccatatacattggtgatgcccttacttttggttggtcgatgctatgttcgttcatgttccatgccagtccaggtccgtttttcctttttcataccccggtccgcactgtccaccgtagttccatccccaaccaaaatagccagagtgccccgtctcctactgagtttgtgagtgagggttagaaaccatcattctcagcacgtaaaacaaaacgataaattaacacatgattaattaattataaactaaagtaactttaaaactaaattaatactctctgtgataggtatatttttaaatctgaaaaatttatttttgatagacatatttcaattccaacaatctattatctttaataactttctcggatttaatgcatgactctttattcttccacgcatgattggctacatgggcattgagaaatgtaaatattaatgaatcgtttgtttacgatgaataattagtagcatgtttaaatggatgataagtataattacttatccttggtctgtgtgtcaagatgaaatatgactatcaaaaataaaccggagggagtataatttagaccaacttcttttataatttttttaaaaaaaacacacaccatttaactattcagaaagtgtgtgtgctaaaaagcaagaggtaaaagttaaagttctttagttgaggttttcaactcacatcgtttttccatgcacacgcttcctaaactgctaaacggtatacttttttaaaaaaaattctagaaagttactttaaaattatattaatctttttcaaaaaataactaatatttaattaatcatgcgctaatcaattgtgcagttttacgtacactagttgattagttcccaactcggaaagccgaacacaagaagtaaaagttgagaaggaagagtttagaacatagcagtaaccggcgaactcgctcagttatgtttcggccaatgcataggaataggaaggatgtcgcctcgctcactagtactagtccaaatgtgtcgtagtacaagtagtagtagtgctaaaattctctcatgtcttcctctgcaacatatcctattgttagttttcg

SEQ ID NO: 5472 - DNA, 2000 bp, Oryza sativa
tgctggtctcgttgtggccaattgctgccgcggcatgcagcaaggaggcgagggggagcagtagcaaagcaggatgcatcgcatcggaggagagaaagaagatatcaacgagacaacaaggaaggagagggtggttaaggttgccggcagattcttgtttgcatccgtgcaagcggagggtggagtggactttggagagatgaagagagcgaaccaccgctgctgctgcttcggtcacaactcgcggccatatactttgaccgtgaattcattcgctccctgtttttgttcgcacctaagctagctctctccatcctctgtggtgagtttgcctgaaacgataggtaaaggtagaagttaatggaccatattatcattgaccgacccttagaacatggctcgacaaattctagccaggcactccaagctccaagagaaagtccgacgcaagttccacggcatcaattcttggtcttctggtttccatttcagcattcaacacacaggctgtatatgtgaccactttttgaatggatgagtatttgaatatgattgatgaaaattctatgctgctaccagtaaattagacctaaaagttttcgatcatatccttttgctggcccttttgctaaagcaaggtactgcttcgaaactaatcattgtgaaaaactgaagatgctcacaaggcacaactattgtgttctcatcaaactagtctggagactttggtgtcgtcggcgtcaacagagaaaaatgatgcaccggaatttctctttctgcagataaaatggctatctgaaactgaaaaaggttcagaggctgaaaactatgtacgcgaagcttacgtcggaggatgcagtctccatcacttcttccgtagctacgacggcgccatggcatcgaagtccttgtccatccattcgcatggctccatccgctccagcgaaaaatctcttcgccgtgatctctgcaagcgtgcattatcctaactgctacatggaaataatacaatagtgttggatcgactttttgtttacctgtggaaaatcgagcttcgttacagagaaaactggcatttaggaagtaacttgcatatgaggtcaccttccggctctggctttctttcatgaaaggtatacgcgttgacctgctaggcagtgtagtaaattaaataaatacctgtattttcttattgagctcttacaggagagtgacacgtaagaaggcctacataagctaaaaaaggaagtacacttgttaattacataaatatttgccaagcaaataggataaaaactatgcagcaatagggcacactacggttgcaagtctggaaaggaagacagattgccactgaaaatacaggcaagtagtgtcacagagtattgagttggccaccaaccatttcagctaaaagattgttattgatgaaaggtggaaacggaaaatatttcaacatagcaaaaggttcatctttgaacttggtagactcttaccattaaactacatctagagcaggcttgaattgttagaaaacgacaggtaaacaacaaagctttttcaagaactaaacatgcagatttttatggtacagaaccattataaggaaaaaaaaaaggtgcaccaactattctagtgtggattacatgaagtatgctatatataaaggtctaaaacamctagaagcacagtaggacagtaaattcaggattccgaagatgtggcaacactagtatctgtatcttaggcaagaacagtctcacatgacgtctcactgtatgaaaaccttgctcagctattcccgtgttagaaacaaacatgttaacgacgtatttgtcatcaaatgctagagtccaatgcgcatgcggcaagacaagtccaaacagcatcacataaattgctaaccttaactttcaagcagaaccaattcactttcttgtctcagatttttacaagaagcgtcaattgcacagaagaaaaaaagaatccaacattttgca

SEQ ID NO: 5473 - DNA, 2000 bp, Oryza sativa
tttgagctcacatgtagatacataatctgaaaatactcactagattggcatggttgttattactcaccatatgttaatgtcaccaatgaacagcacgaagttagaaggaagaccgttaagctgtaggctttctgacaaggtatatctctattctgtatgatttatcaatgtggggcagtgcaatattttccttttctgacttttacaatcatgctgaaggcaaacgaccagcttcgtcgatggtttgaggatgacgatgcattggaacaagccatgggtggagagtacggtcttacttgtcttcagaattttgatttcattttatgtcaaatatgctctgtataatccttcttaattccagtgcctttgagaaaaggtactcattagaacaatgctacttgcaggtggtacctcctccccacaagttctggagactcgcaacccattcgattaatcagggatgaaaaaaagtcactctccattgggtaggtctaaataataaatctgttattttttggtaacactttcttcaaggattgtagaataaaacaaaattgttcttttgcagaagccggtcagatcccagcaattcgactgcttccctggcattgcccttgccacaggttagataagcaaaatgatggcatcaaatatttgttggaacttctttcgaactataaatgcattgcaacggttcttaggtggagacattcaacagctgaattttgttttacttattactacaacctaattttctcttgcctaaaaaaatcttcagttttatttctgtcaataaaaaactaatgcttctccaatttgttcaacttcattgcagatatcagaaaaccatgctactatcacatgcaagaataaggccttttatgtgactgataatggaagtgaacatggtacatggattaccgagtaagttctgaaaaccgcatgattctttgctcttgccctgaattcgaaatggatgcatcttactaattcagtcccatgtggactctccagcaacgaaggtagacgctatcgcgtacctccgaacttccctgtccgtttccatccctcggatgccattgagtttggttcagataaaaaggtacccaaaccttactgacaccgtattgtaccattgtctcctctcattttgttcagaagaaccatttgcgttgagttgctgcaaaaattctgagttctgatcaatttctacgaacttgcaggccgtgttccgtgtgaaggtgctgagcacgctcccatatgaatctgcaagaggagggccgcaaatcctgcaggcagcatgaacgagagacttcagtcagccatggctgctgtcatcactcatcagctactgtacagcatccagtaaaacacagtgaattttgcactaaaatgcaggttccacttccagacaggattttgaatagctttctctgacggattgaaattgcagttctccatacagaaactgaggtgtacaatataaaaaaaaagaaactgaggtgtacaatagccaatagggacaggcaattttagctgttgcctgctgtatatacattgttgtgccattacagcaacaaggtggaatgtaattacggcatgaacacaatttaccaaatggaaaaaaatgtagctaaaaaccgctttgtttggtaactagttgtacttttccgaactttcttccaagcggaggagccttaccttgccacgatgcgatctgatttctgaactagaacgtcagccacaatgcgccacatgcaccaccgcagagcgccgccgccaccgccgccgccgccgcagtgttcgccgccatcgccgtcgggaaggcgaggtcatgggagtgtgagatttgggccgctagttcggcgtaagagcccttcccagccgttggatcaccattgctcggtccagatttacgccaggttaggcttgtagaatctgcgaggcgtctcctgcctggcgctagccgctaggctccccactccccgcgagcttcagcc

SEQ ID NO: 5474 - DNA, 2000 bp, Oryza sativa
tatgccaatagtgagatgttcatgatgatttcgttaatattaaaatatactgattcattgtttcagatgcgctaataaaagtaagatagtattaccatgtttttttaaagagaaaaaatgtacttcctccgtacttataaaggaattgaagtcgttttggacagcgactcgatctacaaaacacaactttgactttttatttctataaaaatatttattgaaaagtgatatatgtactacctccgtcccaaaatataacaatttttagctaaaaatgtttatattttaggacgaaggaagtatacttttatgaaagtatttttcaagacaaatctattcatataatttttatattttcaaactcaacaacttaagagttatttataatttatattcttaagatttgactcaaatattattttaaacgattttttttttaaaaaaatatggagggagtatatatgcttaaaaaaacgatcgaacgcacgcgtcacccggtcactctgaatctgaccaaggcggcgccggaaacggagccgcggattgaaacgagatttcgggggagaggagcaacggcagccacggtggcaagcggcagcgtagccagcgaggccacgtggtcggcggtctcctccgtcccagcgccgggccccacccacccttcccccgccagtccaccaacacgaccgttgcctcctccccctcgccacgctccagcgccgcacggcatcggtggccgtgaggtggggaccgcgctcgtttgtggggcccacctgtcagcgcgtggggatgggcagcacgtatcacgcatcaatcttgggacaccgaggcgggcgcgaggccagacccgaccggcaactgaactggcagcgcattgccagctgtgcctgccaactgtgccacgcgctctgcccccgtaggtctgggatatttacgccatttgccactggtgacttgcctgattagcagaacagagatgggatctccgtgctgaagattagtaaaagcattgtgatagttatttgattattatttagagatgtaggggcagttcagattgatgctatttttactatatcatttttttaagtaaaggtgtaaaaaaaattgtacatttagtttgttgccaaatttaataatacataagaaatcctatcatcttgccaatactaaaatttagtgatgtttattttagctacaatctgaacagcccgtaatggtaacaattgaaagcaaattcatcatgtactataacttttgtgacatcagtactatgctagtaccatattttcatcattaaatctacaattagcacataacggagattggatctccgtgctaaagattagtaaaagcactataataatgttatagacttaattgtttgattatgtagagttgtaatgataacagttaaaaccaaatatattacctaccataagtacgtagtactagtgctttgtaccattatcggttttgttcacattttgatcatctcctgcggtttctgcaatcttaaatcttgtagtcataccagcttataaacccattccagactaaacttagcatcatatgaatctggacacgtttacgatagaagggagtctaataaacattgcacataatcagtacgtagaccggagggcaaattggtcatgtaggccaacacacattctaatcatcatcgggcggttcaccatcctgcagaagctctgctggcctccggccctggccctggctggaattccgcccaattattagcggccagtggcattcccgcaattcctgacctcttctgctgcccctycccccctccatttctataactgcagccaccccagcggcgcccatcaaattctgcaaaaaccacaggccgcacagccacagcagcgtccacttcacgttccatcatctcctctacctccaaccacatcgttgcttagcctcgccaccgccgccgccgccgccgatcagtggtagatcgatcgatctagccggcc

SEQ ID NO: 5475 - DNA, 485 bp, Oryza sativa
aaaacgtcactgaattcttctgatcaggacagagaggaacgtcatatgacgttcggttcaatgaacatgtttgagtcactacacgtgtctcgatcagagccgtgggatctccatcgggcggtttatctgcgacgagtgtgttttatccacgaaatcacgatccatatcttttgggttggggcttaaggcgttaagcgtaatactaaattcttaagaggattctcgtgcacaagtttcagactaatgaagtcgatctggaccgtccgatctcgatcggacggcccagagagagccccaagtaacacgggaacgacacgcgccgtggggcccacacggcagcgggatggtcgccttcactgaggcgactcttcttctcctcctcctcctccgctcgcgccgccgccgacgaggtcgccggactccgccgccgccgccgcaccaccgcccgcgacatgctcctcccccctctggtggtcggctcgacc

SEQ ID NO: 5476 - DNA, 2000 bp, Oryza sativa
  misc_feature (1)...(2000): n = A,T,C or G
aaaccgggttaggctctggttggctgccgtagccaagtctaattgaacattgataaatacgtcattaggacattgcaaacttcttccaaaagctctttgcggctccattgttgccgagtggcagatacaatcatacaactgtatggcgcacatgggacgacggagatcattggcaaagacatcttgtagggtatattatttttgctgtaaaatatattatatttatattataatcgcataaaaacagattataatcaatacatttaaacaccaaagaacttctacaatgatattggcaaaccgcagaaagcaaatgcgtagctgtgctcgtgcacggcatgtagcacatgaatcgtaatcaccccacttgatgatgcattaaaaaagattgagcgagttagaaatgaagacaagcaatcatatacacaaagatcatatgatgatcgatacctcgtgtatgaaatattactccgtcccaaaatgtaagcatttttaagattggcacgggtattaagaaagtaggtgagaatgattgaaaaatgtgggtgattggttgaaaagagaaattaggtgaaaaagaatggttgtgattggttgagaggagaagataggtagaaaaatagctttattttaagacaaagtattgtgctagaaataactatattttaggacggaaggtagtacctaattgatctaatgggctgatgtcgggtcggtggctatacgctatactagggcatgtttctggaggtgttggtgtcacaggtcgtggttggtctagtcatctcaccctacgtaatggatgtgtctgttcctacctatcagaaataataatgttttggtatttctatggtaattggttgtaaaaactaatgcactgttttgtttcaaattaccttttcaaactatgactattaataatttctcgatttattttggagggtattatcgtaatgttataaacctattagattttacaaagttattttaacacgaatttgatgaacaaattcatcaaaaactatactccctctattccaaaatataaggcacaaccactcttaacataaagaccaaaaaataattattatcatcttgtagtttgaatcatcctaataaatataatgcatacatccaatatgatcagataatatgagagtggaagatttaaaaaagtaataatttaatggagaagatgccatagttaattgcatgcttgcatgcatgccttatattatataacatctactaaaagtggttgtgccttattatggaacgtagggagtatcaaatattgcgaaaaacatcaaagatttgtaaacagaggaagtacaaaaattaagacgaatgttcctcacattttcttgaatttcccgttcactagtatttcgtgagacatatatcgatctagtatcaattttctataatatgatactactacatttaattccatgaatggaaccctagatgagctggaacttggattcttggaacattggaagcactggtaaccmaaaaaaatagcgcaatcctctaaaaacaggggaaaaagaaaggaaagagaagcgcaactactccgcttaatgcggtcagttacttaaacccaccgcattttaccaaaacgcccacttcgsttaacccttttgttcctcgaacccaccctccccctcccggattcaaaccgtcaacgccttcgccgcgtaactttcttccgcggcggcytgagcctgacaaccccaaccttaattggcctngtcgccggaaaattgcattcgsgccgttcgccgttccccccccctcttggaggccccggagctagctgcttggggggatcctcctccgctcggcgggcggcgatctcgcggcggtcccgaggaggtggcgaggtcctggctgcgacgagatgccgtgatcccagcagtgatgcgcggatcggagcatgggtgtgagccctccagggtgtacctgtaggcggcgggcgaggagcgggagttgcggcc

SEQ ID NO: 5477 - DNA, 2000 bp, Oryza sativa
ttttttttcatgtcacttaaatagttatatttttgttaaaaaaaattaaaaatgtgtattaacatgtgatataatacttcacaaacatgcaagtttaaatttaacttctatatttcgtaacattaaatttgtttttttcgttacgagatatagaagttgaatttttacttgcatgtttgtagagtgatatatcacatgttaatacatcctctcaattttttaaaaaaatgttttcataaccatttgagtgatatgtaaataacgaggggatatggatcaaaatcctcttccaagtaagtgtgtggtcttgattggcagaaagcgctaatgcatttgtaaacaaaacagtagtgatcgactagcaacggccgaaatgggcaataagacgtgaccttggggtcgttggtgttcttctagtagttggcaatgctcattaaaggcctaatgggacagttaaggatacgttcacatgctaccacattatatatcctgtagaatgggaatgagcaggcagcagcagtgagtcaacaaatagtacaagtcagaagtcagggagatgagctttcaggcaagtataggagtagtacatttctgcgcacagttttcctcgatccgttcgtaggtctgatgatcggatgacagatacttgtgggttatctatccagttccaaactaaaattcgtccagtcccacgcatgcctaagaactcagaagcttcctcgcagttggagtgatgtcaatagaaaacgtgcgcgagaaagagttttttctttcctgtggtgtgcgtgacatcggtttttctttcttgtggtgtgcgttgtgacatcctctctgctcgctcgctttcctcagtcacacactctagtagtactctacagtctacactcacacttgccttttctcctctagtcttctcaattctcatatctagctgtacgcagctctcaccaacaaaagcgatgcagacgccgcaaacggcagccatatggggcagttgggcaccgagccaccgaatggtaagcaggtgtgcagcacgctactccgttcctcggacccgcgagacagcgagaggctccgggtgaaggcggatgtggggtgagaagcatccgcgcagccgcgcgcgtacgttgcccctcgcgacaaaaatgccgcgccgagccgcgccgcgaaccgcggttggcagttacaacaggcgagcggggctacccaactccgcgcggctcgcgcgcgggcgcacggcgggttggttgccccggtgcgtcccctcctcaccggctcggcgggtccacccccaacccacgcctgccctgcacggcaragttcagtgtacccatccgcttcgcagaaacmgatgcgggggcaacgagacgaaacccgctgccgacttcgcctcacyttccccgctccaccccccsgtccttacgtgcaaaaatccaaaatcacgccaagtactccccacaagcccatcaacgagacgggggagcctctctttcacccgcagccgcacggctctcgcctcggcgagtcggcgtctcgcgtcgtttgatggtatcgcactgaccggcacgatacgaagcataaaataggtcgtagcgtccaataatttctagcctatctactcatcaaccgcacacgaaagaacaagggccgccaagttgcagttagctagctgttgcgctcgctttcccccaaacgtgacccggccgggagggagaagtcgccatgaagcagcctcccgctgctgctttctctctctcgcctcgttaaaatctctcttccaccccgaaccccatccagttcagttccctctcgatcgcttcccgtgctctcgctctctcgcttgctagatcagagattcccctctgcggcggttgtgaggtttccgcttcggctcgctagctagctctgctgtttctgtgagagccgggagcaccaaccgcgcgtggggtgggtgcccggaggtttgatgcgcgtggccgccggtttctccccgtcgtttg

SEQ ID NO: 5478 - DNA, 2000 bp, Oryza sativa
tttaataaaatggggtgtattccagktttttttttttttgcttttgtattagtatgtgtgagatgagtaaaaaataaagttagttttggatggaggtagtaatkgcttctagccaaggttaacatggtatgtataagttcagcacaatcatccagaaagaatctatgggtctgtttggggagcttaagattgtagttcattttcaggattccacaactatagttttttttagaacttgaacgaaaagctacattgtttctaggaatttctgattgtgaaaaatgctctcctaaatagaccctatataccacaactagttaggaatatttgacgtctacactgctataaatagagacatcgatataaaatattctttgattggatgaaacaacttatataaaaaagtttgccaataacatatcccttccaaaaaaaatcaacttctaataataaacctatattagcatttgtttaaattcatcatcagaagttggtttttgagtatgcacttaacccaactctatttagggtgtgtttagttcacgccaaaattagaagtttggttgaaattggaacgatgtgacggaaaagttggaagtttgtgtgtgtaggaaagttttgatgtgatggaaaagttgaaagtttgaagaaaaagtttggaactaagtaagggcttaaggcttttcttgaaacatactctaatagcgattttataatatttcatacaactatttccaaactacaaaaaaccatcaaaaatgtctccaatcatagaagaggccagtaaagaatcacatagtaaacctcaaccagatttttcacctaaggggaattacacacgcacgtgcagccacttcgctcctactccctctgtcccacaatataagagattttgaatttttgtttgtaacgtttgatcactcgtcttattcaatttttttttacaaatataaaaaacgaaaagttgtgcttaaagtactgtagataataaagtaagtcacaaataaaataaataataatttcaaaatgtgtttgaataagacgagtggttaaacgttgcttgcaataactcaaaatcccttatattatgggacggagggagtatatacttatggatgacctatgggtttttttttcacaatcttacctatccctccaaaataaatagaaattcagtccacctcattttaaaccctgctttcaaattttgtaggctaaaacattgatccttttccccgtaaaaaaaatatattgaccccttaaccataaggctatactacgggccaatttgatagagttccaactcctatttaactataggagttgggttctaagttgaattttggagcatcctaagctcagggcctgttgtgtacagctctagctccatcactcctggagctggagctcagccaaatagttttagctccacctaaaatgggagcagagctgggtggagctttctcacaaaatgaactagagtgccacaactccacttcagacccaactcttgaagctaaatttagaatttggagctctactaaacaggccttcagctccatctctctagttcatttttgtgagagcgcatcatccgactccactcttattttagatggagctgaaactatttggttagtccgagctggagcaaaacataagccacagaagatccctcctacctctccaaaccaaaccaaaaataattctcgcccgctagcaagtgggccccacatctaatcatacatgatccatccgttcccctactcctattaaagaggagggggtaaagccctggctttcctcccccaacaactcggccaaattcaaagcaaagccgccattactgctcctcttccattccactggggacgtacgagctccgcgcatcccttccattccattactgaccttggctgctgcggctgcagtgcagagggggtttggtggtgcggttgatttgagcaataaattctctaggggggarggaggtatcggtc

SEQ ID NO: 5479 - DNA, 2000 bp, Oryza sativa
cctttccccatcgcacaaaaacagcgggcgagggctgcaaggtggcactggggcgacggcggcggcggggcggccagatccaccctcccccgaagcagcggcggtktcggcaacgctggaaaggggcggccagatccacccctccacggtcgaggccgctcctctcctctcgccgcgtcggcttctctcatcttcggcagcggcctctccgctaaccctccgcccttgcctttccctctcctctctgaccgcggtcgatcaagcgaggacgagcaaaagcgcggcggccatctcaagcgtcgagagtctagcggagccagagggcaacgggcagccgtggcggcaccacctctctctccgtcggtggcatctctcctctccagtgctgctcctctctcccctcttccctcggcggtggcctgcagagccgggggcggcggcggcatcggggaagagcggcgaacggcggcggtgccggcgacaagccccatgacggcgtcgctcctatccccctctttcccccggttcctatttcgcccccatccccccacacaccctgacaaatctgacgaggtacccatggccaactttggctccccgaacttcacttggttagggcatgttaaatggagaccattagtactagtggtctcaacctgccacataggataagacaatatataaactacaccacctacaatggagaccagctcttaggctgtgttctttgctcagggtttccaactcctgtccctcgtattccgcgcgcacgtttttcaaactgctaaacggtatgttttttataaaaaaaaaatttctatatgaaagttgcttaaaaaaccaattaatcwattttttttaaaaatagctaatacataattaatcatattataatggaccgctccgttttttatttgagatgggttcccaacccctctccaacgaacatagccttagtgcattttatatttcagccctcggtaatttaagtgttagtgcttatgatattttttattatcaaaccgattggagttttgtattttggaacccataataacaaaaagaagtacatatacaccattaaaccatatgaacccatctgtcaactacccacatttacaatttcttggctcaacccctccctctccctgtccgcgtccccaccttatcacttccccaccggaaccgtacaccgtttctcggtgaaaaaagcgcgatcctctctcctcatccatcgccgccgacgccccctcctcatctagcatcgccgcccctcatccttcagcgccaccgcgatctctcaacggcggaagacggaaggccgccccatccgttgcgcctccctcttccaccgccggcctccacatccggcgccgcctctccccctcctccccatccaccaccgcttcaccctcctcttcgagcgacgagattggtggcggcgagcttcgagcgctgaaggccgacgagctccgtgcggcggagggtgaggaggtcggcctctctccttccactgccgctgcggttatctggatctggtggccgcacctcgccgtcgcttctctgttcctccatcgccattgctgctcgtcaagggaaccacgcccgcgggggaacaacagctcggcccaaacgcgtggctcgagcagtgacgccaacagtccagcgtggtgcattgaacatggggccttacgggagtagtagaatgctgtgacgtggtatgctggggctgaatgcacatcagcacatgtatgaattgtgaacggggcctttagaatagaagacgagagagccaagcaagaaagccagccattcgccagcggttcactacaagtagccagcgcgccacccagcagtttccccaccaactctgttttccttggccctcctcgtctctggtcaaccgggggcaagtctgactgcgtccgcatctttgctttctctctcttcttcttcttccgcgcctgtttcttggctcccggccgaggacggcgggcggg

SEQ ID NO: 5480 - DNA, 2000 bp, Oryza sativa
cattgattttgtgcccatcgtttgacaacaaacacagccaaggacgccaccacgtcacggcggcgtcgcgccgggagccgagctcctgccacctcctccacgctcgtaaaataaacccaaagcgcgacacgcggcgccgctcagagcgcgacgcgcccagagcgcgccacgccgcgcggcacctgtcgccttaaacctcgcacttgttgtccttacgcttcatcacccgcgctcactttactcccgctccgaccaagccaaccaacgcgacgtcgcagccagagcgcgaaggaatccgcaccgggcgcgcggcgcgccaccgctttgatcactctcgtcgcgcgcggggcggccatgtcaggcggcgtagggccgacgtgcgggggcggcatcacgctgccgtcgacgggcgcgccgctccccccgctgcacccgacgccgacgtcgccgacggcgcggcctcaccaccactactacctcttctccatcaagcagctcaactcgttcggcgccgcggccgtgctcgccttctccaccaccgtgccactctccgacatcgccttcgccctcctcgtcatcccttacctcgtcgtcctctccgtcctcgccttcccgcagaggcccggcaagcccaacccgggcgcgccggtcttcctcggccgcggccgcttcctcctcagggcccacgacgcgctcggcttcctcgtcggcgccgcgctcccggcgctctacatcctcgacggcctccgctcgggcgacacggcgggcgtcgccgcggcgtccccgcacgcgttcctcctcgccgcgcaaatctttaccgagggcctcgccgcggcgtggcccgggaggttctccctccccgtgcgtgccgccctggtggtgatgtacggcgcscggaggatgttcgcggcgtcggaatggctccgccaggagatggagaagcgggaccagttcggcggcggcgtcggcggcgcgcccgccgtggcgagccgcagggtggtggcggggagggtgctggcggtggcgaacctcgcctactgggggatcaacctcttcgccttcctgctgccgttctacctgcccaaggcgttcaacaggtactactgcggcagcgacagcaaggaggacgacgccaccgccgccgccggcgccattgacgccgacgacgccaagaagaaggattcctagagtgtgtttgatcgttcgtcgctgctttctcactcgcgtttgtgcagcttggtgtattagctcttcttcttaattttttttttcttttgaaaaattcacgcatgtattagctcttttttttctcgaaaatttcacgcatgtattagctcaacttgcgtttcgtttggtgaagacaaacttttgagtttgagggtgttcggtgtaaagagatttttctttaaaaacagtaaattttatagaaccatatatcctttaaccaagctatcacaaaacttaaacaaaatatttaagcgtttattagaaaactacagatttgacagtatcacaaaactactgatcattatctttagaaaaatcacaaaacgactgattctactgatttttgaggagaattgtgcagagttcaattctctgttttaccgttatgttggagatgtagttttgtgattaaaattgtcactaaacttaccattttgtgataaatttgctacttagttttatgataaattcgatgctaaatttgaagatctggtcttaataaatactagtatatagttctgcaatagtttgttcagttttactgagctaaattgtgcatcaaatccttgggcctaatttgaatgggccttagttctgggccaatccacttgtatatgcccggaaaactgaactagaaggccgacccattcacgtagatgggccggaatgaaggcccatacaaacgaggcatgctctgtttgctcttagatacggcccatatatgcagaatcgtttctccgcgagtccgacacggcgacacaatgagtgacgcc

SEQ ID NO: 5481 - DNA, 143 bp, Oryza sativa
amctttttcggttcccccaattaaacctcaaggttaacccgcggaggccgaagcggagcccgaagaagaaggagggaagggcccgtggcataaggcagcagcgattctcgccgccgccgccgcccgccgccggaattcccacg

SEQ ID NO: 5482 - DNA, 2000 bp, Oryza sativa
tcggtttgcgccgtaaaccgtccgccgccgctgcgagagtgcgacacctcttcgtaggtttgtcctgaaaaccttccattttgcccacgagatgggtagctatcctcatatcgatctaaatcggactagaggctgattttgatctctaaatcggctccgctagccggtttagctgtttttctacaaaacccatcttgatttggccctttggctagatcgaggtggttggcgactccatatcaccgcaaggcgtttaggtgttgcgatcgtgcttgtcgacttgtcaaaaaagttgccaacagaaaagattagtaatactagccgttatagcagcaagttatgttgcgatggttcaggcagacagctacatgattcacagtacatctgaaattcggtgaagttcggcaagtttttttgtagagggcctgatgactgtagtccaatttctagtatgaaaaatagagcccaacaaggttttccagcaatttacgactcatatattcctatagcatgtggattctcgtgtgtttctaacatataattccagatgataatcgttaaaaatcacatctaaaagtaataaatagttaaatatctctaattttgtagttaaaacttatcacacaagggtggtaaacgatagctgggttgaaactgaacacaaccacttatccataggagtgcgttgtcattcgcaggggtggatgaaatgttttccatagaccgaaatatttttaccctataaaatatttgaggactaggtaagctcatgaaaaaacccattaccaccaccggtcatccagtgatattatgccatgcataaaacagaaattttgaccactaacccttaagccaaacagcaccatatatacacttttaatagtccctagcagtggcagtgaatctgtcacctatatataactgtttttacaaattggctcctgaatattatggaatagcataaatatttcgttcaaacaattaaaaaagttgtactaacatatttgacaattttttaatattatattatattttatccatagcaaatcattggtatttttctagtgaaccaaaaagctcccaaccacagtagacttcatcatttcacttattgacggaataagcgaaacaccatatttgcaaacggaaaatggtttgtaaataaaacttttatatacatgttcttagccatctaaaagtaaaggttgaaaaataaactacgatgaaaaccctaaaatcaactccaaatttaaggttgaaaatttaaattttgtcttataagaacaagtataatccaaaatataggactagcatagcatggcacaaagggtttggttagccagaaggcacggtgtggtggtacaatgctgccacgtcatagtcaatgggcatagcatcactttactactatggaatgtccagcttcatggactattacaatatgactatttttggaatttcaaaacataaaaacaaaaatcttaaaccagtattaaggcatgtacaacagtgcttaattattaacaggctctctccgttactatgcaagtaaatttggaaacatggaaggcagagagaagaggaaaaagaaacatcgttgtaatgcatgacaacatcttagagtcgactcttagcaattattaaataaaattttgttgcatgtggatggagaaaaggaaacaagagtaataaaaaaatattttggtgcattagttgttaatatgttttcttatgtcaacaattgttgcccctaggatttcttttttgttcttctcgtgacttgccactagcattttcatgtgagttctgactgctttttgatccagataatttgtagggcaggttgtagttttgggctgtcaataccaactcctccttcatattttcacttctatagttatcgtctaaaccttatccctaaattaaactattttgttctggttgatgtgcacctgaagatagttcaagtccgggaactcctgggaagcctggcagctgag

SEQ ID NO: 5483 - DNA, 1256 bp, Oryza sativa
  misc_feature (1)...(1256): n = A,T,C or G
yncaggnancttcaaggtgtknanagataagacccacgcgnantngcttkgggcgcanacccttttccgggggaatatagactnccccgtgggacanamagcnaawaacwtttcyggcaacanaggggaayttgggtgttcccccgcgttrwaccgggggrwwatgarrccgcgggagaaaaacaagtttttttacttgtgctnnccctnraaattggtaaatagyttttantntatatggcgtttgtttgcttkggttcctttgggagctatcgttcgtsgtngtggtggtkggtggttgttcgggstnttgctgstgstggtwcgccgccgtggccgssgcggaagmsctgarcctggamgtcccacaaccggtaatcggcrgcggtkccccgttggcggccgnwttackgccgccacacgggacggccgagtactacgccgcgcttgccggccacgacggcctgcgccgccggtcgctcggcgtcggcggcggcggcggcggcgccgagttcgccttcgccgacggcaacgacacctaccgcctcaacgatttcggattgtaagctcgcctcggattgaatctttgaattatctggtttttttctcttgtttatggtggattgaagaaggcaaagtggtggttgttgcgggtgtcccgggttggttgcgcagtttgcattacgcggtggtggcgctggggacgccgaacgtgacgttcttggtggcgctcgacaccggcagcgacctcttctgggtgccatgcgactgcctcaagtgtgctcctttccaatcccccaactacggagtaatctcctccctcttcttctttttcctctagtttttgttgcaattggtttcaaaagtttgttgttctgttagatattttaggttgttaggataactggataagtagtagtctagtagagaagagaatttcactttagggattggggaaagttgttgtgaatggcataataatagatttgttgctaaacaaagatgaaagtggtactagtagactactagactggtagaaaagattacgacaggattatgagcatgtctataaagaggagaaaatcatgaaggcactgcatgtgcttgtgtgcttcttggaagcctttctattagcatgacagcttgaactgggacctcgttcagcttaaagaaaatagccgaatcttgtattcttccgtgcactcttgtcagaattttgaaatttactcttgcttatgggaagctgctgaatcatg

SEQ ID NO: 5484 - DNA, 2000 bp, Oryza sativa
tctcgggcagcccggtaagagcaggtacaatagcgggctattagccagctataaacatattttagtaagataaaatatgagagagaaaagcaacgggctacagatctgtagccaactgtaacacagactccaagatgcaatgtgtgtatgacaggtgggaccatatgttaatagtatagtaagcaactattgtatgaattggctattaaatcggctatagataaattgaagctatagtggactatactattgaacttgctctaagtcactattgaacttgctctaagtccactgccgcgtccaagccgagctcagttaagccatcgcccggcttcagtaaaaacagagttagggtgtcctggaaggagaaaaatagaatagattgagaacttacacattagcacatgattatctgggtattaattaatttaaatttaaaaatagattaatatatttttaaacaactcttctatacattttttttcaaaaaacacaaaatttaaaattcaagaagcgtgcacttgagaaaaaagataaattttccatctttcaggctcagccgcccaaaacgggatgactcatgatcaaatatttaattaagtattagttattataaactttaaaaataggttcattcgaatttttaaagaaacttatatatttatttttaaaaaaaatacaccgtttaacgattaggaaaacatactaatcgaaaacgagctttatagccaaaccgtttaacattttagaacaagaaagttaaacgttagtagtatgcattccaacccaaaccgaaccacagaccacatacgatgctctgttcttctctttccggaatattaggtgattctccgcgctttattgcgaaaattactaacttttaataattttttaacaatcgagttaaaagtaaaaaaaatattagttatcaataacaaataaaactgatttgtcaaactatgttaagagagaaataaatttagtagactctatgagattgtagatgaaatatgatatcccactttgattatatggatgaatatatgttaacaagtattataaaaatgatggatatatatatatatatatgtttaaaatatcgtgaaaaataatgtgaaggaagattattggacgttgatttgtataattcaataaattatagatgatgttgcatgcttacataagttttgtatgtaattattgctagtggatgatgatgtatcatatctgtatgttgagttttagaataagtgggttaactttaccgtattccctccgtttcaagttataagacgttttgattttagtcaaagtcaaactattctaagtttgactaattatgtagaaaaaaacagtaatatttacaacaccaatataattttattaaatctataattaaataaatttttataatatatttgtcttaggttaaaaatatttctatttttttctataaaattagttaaatttaaagtaatttgactttgaaagtcaaaacttgtaacctgaaacggacagagagaataggataggatagccatcggctgcggcgaggtaacttggtaaacggaaattaaaagcggccaacatcacggccacgaggtcgccccgttcttccatgttccaaaaatccaaaccacgtcgcgctcgtgcctagcctccagtctccctttcatggaagcttctctcggccatgcatgcgccaaaaactcaagctggttgttctgacctccaactttaccatggtttataaataccgatggccacctcgttctattatctccaaacaagccagctcaatcaatcatcgagctagctgagctagctaagtgccatattgcacgtactcgttgtctgtccgatcmtycttttycttttcttgtgggggtctgtccgatcatccttgcgtggctaggcaggtagagtagctacctgctcggctgctcgcgttccagccagggtccgggcttcggatatcctcggagtccgacaccaaatca

SEQ ID NO: 5485 - DNA, 2000 bp, Oryza sativa
ttcttagaatttagagctctcaaacaaggctctcagcacaaggctgttttctttcgccgaaagccgtttccattgcatgaaagcggctttctagtacagtcaaatgctttgctgctagggtgaagtgaagtccatatctcggacgaagcggcaggctgtttcaaacttctcggtcctcgtgggttttgatctcattttaaccgcgcttcaagattggtgcgcccagctcgagatcaacccaccaccaaccgtccgtctcacacatggagctggcccgaattccgatgccctcgccgtggtgctttgcgcgcctcgagattagcggcggaattatccggagccaaagctgcatcgggggcgcgggccgggggacagggagtgattgaaggctgcgaaggttgtttcctgcctctcctctctctctctctctctcagactcctacttggattcccaatctgcccttggcgaaatcaacggcacgcaaacatcatctcttttttctgtatctgctctatttacagagtttttgctggaattggttaaatcctgaacttatttttgtttccttcgtttcagattactcattattttagcttttttttttacaaaagtacttgttccgtgtgaaatctagacaaataatctgaagcgaagggagtaaattcgtttttctccatattgtaaagaaaatctgaaaccatttgcaatgacaacaataggaatactaccccagtactagtgaacagtaaagtaattagtgctactaacaaagctacaaagatgggctctgctcttttaattggggttacatgaggagggaaggagaggaacagagggtccctagggtgctgcagctgcacacaaaagtggacattgggtgggtcaaaactgggattaaatttgtgagggtggtggccttgatggaagtgaacaagtgcaagggaaaaaamcaagaaactatcttagggctagggctgggagaccaccacgccacagtagtagtactccagtaccactctctgagctcacttgcttacttgtttatgcacttctcttctttacaggaacttgtttgttttgcagccaccaccaccaccaccctccaactgtccaaccccacacaggtcagcacaaggcatgggggagcttagctagctttgccttttgccttctccatggctccatcctgtgagcacatatactactaatccacccctaatccgttgcagaaagcctttgctctcttcttgctttcctcaaatcgttgtgtcaagccagcagctggagcagagcagccatggcttcctaggcctacctagacgaaggtactaccttggttccttggttttcaatgctctgtgatggtttgactgactgactgactgtgattgccactgcctcctcgtttgccggcttttctttcttgatctgcttatgcaatgtcgtcgcccgtcactttctagacctggtctgttttgtttccctcgctttttgttcatccagttgctccgggagttagtgctcatatgatttttatgcgctttatcatgcgcaccgttttctttttcttcgatggagtgataaagatggggcttgtgatcttgccgctagctttttccaggtttgcaccattttccgtcggtatttttcttgtttttgtgggtatttagaagatccccttttgttttcgttccctggtattggccctcatcccctctccctgggaagaggtggtttcgcagtttgaggttttctctgatcatgttaatttcttctcagttgcatttcttggctagttcttagttcttttgttttcatgtctggtacgttcatttgatatgctaatgcatctctttttgtgatggatttcagatgcggagttaggcacggactcttttgaccagcctggatgttaaatcagtgaacttccttggatgcttaaagaaagtggagtgagcttttctctagatttgcagttgtacaagcaatattgaccatc

SEQ ID NO: 5486 - DNA, 2000 bp, Oryza sativa
aataactattttcaatttaatttgttatttttgttgcaatttatagaagttgaatttggtcttgcatgcttgtggagtaatatattctgtattaatctatgttgtcatttttttcaatttttttataactatttagatgatatgcaaactatgagaggatgtcccattgagagatgaaaatccacgtcccaatatcttcagttttttgttctcaactgtgcatatcgaatagatckgtktatacgtgtttttacgccggtggggatttgaacagccctcgacaattcggcctttcttctccagtgtccagattacctggatcatcttcagaacctttgctagtgtaagcggactttatttgcattgccccagatatccacggaggcctagctgcctactcttttttcacatacgcgcaaaaaaatcacgtcatattagaagaaaaagaattttagttacacaacacaatcagccagaccggcttatgttaggggaagggagaaaaagcaaatgaaaaataaactgaagcttagagaaactacggtggctaaaaacagacttcaagcagcgggaaggagccaagccacgctacactcctaacaaatcctcaaaaacggcgacgccagttaaagaccacatatggcattccgaatggatggactccagaaccacaaaaactgaggagagaacggagtcgaaaaccctagagtttcgctcatacagttgccaagagaccaggagcaccaaggagtcgaagctgtcacggaggtgctcaggtaagcaggccctggaggacggccaccagtcctggaaccagctgccacgggggagagagggcagcccagctaggaggcgacaacactcaaagccagatttgccgagcgaacacgtggtcgaggaggatgtggttcgccgtctcgagatcctgggcgcaaaaggggaaggccgagtgactatcgatgccacgtttctggaggagatcagccgtccaggagcactgttggaatgcaaatcaaaggaagaacttgcatttggcaggattctttgcgtgctagagaagatcagcacaagtaaaggaatgctggccatagaagaatgcctggtacgcctaacgcgctgagtagcgctggtcagccgtctagcgccaaacgagacgaacacccggtgagagctgtacgtgaagcaccgtatcccaaataaagagaaactagaaaatgacaggacaacgaggacaccgtggatattaaagacccataagttgttcgtcaggcggcctagctgcctagyyrmctmrkmwwcwsmrwtymrgmrwwsakkwswrgrkktykrkrrrytkmtmrrmkkcwcrsmrgswcaccagswcryswgcamgykwgmrmtactgagctactgagctaactaaatacgcctctgcagagtgtcgtagtatgccacaccggcacggttgtacatcggctggccgcaacagcgttgcacggggaaatggattagacgggcttatgtcggaactcaggaggagctctatccactggaagtcaggggtggatctacagtataaacatcggtgtcaggcgacaccgacgactttcggtaaaacctaaaataaaactggttatccccatatactataacattatgttctaagtataattagcatactatgatatcgatatacacgttatgatactaacaaacagattttctggatccgccctgtaagtccacggccacctactccatcgtccacgttgcgcgaccctaaacgctytccccccccccamacctcagctagcatgctgatcgatccgccgtgcaaccgcatccacagtgcacgcacgcagctacaaagatgtcgtacgaccacgaccggtggcttgtctgctctacgttacactgtgcgtggcttgtctctgctctatatgtgtaccgcgtcgtcgtgtgcacacacacacacacacaaccgtactgagggtggcgcgcgcacggggctgaggagcgaa

SEQ ID NO: 5487 - DNA, 2000 bp, Oryza sativa
gttgatgtgttgttccattccctgtacggctgagggtgcaaacgcccgctcttgttcctgtcaccatgtcccattcgatcgttttcctcctagtacagtggacacgcagatttactgtagatcctcgaaatggaccggcgcggtaacaccgatcgtaaatttctcagtgaaaaaaaaatgcaatgtaaaatcagttaaaacatgtggccaaaagatcagactctgctaattacagccttacaggggggctcagaaccaaacaaaaccatctctagccaccaaaattgactcacgagaggttaaaacttgattgaaaggaacaactcgatcgacagatcgatccgattgatcgatcgtatcctagctattagctagctagctactacttcatgagacgcgttaattgaaccgatgttaacgaaaataattgggtgtactagctagcacaagtcaagacacgggaatagtgatcgtttctacgcctcgacccgatcgatggatgattcgatggacgacacgtaaaacacgtttggctcttcgcgatcacagaaaggggatagataggccgacacgcgcggtacaagctggattagtacattattgtctccacatgtatatatgataatatgattattgctgtagcccgtaggtctatccagccgtacaagtaccactatgtatatatacgtacgtaccctgtggatcaaccacaaattatttttgtgacgtgctaattttataaagaggttttggaaggatttgctaattatattctaacgagcttatatggaagatgagtcgacaaatgcagccaacacgttcacatgattaattacgtccagcccggcagtctatatttcgacgtgaagttaattagctagcagaagatcctatttgtgggtcgtgtgtgattagtaaactgtctgtgtgtgtgtgtgtgtgtgtgtgtgtgtgtgtgtatgtatgtatatgtatatgtaatactgaacacattttaaakggatttttagttagagccgtgttagattttaaatggatatttgggaacactagcccgtcgtcagtcatcactttactaatttgaactgatgtcgatcgtgaaaaattttaaaccgatgaaagggtagaattcctagcataaagaaacttttcaaacttacattacattactttaacttgcaaataaaaaattctacaatgctaaaatgtcaaatattcttgtggaaattctcttgtccgtcaatgccccgcttgttccatgcatgcatctccagctgccggctcacttgtattaaggaagaaaaatcccatttctcctttcagtccctgtccacttaccatttccttaataccctcacactagcacataattctctctgatgatctggtcaggtgtggcgctgcacactactgtgtcgacacatacccaagcagcaacaaaacaccccctctcctggatttccattttcttttcgtccaaccttgataatacatttttataaacctattcatgtcgtatattacttattaatttctccatcagatgagaaattgccgttgattaatccggagacgaacaactacacaacccgaccggtcgggtaattaaaaccaatttagctctcgttcgtcagcgccgatggctaagctcgctgccggggcgcgccggccgcgcgtcccgtcgcggggcccgggcgtccgacgtggccgaccaggcgggcccacgtgccccctyctcgctcgggcagtsacgcccgtgtgggccagcctgcctccccagtccccaccctcaccggcccgcctcgctcgcccgcgcgcgcgcgcgcgacgtgcatggcgcgcggcctcctccccccctcccgccgctatatatacccctcccttgcaaccgcytcctcatcatcgcacaytccaagcttaagcctaagcgagcgaggaaaaaataggcaaaaagctagcccggcaagcaacgccaaactaattaggggagagagatattc

SEQ ID NO: 5488 - DNA, 2000 bp, Oryza sativa
tccctgctttgccgagtaccagcagccacgaagaacgttacacaatcgagtacaaaatctataagagcaagtttaatagcatagccaaatactacctctaaatcatctatagccaatttaatagttcatttattcaataattacttataaacatatactacaatcattaatatatggtcttacttcttatacacataatattttggagtccgtgttacagctggctataaatataagggattttggttggatgtggtacatcctattataatgaatctagacatgaaacctgtccaaattcatcgtgctaggatacgccacatctaaccaaaatctcttatctttagggatggagagagtaataattaaatgaagctaggtagagtttcccggtcaatacgcttgcgtgtgcttataagagcatggccaacagtttcccgatactcttcccaatatcagttttgaggagttttgttggaaaaaatcgctccaacagtagacctaaatcacccctaaaagcttggcgtttccaaacccgcatatttcgttctccacttgtagggaagagactcggcgcccaatccttcaaccgcatgcacttcgcgcgcgctgtgtgaaaattttcctaccaggttcttctttgtgcgttcgtctacctgtgagtcaatccatcacgccagcagcctcatcttccccgcagctgtctgggaaagcagccatggctcccccaagcttccccagcgtcgacatttttttctcagcggcagcgccagacccatctccaacccaattgggcggaccttcgtcggcgctcccccagcaccaccaccgactcgaatcggccgtcgcccctattcatctccaatcgtccctcgaccctaccgcatcctgcagcacagcctgtctctcgcgtcagactggcgctgcgctccccccggtaatgtgcaggcgacaaaggccccatgcgatgcgaccagcagccggcgacaaccggaggtgcccagtcgctggccttcatcgaatcatcgtgcacctcggtcggagtcgatttctgattgttgctgctgctcaaatctggagcttgctattgctgagaactgcttggtggtggtactggaaatttgttgtttgctggctgatgaaaactgttgttctttgctgctaaaaactgctgcttgctagtactgaaaagtactattgcagctgctgaaatatcttgctgcttgctgctgaaaacttcaagttgttaacaccgttcacactaaaaaagctgaaattttttttctgggctgaaaaccccattgttgatgattgcagaaccaatatttttccatgtaaaatacaggagatcgtggtaataatcaagtgaaatatcattttggggcaaatactcagatcgtacctgaagccaatggaaacattgttcaatgcttaaactgtcagttatgatgtcaaagagattgatcactgaatgtcctgaaaggagccgtgaggaggatgcagcattgcagcgtgcgcgagcgtgagtggaggagaggaatgacgattctgttggtagttgtcgatgtggcctactttttttgttttgaggattaaattttgggaatctcttggagataaaaggtattctcataccttaaatcctttttagagatctaaaaaaaatgatttaggggattgaattttgggtggctgttggtgatgctctaagttgcacatcctggggaaaaacctccctaatccatcagcaaaccgatcaaccacccacgacaagtcgacgccaccgttttttttttctccctcctaagtcctaaccccacaaaaatcccgcgaactttcgtctcaccacgcgccgcgtgccccctacaaataccaaacaacacccaccacgtccactcacaaaccacgcaggaaacctcagaaaatcaccgtacgcgacgcgggcccaagaaaaccccgacagaaaccgcgcagcagcaacaccaccaccggcgtcggag

SEQ ID NO: 5489 - DNA, 2000 bp, Oryza sativa
gttggtttatttgggacaggtgggaggttggtaagtgagaatattaaatattgtaatattttgtaaagagaacttatgctctaagtaagaatattaaatgtgagtcatgagtcaacggggtcaagcccctacaaaagccaagaaccccaagcccttccagctgcagacttgcagtgcctcgatcagctcactgtaacaagatgggcggcgccttctcgacgtcgaagccgaagcccgccgccggcgaggagggcggcgagtccgccgtggtggccgtccactccaaggccaagtgggacgagctgtgggacgcccacaagaacaccacaaagctggtattgatcaatatacgccctccgtttcataatgtaaaactttttagcattgctcgtatacgtatagatgtttataaatttaaatacatatatatgtctagatttattaacatctaaataaatgtgggcaatgctagaaagtcttatattgtgaaacggaggaagtaatttatattacccttaattgtagtatatagttctttcttccgttaattgatcatctttttctcttctcttgatccccccggttaattaaaggtggtgatagacttctcggcgtcgtggtgtgggccgtgcaagatgatggagccggtgttcaaggagatggccggccgcttcaccgacgtcgccttcctcaaggtcgacgtcgacgagctcgcggtacgtatcccggtcgccggccggccatggaagttctagctctcgtcttttctgaatcgaacagctgaagatttttctggttgatggagctttggccatggaagttttaactcgtcttctcggagatggattctatgacgtccacctgtttattgcatctgtttattgcatgtcaatttgatggttacgaaaattttttaaaaaaattaacaagatatattaatatgtaatatatcactctacaaacatgctagttcaaattcaacttctataagttgtaataaaaacaacaaatttaattgtaaatatgcaatagtaatttaagttttgcttgttatttttgttacaacttgtagaaattgaattttaagttatatatttatggattgatatattacatattgatctatcttgttcattttttttctaatttttttataactatttagatgatatgtaataaatgaatggagtaccactcgaacggttaaaatagtttccctcgtcttctctgaatctctgaacagaacagctgaagatttctgaatgatcgcaggaggtggcgcggacctggcgggtggaggcgatgccgacgttcgtgctggcgaggggcggcgaggaggtcggccgcatcgtcggcgccgacaaggacgagctcgagaagaccatcaacacgctcaggtcatcgtcgtcgtcgacggcgacgacgacgtgattggttgggagatgcataaataaacatgttgtcatgttcatcagtcatcaccacctagctctgctgctggttaatttaagtactaccactaccttagttaattagctctcccggtttgcctaataaatattccgcattgtaatatagccaacttaattagttcgtatgttcgcgtgtgttgtgatcgtctgctagttatgtacagtcttgaagcctgagtgctggagctaataaagatttgcataacttggattggattttcaaatcttttttacaccatgaaatttgtctgaaatttactcgtctttttgaatatgagtgtctagttctcaaccaaaagaacagaatgtgtcaattctgtttgtgtaaacgccgcaactcaatgcccaattttagatggtcccacctgtcagttgacaacagcagcagctaattagtaattgctaccagttcttgttacggtaacagtgttacctccgacgctgacacttgggtcccacctaactaactaaccgcaaacccagtcaaagtccctcccacctcgcgccaagtgtcgccgccgccgcgac

SEQ ID NO: 5490 - DNA, 888 bp, Oryza sativa
attgtttattatcccagggtttcaacaggcttaggratttaaattttttttaaggttttcacatacatgcgcgtacaatattcgtatgaacacgcgcacacacatcgttaactcaccatatacatctcattgcatgacactgagacgtaaatacgagcataggggtcattgaaagaataataacaaatcgtaaatatgagcactcgtgtcaagtctaattcataaaaaatctaacaagttaagttgcctgttttcttccaaattataatattaatagctataaaatctttttttactggttaatagctataaaatcaatataactatataacagaaaagtgctttttaatatagtttttcataacttttaagttaactaaaccattgatcaaaatttataaataaatcaagccaaattgtgtttccgtgaaccgaaaagtttcacccaaaaaaaaaacgcaaacgcaaaattgcagtcaaacccagggggtcaaccgaagcatacgtttcccgtgggcagaggtgaattcaaagcaacactctttgcaacgccccccttatttttcaacccaatttcagtcatttattattattttcttttaaaaaaaccctcgaattttaagctcgacgcgacgccgcgtcacccacccaacccaaccccgccttcttcctcttccgcctcgaactcctcttcctcccacgaaatccctttcaattccgccaccgctataaattcctcatctcctcctcctcctaatcccagagacctgtgtacgcgatcttggttagctccggcctttgatcttgaccaccaatctcgcatttcttggatcttctcgtcttcctcactcctcgatcgatccatcgattggttgctggtcggagacc

SEQ ID NO: 5491 - DNA, 2000 bp, Oryza sativa
gtccacgcgcacacggccgccgccgggaggaggacagggaggcgcgacggtacggacgagacgagcgccgggcgccggcaagccacgacgcgcgtcgcgtctcgtctcgtggcgcaccgattagcaacgacgcgtgcggtggtcgttacgtgtaccctttgcggaggtagccagcgggccgcgcctcttccgtgcgggcgaggccgcragaggcaatcgatgatgtgtactctctcsgtcccatccaacatagcaacctaaaaccggatgggatagaacacatctagtactatgaatctggatagaagatatgtctagattcatagtacttagatgcgtctaattcagtactaagttgctatattctgagacggagggagtataattttacatttaagtttaagtaaattttagaaaacctcatattttatattcaaagttggagaaaacgcatgtattatgacatgcaacacttaacactatatattatgattctaaagtttcacaaactcccgctcttatacatttgagcgtgaatttacttaaaattctaaaccatagagtttatatgaaatttataattattaagttcttgacttggaatagtttaaatcttcattactttaaaaaaatgtttaagatacgatgaagttaatcaagatttcaataaaggtgaggttttgtgaaacatttagatcagaaaacatatgattttgtgccacacgtcgtaataccatgtgaacgatgtttaattagtggccgactggccgtacaccgtgggacggtggaggaagccgtcgccggcgggcagccagtaagtactttttgctagggagcatgtgacttaggatgggccgacagcccatcatggccatcatatgggccgcaagccatggggacgatggagtccggcctggtcgaaacggaagaaaacaaagtgcatgaaaaaccaaaataaagagtaatttttattgacagaactgtagatattgaaaaagtctttttttttcaggttttagttgagattttacctgttgtagtgttgtttgccaaaccgaatcgtttttcttttttttaaaaaaatataggccactactaggaaggatttgggctaagccaaaatttcttaatggtatgtggaccatgtggtgactaatagtgaagtcgaattaagaaatttcggggctgtttggttcatatacttacattgtttagggttgtcatagttttcttgccaagcttgtctaaggttagacgaacaaatttagtaccacactttggctagcaatctataacattaccacacttctctgagacaatgacatgtgggaccaaagtgctataaaaagaatcttgccataagtgtagcaatggaccaaacgcctggctaacttagtcaaagctgcctaacttgaggtgtggcaaagtgtggcaacatgtggtcatgaaccaaacaaccccgattcttgtagccttatagttataggtcactgtacggtgaggcgtaaagtgcgcatatatgcaaagggaaaaggcacggtttcatatgcgttatcgaaattcacgtactatctttttgctgctgcgaagtttgaatttgaatttaaatcaaatttcaaattactacaaataaaatgtaaactaaaacgacataaaaacaaatttaaccgccttgtctttttggtcaagtaatttcgtgttcgtgtctttcttttttctttcttgcaggggacgcaaaacccgcttagataaataataatcccaaaaaaaaaacagcaaatcacgcctccgcctcgtgctcccccccggtcgcgatctctccccctsgccgccgccgccgcgtttcccaccatgcgccgcttcgtcgccgaccgggcgcggcgcgcggtgacctcctccgccgcttcgatgcgcgcggccgccaccagatcagccgcgccgtytgccggggctgccccctkggsgcaatcccgccgccggccgcggcggcggcgctggcc

SEQ ID NO: 5492 - DNA, 2000 bp, Oryza sativa
agttaactttatctttggttaaatctttctgttttgttatcatgttctttttcccaacacgtctagtcacactcgtagcatgtgtgatactaactgttattttggttcaactaagcatttaagcataatgtgctctcatatgcattttatgcaaaaatatcttgcgtactgaggtaccaacctttgagtacatgagctactagctggtaggctgaaggtgcaaattcaaataatgtttctcagaagcatctgctctcctataacaggcaatccgacatgcaacttaacattctctttctgcttgtcttcagtccatgatggatcctgatccagtgaggcggccatctgcgaaagaagtcctgagacatcccatctttgataagcttcacaaggccccagcgaagaaatagaccgctgcacccatcagatcccggcagcgtgaagctgtgtcaacccaatcagctgctgccaattttgtacatccaccaagagaaactccccaagggtgaactacttgtctccagataggcagattccgtgcactagtgcttttgccctgatctgattttgtataggcaatatgaacaccaagcattgattcgatttctttgccaggaattcgagcaatgtttgtaagttatggatattgtcaagccaagtgcccaagtggctttggctcccctgacgtttttggcgtgttctgagtttgtgattgaaggatgggggcatctgccgttctatgcacgcccgactcctagtcgtggcttattttcctttggatttgtgcgtgctagtctgcttgaatgcgatttgttatggagaattactgagtggtgtgtctgctaatcaagtttcagtggatgatatttgtctttagatcaagtctaactcaagatttgacaaccttttgtttacgaagataacctatcaaatttaaaacttgtgcggatcataataagaatgtaaaagaaaaaagtaaaaatgtacttccccttgctataaattacttgtcattctaaatttgtttcgtgtcaaatatttatatatttgactatccattttagaaaatcatatagtttaatatcataaggccataagaaatgttttttaatgcacaaatttctaaaagttggtggtgaaaacaaaaatatttaacttcgtataaaaacgagggaatcattttcttttcatatacaaaataaaaactaataatgttgcatgcttggttaaaaaaagggtgcggtgttatatgtctagtggtaagtgtgccatacctcttttgtgtgatggagaaaaaaaaattccctccattccaatttgattatcccttgagatttttgaggtattatcaaattgatgatcgtctaaccgttgtctgttcgtttaaccagaggattttgtatgtccgttcgttgtgtgcagaagtagatgctattatgttgtctatttatttatctatgtagaagtaaatgacatcattatacgtctttcatgcttgcaattgcacatttgcatgtctatattcataaattgtgtttaattttagaaatatgtttttttcyttgatctagcaagtgtctgtggttacttcgttaatcttaaggatttaccggtctagtattcgtagatactcatagtggtagagtttacatgcgtgcgttcataggaacgagtgtgcgtgtgttatgagtgtctcgttataccgtataattcttaaaaaaaagraaaataatagaaaggcatctccgtcaatcgcatccgtccatgagcctaatactcgcccaaaaccgtccgattttttccgcagcgacgactcgtcagtcaatcagtcgattctcacgacgacgagggcgcgagamgccggcgcggtcctccccgccgcggcggcgtacaaaaccccgggggaggagcagccgccgccgcctccgcaatgccgcttggcgtcgccggagcagcgccaccaccatggccgggggaggggtcgtcgacggcgtccgcag

SEQ ID NO: 5493 - DNA, 2000 bp, Oryza sativa
atacttcgttatttatatatctccctgatcttagtggataatacttcctcgtcagctcgtctcctagcaaccatcaaggaccagagacctgtactacgtcttcttttatttatatatctcccgccgaatgaacaagaagcaaaatgtcactttcagatttttacgacaacaatttctttaggagatcaaggcgtctttgcttctagacagcatagtgttcgtccatacctacacgctttacgattctttttatccccaattggtctgttccggcgtcacgatgacaacaccaaggccccattacatcatgcgagtccttatccgcaacgtgcatctccagccatcaactatcttacaacatatataatgctcgtttcatactacctaaagctcttatcttattagtaattagtatatacgtcataaagacatgatgatattgctactactggctagcagtgtttccctcgctaaccaccccgagatttggaccggacatctgatgtctcctgcgaacaacatgcctttttcttagtattaagcagccgacatgtctcgatctaaacatttacttcctctgttttagttatataagatatttggtcaaaatcaaactataaatttaactaactctataaaaaaagtaatatttataacactatcattttttcattaaatatataattaaataaattttcataatatactagtattggattaaaaatattactatttttttctacaaaattagttaaacttagagtaatttgactttgactaaaatcaaaacctgaaacgaaggaagtataacatttattagttgatcaattccatcagtgttagcattcctgggtgttcgccatttgggtttgggtggtcatatgcctggttcttttttgattaatacattttacctcgattgttattagcatattttttttgaactgttagatattgtatttaatacgaaaactttttatataaaaattgttttaaaatagtacattttttattttaaataattaaaacttaattagttatacttccttcgtactcatagaggaggtcattttagacagcgacacggtctccaaaacacaagtttaacttgttgtttctataaaaatatttattgaaaagtgatatatgtatatttttatgaaagtatttttcaagacaaatctattcatatattttttacattttcaaattcaacaacttgagagttattcatgatttgtattcctaaggtttaacttaaacattatcctaaacaacttcctttacgagtacggaaaaagtgcactaatagaattatggttttacatgtccaaccttaataatcttagtctacatccaaagcgtgtaaggcttttaacttttttttaaggatttaagctaattcgtacaataataatcccgtaaagtccctgtactccaaatgaccaaacaccataattggaacacaaaactgtttctctcctgtctttcgaagagaatgctttaaccagcaaacagcactaaccgcaaaactaccgcattaagcagcggggcccagctgtcacccgcacatccggggatcctgcggccgttctttccttttcggtttcatacgtggggtctgttggtggaggtgttgccagctcagccacccacccacccgtttttttcccaactcggttcctcctcccctcgcgcggctgcctgctagtacttctcccctcccccttctcgccgctctactcaattccgccgtcaaagtcttcgattgatccgatctctcgtctcgtctcgtcctccccatcggaaccctagccgcctcccgtgcccgcgcccgcgccgccacatggagccgaagccaagcacgccgacggccgcggcgaccccgcggtttaagctggggaagcagtcgtcgatggcgcccgaccgcggcggtgcgggggagagctcggaggagggtcgagcgaggcggtcggggtcatgggcttcagctgatgtac

SEQ ID NO: 5494 - DNA, 1618 bp, Oryza sativa
atgtgtgtgtatgactatttgtattatactatgttttgaaaagaaaaacagtggtgttaaatcttaaataagtttttgcrttatmamwatwtttgggtatggtggagtagctttactcgaattgattgacaacttttgatatcatgcttgtttactttattgccaacaaagtaaaactgatcatttgtgagtaagacgtaagccaaagattggtaatgctattgttaaggacgtatctacaacgagaccgttctctatatagtcataaccaactaactcaatctcatatctaattgctactagtatactcaaaagtgcatgtatttttttttcttatgraattttctcttagattagtcatycgatttacgatccrattacaccattatgttcataacaattaaatctttataacaagatctcacatgactatatttttatgaaaaaatacaaattacttttataatatatgtaaattacttttagattacattaaattacttcttagtcataaaagtaatttacctatattatagaagtaacttaaaaaaartaaagtaacttgttacgacattaaaagaaatctatacatccataatgttattcataatattgtgagttgtttattttataatcatttttagtcagtgacgtaatttgtgctgattaaatttaatttctatatagacccatgtttttacctccataacggatttatttttgatgtcgtgataaggttactttctttttgttttaagttacttttataatttatgtaaattacttttagactttactaaatttactataatatgtctaagaagtaatttaatgaaatctaaaagtaatttagatatattataaaagtaatttatattttttcatcaaaatataatcatgtgagatcttgctataaagatttaattattacgaacacaattacgtaatcggatcatagatcggataagttatttaagagaaaatttaatttgaagtataagtggttcctatttgcttgaaacataggggataaactactctctctctagcgtagcagagtgcgtcacatgccttctgattcggtttgttctggccttcttggcaatatcggcatgtggaacagatcagacgactacaccagcgtgtgggatcggacggccctagatgcgtcgcgtgataagaccagatcgagaggcttctcgagatagattttacgttttaaataagatgaacggtaaaacgttaggcatgtatacccacactcaacattcaacactggtgatcagtcaatactaacaatcaaccgtgactagtgactccaacgagcacgtgcaatccatgcatccctccccactgtgcagtacaggcagccgctgtcctgttcagtcgatcactgcactcccggtctgactgctgcacgagcaacccgactcgatggatcacgatctagtcgccctataaataccaagctccgatgaccccgggcgtgtcgtgtcggccggtcggcgtctcgtttcgccggcgcccgcgcatcttacactgtccaagccagcgcctgcgtgcaggtcgatcgccttctaaaaccggccagcgcgcgcgtctagtgcagcggctggga

SEQ ID NO: 5495 - DNA, 1106 bp, Oryza sativa
ataaaagctaggttgtcgtagcagacacaacatmaatctcttatcatggggctagatataaagcgagggacaaagctcgatttgaggttcgatttcctggatcctgatgcatacacataaaactgtgagtaaccaaaggctggggggaaagtacgtcgtagatatcatagggttgtttgctctttagctctcatcctttttccttcaacttagatatcatttggctagctatattcgcactagctaagatagccccaacacgtacatacactaattaacatggatattaattcttgaaacattaacaaactgtttacctgcacgttatgtactcgctttctagagaggccccagcagagagagcaaaacagtcgatctggagagctgtggatgaggtcactgtaccggcgaattaagagcgtgcctgccagcttgtttggtaaagacaggaggaaaccatatgtacgtatcaacgccagagaggtggggatggaagaccagaaattataacagtaacaaataatcatctgttcctactgttatcaggtcaaagggttgcccatatcaagcacatgtttcagtgttcctatccttattcttgccaaacaaaacaaaaatgataagatcagatcagctgaccaaaacaaacaagtagatgctagtagtatttaactacaagaatgaaaaggtgaacaccactacttacgtagcttgttgctaattaggcgtcaagttgttgtatttaatttacctgcatggatgttttcttttagaacactgttgctcgctatcagtagtatgataataataagataaatgaggtggctagcaaggctatggtaccaacaggcaacgagcagcagaggcgaatgggacgtgtgtttcatcatcaagcacaagctagctagcactacactgttactgtccattctccattcaggcagctagcgctgttgcaagataggtcgcccggccccagacatcctttctttatataaaccagccagccatggcgcacccaaacacaaacacaaagagagcaaacttaagctagctctgggtgctgcattgtctgcagtttacaaaggtagatcaattagaggaga

SEQ ID NO: 5496 - DNA, 2000 bp, Oryza sativa
gggggagaggccgaggcccgcgagctccgcgaggcgcggggcgagcgtcctgtcgacctccgcgcagaggaggcgcgggtcgtaggcgacggcggcggcgatgtcggcggcggagaggccgaggccggcgaggaaggcggacgacggcgtcgggcctggacggggacttgaggtgggagatggacttggaggccttggtagcctggtcgggggtgaggtggcaggtggccacgaggtactcctcgacggcgaagtggccggcggatttagcggcggcggcggcggcggaaaagcgggtaagggagaagaggccatggtggcggagggagaggagggtggaggcggtggccgccggggagggagggagaggaggaggaggtgtttctggaggtggagcatggctggcggctgcagcggcgacggcgacggcgacggcgatggccggggagggagtggcggcggccggggataggggtgggaagggccggggagccggggactagcggctatggcgcaacaaaatgcatacgagtatttcttccttttttttttcttggaccaaaggcaattttttctgacgagttttgtttccaagaacgcattattttagaacaaaatatttcagaaaaacctcgtatttatatgaaatactcctatttcattgttacatatgattatttttcataaattcacattagtcgactcaaagcacacatttctctcgtctagcttaatttttttcttactttttagtgcactagaaactcaatataatcctaactcaataattgattaaatgtaaaaaaaatcatactataatcatcaactactgttgaaagcacggaattagggtctcaaattttttcagagctatagttttgatatctgttggatccattttttatcttagaaaaaacccaaaagtttgaaattgggagtagctgtagggatttcttggtaatgctctcacgtgtacatgaacttaaaaaaaaatatctcataccatttttacaattgttatagataaatatgttagttggatagacaatataagcttttagatggggttttatgaaacactttacccaaaacttaggattttatgaaacaatttgtaaaacctggggttttgcattatagatacccaaaaacctgagtttttgtaaaattttctcttttctaattaacgcgtacgcaaaaacacgcaattttatattgctctagtttctttctcatctcttgccttttttttccgattacacggatgatgcatatgtacacaccacactcatgcatatatttgcacacccaagttgaaccgctgaatttaaggttttttttattacatggatgacatgcccaaagagacagagatcagtgacacgcatctaccactaaaattttattgaaagcctattcgcgcgtgcatagtatttgtgagtactatgatttaaaatcttagtgcttagaataatgcataatattgttttatatttttctaacaagattcttagtgacttaatttccacgggtgtttttattttatttacttattattttgcctctacatcgtgtaggagccatatggatataggatgaaaaataaggcaacaagtaatgtaggcgatatacaagtcaaaaccaacttaaacactccctccgtcctacaaattttggagggtctcttatattttaaaacacatagtactaaaatatattatatctctttaaaaattctttttatttaagacagagtgagaacgaccgagaaacttaattttatcctagctatacgagttagatgacgctctaaaaccttcgggaacgtaaagcggactttccccacgcgaacatacacagccgaaaataaggccttcgtccatttcaaatgggccgttaaacatggcccaccaacgttactgcacgtaaacattgcgatttcacgcggccgcgggcaaacccttgcgccgccgccggcaaaccattgcgccgccgccgcc

SEQ ID NO: 5497 - DNA, 2000 bp, Oryza sativa
ctaaactgcggacttaattaaggctacagaaattatttaagcccgttacaaaatttattcggcccatttagtttgcaaatgtaatacctcgaattgggcctaaagtttccttgttgggaaaagtacaccgaaggtccctcaacttgtcatcgagttacaaaatcgttccccaaccacaaaaccagatatcggaggtccctcaactaacgaaacagttcgcttgaggtcctctgatggttttggacccggttttgtctgacgtggtggctgagtcagcgtggaccccacgtgggccccacgtgtcaggttgccacatcatcaccctccccctctctctctcacactcttctctcctcgctcacggctcactcgctgcagggcgcgcgcggccgccagggggcgacggcgaggtgggcggtggcggcgacggggatggggatgagaacagcgggggaaggggaggggagcgagtcaagggcggtgagggagaccttgtcggcggcgaggcaatggaggggcgaggtgggagaggaggacgtcggcggccccacacacccgcaaccacccagcacgcgctgcagatgcctggcggtccctcgcgtgccgccgttgcggacgacgacgacgaactctcgcgtcttctctccctggccgaggccgacctcgacgccggccacctctgagccgtgccgcccgcctcgacccggactccccgcgcggctcgctcctcctmaccgccgcccgccgcatgctctgtgaggtgggccgtgacggcgtcgtcgtcgtcgccggccgcgccgtctccgcccagttcgccacggctggcgcggacccatcctctggcgccgcgaccaccgccatcgccaccatggacgcctccgccggcggcgggggaactccctgccgacgaccggcgccgacggggtgaagcggcgggtgtgctacttctagcgcgcgaccacgacctctgccgcttccacgccgacgacccagcaggaccagatccgggcgctcaagcacttcaacgtcggcgaggactaccccgtcttcgacggcctctacagcttctgccagagctacgccggcggctgcgtcaagctcaaccacagccacgacatcgccatcaacgccctcgagctcgcccgcacggcgacgccgccgcccagctcctcccccggcggctgccgcccgcgccaagctccatcccgccggccgcgcacttctccgcccccgacggccgcgcactgctccgccccccacggtcgctgcccagctcctccccggcagctgccgccggcgccaagttccacccctcgccgccgccggcttcctctgggccctcttcccctcatgcctccctcctgccctccccggcggcggcgcggtatggcggagctcaaggatggcgaggacggcgcggcgtcgtgggcgggcgctgggtggcgcaactcgagaacggcgagggcggcgcggagatggggcgggggtcgttggcggcgaccccgacgcggcggcctgatcacgcgtcgcggctgccatcgctgcctcgtcggccgccgctctcaaccctgtcacgccgctcgtggccgaccccttcaaccagtcaccggcgtcggcatcaccggaggaggagaccgcgggcattggaattgcgcagagaggagaagagtttgagagagagaaggaagggagagagatgactcattcccacacgtgggacccacgtgaggcccacgctgactcacacgccacgtcagacaaaactgcgtccaaaaccaccagaggacctcaaccgaacggttttgttagttgagggaccttcgatatctggttttgcggttgggggatgattttgtaactcgatgacaagttgagggacctttagtgtacttttcccttccttgtttgtgagctcaccgagctgagaaatcataaccctgtgatttcacgcggccgccgtcggcaacccttgcgccgccgccgccgacgacgacgacgcc

SEQ ID NO: 5498 - DNA, 2000 bp, Oryza sativa
aaaatagattaatatggtttttaaagcaactttcctatagattttctttttgcaaaaaacatactctctctgaaacgtttcaggttataagacgtcttgacttcggtcaaagtcaaactatttcaagtttgaccaagtttatagacaaaaatagtaatattcataatactaaattaattttatcaaatcaatagttgaatatattttcataataaattttttttggttgaaaatgttactactttttttctacaaacttggtcaaacttaaagcagtttgactttgaccaaagtaaaaacatcttataacatgaaatggagggagtaccgagggagtaccgtttagtagttcgagaaacgtgcgcatggagataagacaaatctcctctcaatgtcctgctgccaaaacgcaggttctaatcaacactaattttacaagtcaactactaaatagcaacaaaatacattttgctaattaattgctaactatcaagattaataaaggttgatatcctcatccagtcaatttgactagatatactcatccagtttctttgtgaaatattttctttccgtttaatcccatcatttccctatttcccaccatgtaaggccgtgtttagcttgtgtaccaaaattttttttaagtatacggacacacatttgaagtattaaatgtagattaataacaaaataaattacagattccacctgtaaactatgagatgaatttattaagcctaattaatctatctttagcaaatatttactgtagcatcacattgtcaaatcatggcgtaattaggctcaaaagattcgtctcgcaatttacatataaactgtgtaattgatttttttttcgttcatatttaatgctccatgtgtcaaaatatttaatgtgatggaatttttgaatgtttgaagtaactaaacactgcctactaaacacactgaaaacctggatcaccatctttcatccaaccaaaaacaccctatagcagcggtcggggcagggcgaaaaggtggtcgcgttcgtcggccaaaagccaaagtttgaccgcacaaaacagcgagtctacaagcagaagaaagaatcatcgttgctagctacctgtacccctttaaatttgccccagcaatttcagctcaattttggatggatgcgcccaacttacttcgcgtctacttcaattcgcaccgccattcttcctctcagcatagctaaagctagctcagcatcgtcatgctccaaatttagtccaagatgaagtctttccaaaatccatttgttttgtccaaagaaatctttgccaaaatttttctactagtataatactatctcctgcttcggttgctcttgctcgcttagttaaataatactaaggacagtattctacttggccgccttcttcttcctcttcgcctctacctgctgcatgccgctttaccccttctcgatgcggggttggattccgacgagatacttgagccgacgagaggtaatctgcttctctcgccttctctctccgttgtaatatgttctttgtcctcgatgtgtttccgattttgcttttcgcggcaaaagactttcggtgttgctttttgcgagggtttgtgttagtgttcttgatgggaagattgccgggttttttttttttttgcygctttgcttagcactttttttttatgatttcttggacaattttggagccatttcgtttagtttgagttctttcggtgtttttgacgcctgtgaggtttcttttattctctaaaattttcgccgagtttggcgttctctcccaattgtttcttcgatattttcttgaagaattgaactgggtaatttcattaagattgaattcggtgcgaagtttatgtcaggttgttgcacacgaatgatttttttttaaattttttttgcagtttgattcgaatcgaagctcctagtcttctttaccatgtgaagaaatcaactggttcagcatcaagaagcagcc

SEQ ID NO: 5499 - DNA, 2000 bp, Oryza sativa
tttgaacattttaaaaatggcactccatttggcgtaacaaaacatgtgataaacattggacatggcactgctgtcaaggtttagatttagtaataagtttgggatggtttatttttaaaaaatttaaaaggttaaaatattttttaaaaaagaaatcctaacggttcttgtatttgaaacactaagtggtttaaaagaagaaaattgtgctcttttgccccataattgagtgattagtgttcatttgctacacctgggaaatcatcaccaaagccacatgtcatacacatggcatatatgaaaaaaagaagaagtaaacaacatctactcatgtttggccaaattacaaatctccttttaaagaaacgatttttttagacaggatcatttagcaaggcctgaacagtgctgttaacctgcaggaataagcaaaataacatatttgcaaacgaaagtaatttgtgaataaaactttatatgtgttcttagcgatctaagagcaaagctgaaaaataaacttcgataaaaaaaccttaaaattggcttcaaatttaatgttaaaattttaatctttggctgataaatataagtataagcgaaaagataaggccctcgctgcctagctgaaaagtatcacaaataccatcgtcgacagtttcgctgaaaagtatcagaaacaaaatattttgacaaaatcatttatatctttgacatttcatatcttattatttcgtaaaaaaaagattataacaagatttttctaataaattgaaaatggtttatagaaattaacacgccaataatacaagggagaagccaacagcatactagtctggtaggtagttttgcttttggatgaaaacgagttcttatcagccaaactccaatttacagatattaaaaaatctcccaagatgatcagcggatttgcgtgatttgtatgcttagtcataacaaaactttattggttggagatttgcgctaggatcatataaaaaaaactttatcttattcaagaacgagagaaaaaaaattggtagtagtacgataacctctagggatggagtaaagtatccagctttgcagccacctgccctctgaacttcttgttcttcgtctcacacttcgcccgaagcaaacgagaacaagacgaccgcctctatccaatccaatatcccagtccaatcgaaaggttagtcacttcttgatttgaattttccttctgcttagtttgatacaaaaggggattctttttattttcgttccagtgttcgaaatcatggagacgatttctatctttccccctttgatcgcttgtatgttaatctagagatttttctctttaaaaaaagaggaaattttggtgggggaagatgagtcctgcgacgaaattatacggggtgcaatggcgtgaatcttgagcagtgccggaatccggtttcttgttcttctaacccccaaaccaaagacttctgctgcgtttttattcctctttcgggggggatagcatcgtgttctctgaaagaattggaatcgagcacctgattcttggagagggaatcttggctcttgatctctgccttccccttcgcaaagatctatctgtcagtgctgtgcctcatcccccccaagtgggtcttttctctgggacagcttgctgcccctgttgatgaagaacccaaaaaaggctaatttatttcgtgtgttggatgcaaagctaacccttgttctttgttcttgatgctgatctgttgtgagatctgtatgccagcaattgtctttgtgaaatccagtcacggatggatgccgtagtgttcatcttgtttcagttcttcttgattaaacttctggcaagatgctggactctctcgtgtagatgataaaaaatgtgtatgtcgtggttgtttgcttgggaatcttacggattattaacttattatggtgcccggttcacagatttgcgttttgatcgtggtgccgtcaaccgaaggatttgcaag

SEQ ID NO: 5500 - DNA, 2000 bp, Oryza sativa
taaccataaaaagcctacatacggagtctatctaaaatataacaagactgcaattgtttctgaataaattattgctcactactttttattgagatatttgaggaaaacgtaacaaagttgacaactttatcaataaccgcgatcccacaaacaatatgacatatatttatatgaagtcattctttttcgattacatccactgaattaccacgaccacactttctaaaacatcttaaatgatgtgatttttttattaaaaaacttcatcattatttcttagaaaaccttttagaatcattttattaactttctaatatttgtatttgattatttgtacccttgaataatagtcataaactcagtttcatccaacatccattaatatttttaatagactatgagggaagttacagttttccaataaaaccatgtgctacattgcaataatctgaaagcaaattttcacttcaacactgtgttagaaagtttgtggcactagaggtattatgatctattcaaagattttctctctttaattataccgaaagtgtgtccaacaaattattatttttttaaggtgtctttcaatattgacacgtttttatgatgtataccagtaaaatatacagattttaaatgcaccatagcaaaatttatctaatctaaaatactatatctagagtcacaacatattctaatagtttagccaaaacaattgtagtaaaacgttactcactccgttctaaaatataagtatttttggacttcggtatagtcttcgatatgctactttgaccaacaatatctgtaaaaataagattttttttaaaaaaataaaaagagttgcatattatgatagtttttttaataataaatctagtaatattttttttattaatagttaaagttaaaaatggttgactaaacactacataaaaatcattatattttaggatggagggagtatgaattttacggttttttacgcgtagtagtgattagaagactacaaacattccattcaagcccgagcaacctctattaacacttttcctagctaatctattaagatcacggttacctctgcggcccgcccacctggtgataaaatgtgtacaatgtcagcatcacatggctcccacaaaagtcatttgccttttaatgagtgcccatggtatgtccaattccccatcattggattcccagtccaataaatccaacacttcaagttttcaactgccaccaaaaaaaattcctaacatgcccccctgttcttttcaattttttcttgatttttgtcctagattatttgctttacggttttttaaaaaaatttcttcataaaatttcttcgcggcaatgtataggccactttttataagttgtttgtgaattttattttttataaaatactaatttaccatgttaataaaatataaataatatgttctagcaatccactcaaaaaatttcaaacaggccctgaaacagattcccaatgctattgtacgttaaacgcggtgaagttaaacctgggtgaagttttcccgcacgtgaggagtttgacgaggaaaaactccaactccaatccaaatgcggtgtggaccgtgtggtgattggatcgaacacgcgttgtatatataccggagtaaatccaaactactgtctttccttccttgcacagttgcacccgtgaggccgtggcactgcagaagcagccaaaccaccaccagctcaagcctcccaagtcccaagcggcgacgcaacgcgaaggaaggagccccgaagcctcgccgcgcctctcccgaaaaataaaccgcaaaggcggcgccgcgagcggttgcgttgcgtactcaccttggtcgtcgtcgtcgttcccccgccgcctccgcgtcgcgcacgaggagatatacgccccccgcgtcgcgggcttggttgatcgatcgatcggttggttggttggttttgttggatttttttccttggtcgatctagttgag

SEQ ID NO: 5501 - DNA, 2000 bp, Oryza sativa
tttggaaaccggtacccagcaggcgacacctttgagttctctcaaaggcacaccggtttaagaaccgacacctttgagattacaggattgaaaaagaaaaaagatcgactcgatgcaatcgggcaatccccttcgcaccgaccagatttcatcgaacatttaattcatacgatgaacatttaatccaaggaaatgcaagaacactaacaaaagatggcgctgcctggtagcctgtcgcctcccttcccgcaggatctggtgcaggggagggcgttgtcgccaccgccgcttggtagcccgccggatctagcggaggggaggaggacgccgcctggtagcccaccacatcccctcctgctggattgggtggaggggagagggtcactgggctactgccacctggtagctcaccgcctcccctcccgccggatctagcgaggggagggcgccgccgccactgccgggtgggtgggtgcggtggagagagagcgatcgtgagagagcgatggatggatgaggaggagagagatggaggaaataaggacaggtaarkgwrrrgrkraggargrgagagagtggtgggtgggtgccggaggagataaggcggaggagagagcgcgttcgcctcggctcgatatattatatgtacaagtgtaaaaaaaaatctgacacctatagtgttggtgtatttatttagagccggcacatataattactcaaaggtgccgattatatattttcaatccgcagaggtgagaggtgggaaaaaatttataggtgttgattttaacacttccggcacctatagtgccgacacctttgtgcgtttatgtagtagcgatgatatgaacaaaattattaagagtaaatttcataaaactatagatactttgtacgatctatcataaaactataaatttaagaacttgtttcacaaaactacagattcaatgtcttcatttatcataaaactacatgtaatttgcacaatatatcacaaaactacagatttaagaatttgtttcacaaaactacagatttaatatcttcatttatcacaaaactacaggtttagtgtctccattatcacaaaactacagattttagcatcgttaaaacttgcagttttgggataatggaaacactaaatgtgtatttttttgaaaaatgaagacactaaatgtgtgtggttctgtgataaacgaatatactaaatctatagttttgtgaaattagttcttaaatctgtagttttgtgatagattgtacaaagtacgtgtagttttgtgataaacagatacactaaatctatagttttgggaaacaagctcttaaatatgtagttttgtgataaattgtgtaatatacatgtagttttgtgaaatttactcaattattaaagttatatttgctttgttccatataataaatcgctttgatattttttatagtcaaactttttagatttgatccagtatatagaaaaaattagcaatatttacaaaatcaaattaattttattaaatgtaacaatgaatatattttgataatatatttgtttcttattaaaaatattgttatattttgaatatattttgatctaattttaaaaggtttgattaggaaagaagtcagaacgaattataatatgaaacggaggtagcgtgttctaacaaaatcgttatgatattactctaaatccagacttgctcatgtaattccggtagcatagtggttgccctttgcgtaagatttacactactacagtctacagtaaatggatgttatagatttcccgtaataattcatcgacatgtctccccgttggattttatttttctggattcgcatggaacactacaaaattgttgactaatcgattcatgcagttacgtactgtcatcaatagaaatacgggtaccagcgggcgccggacgacgacggtggtggaggggaagaaacaggagctactactccgccgttccggcagcagcgcagcc

SEQ ID NO: 5502 - DNA, 2000 bp, Oryza sativa
agggtgacatccaggtgagcaacctcccctaccttaggctttttatcaaggagacccttcggttgcaccctccagtgcctcttcttgtgccccgggagagcattgacatgtgcgaggtcaatggctatacgatccctgcaaggtcacgtatcgttgtaaatgcatgggctattgggagagacccaaagtattgggatgatcctgaggaattcaagccagaacgatttgagggcaacaaggtggactttgcagggactagctacgagtacctacctttcggagccggacgaaggatttgcccgggtattacctacgccttacctgtcttggagatagcacttgtgcagcttctataccacttcaattggtcactcccaaagggtgtcaccgaggtggacatggaggaggaacctggccttggtgcacggcgtatgacgcccctgctactatttgccaccccatttgttgttccattattgtaagacagacattgattggtgctagctggttgacttagaactcttgtgtgtactagtagcatgtatttttttttggttttcattccatggttgaccttacatgcctgtaggcttacacccccaatacatcaaaaggttgtgttccttttacaattaattaatataccgtcctatgtttttcatgtagatagctacgaagacatatattaacatagactgaaatgctcaataaagagtctagaatgtatctggcatcccgtcccatttatatattatcacccattcgatccatatattagcatttttaagatgcttattagtacatattaagtatgagggggaaaaactttgatagcccttgttaatttgcatgtgccatttcatgatcggatgaggttaagagatgaagcatgctgttgcacaagaggttaataatgaactatccattaacaagactatagtcctggaagattataattagaaataaaaataaagcactatgtgccgacaaactccaacacaccttgttgaggaaaaaaactatagaaccatacgatcactgctatgcgtggctggacattgtctagcttacaatggagacacataagtagggcctatcacctaaatctaaagacagttgaacacaacgcacttgtccctcacatagaccagtcactatcatgatatccaagtattgtcgcaatcgaaacagtctttaggcgttaaaataattttggatcatctacatgggtgttaatatttgttttctcaattaatgtcggattttacttaggatgagcatatgtaggtagtaagacagataggtagatatagatggtggcaatgatgcatactgaagattcaatatttcttttttcttgatagatagatagatagatagatgtaggagtaaatatcatacaagtgctatttttctaagtcaaaactatctgttgctgttgattatttgggaaaactacaaaaatagttgatgattctatcataaaaccggtttgtgatagattattaccgaagctattgccacatattatctaaattatcataggaataataaattaaatattttagaaataaaattaataaaataccttggaacaaagtgacctaattaacaatgcagcaaaagaaagtttctgagaaagtgtatatttagatacatgcagcaaataattcatggcaataatccagtgaagaacttagaggaacggcgctaaaactaccattaataaaattaaaaaacttatagttttcttaatttaatattgcattgatagatagagagatggagagatagtggatagctagaaatttaatattgcatctttctatctctctagctatccactatccactatctttctagatagaaaggacttcactgcccctgccatgccaaccgcagcttctacctcttctacatatatgtgcagcacatacacaagcacatgccacatacacagtacagagcgccgccacagctcacaattaaccttggcaacc

SEQ ID NO: 5503 - DNA, 2000 bp, Oryza sativa
aacacaactttgactatttctataaaaatatttattgaaaagtgatatatgtatacttttatgaaagtatttttcaagacaaatctatacatataatttctacattttcaaacgcaacaacttaagagttattcatgatttatatttttaaggtttgacttaaacattttcctaaacgacttttatgattatggagtagtatgaatttgcacacctatgcgaattatgagccatagaaacacgagcagccaaacgaaaggagagccgaatagttgggccaaacctcccgaacgaggcccacaggaaaaccaagcataaacagcccggttacggcccatataacaaaccggcatgcagcccacacccaccgcttgtacaatcggtacaggtacaaacgtactcctccacgaccgcgtaactctcgttgccacacgctcgccgtcgccgatttggcacgcgcgacacggggagatttggcacacgctgtgcgcctgtgcggtctgtcgcgtctcgtagcggttggggcaggggccgttcggtttcgcggtcaagcgcgtgacgtgaggtcgcccaagccaagccaagccaatccaatccacgccaatgagacgcgactccacttgccgcgcccgaggcccacggcgacgccgacgtaacaaccgggaggagccgaggaggaggaggaggaggcgtcgtcgcggcaacatcccatcccatcccccacacctcccacacgcggacacgccaaacaactccggtttggactcgtctgaaatcccttcgcaaaaggtgtgttaaaaatttagttaaaattaaaacgatgtgatgaaaaaattaaaagtttatatgtgtagaataattttaacgtgatgaaaaaattgaaaagtttggaatcggcctcgcataccgccccaaccccaagtcgtcgcctcctcaaattattggcgaatatacaaagcggcaagtggtgtactgaccgtacaatcctactactcgtacgcctcggctgtactttgatcccaccaccaccaccaccaccactgagatgacgcgaggttcgcagttccacgcatcccaccatcaccacaccacgacgacgacgacgatgccgcagcgcgcgtgagcgatcacaaaaacgcctccgtcttccggcctttttcccgtgagtgagagagctcgcgcgcgcgcgcgtgcgttcgcctactacattctttcccctccaaccttttcgaggtagtatatttttcctcgtcctccccgtgctcttgattctctgcctcggtttggtattttggcctttttgatcgggagggcsgggggccaatttgatttgccgttcatttcgatttgatttgatccgatctgatctgtagaatagacatcacatcaggggtatggaggttggcgtgagcgaagctttgaatcccgggtagccgccggagagattgcgtcctctcgccttccctccctttgattcctgctcgcccgccgctcgtctttccgctctcgccgagacacggtgttcggcggccgcgcttgtttggtcgctgcctttttatgccaaacccatccgctttgagagattggcctgtcgttttcctgttgtttggtgtaagattccgtcgctcttgaaagctcacgatgcgaaaagaggggcgatttttttatgtttttgatttatggtattgagggttttttttttttgcttgctttgttgatggattcaggaggaggaggaggcggtggcgattgatggaatctgatcgaatgccgcttcaggctgggtcaatcgagctggctgcaacgatcggaggtttcctatcccctcgtgaaggtgtcaaatcagtatccttgtgccggatggtttggggataattttcgtagtgagttcataatagcgtctcatttgggattcctctggttgattcagttccctttgcaagtttgcgggtttgttcacggatttggttggcttgagatcgatcttcattcattgggag

SEQ ID NO: 5504 - DNA, 2000 bp, Oryza sativa
catcgcggaaaatctgtgtaaacttgcatatcctattctttctaccctggcgagacgatggtgtttcccagtccacgcattctcaaggttttttgacgcaagaacgaaaattttagtagtaaatccgtacagcctattcttgtccacttggaaagaaagcatattgtccatttggcttaccactcactccgtactttggtaacagaaaaatataaaataaatgataacggctgttaaaaaaaatcagagtcattgtgcatttggttaattgataacggctgttaaaaaaatgatataggccaagagaataactccgtactttggtaacagaaaaatataaaataaatgataacggctgttaaaaaaaatgatataggccaagagaaaaaagaaattggggtgagagaggctcgaactctcgacctcaggataactcaaatagctatgagacctacgcgctagccaactgcgccaccaccccttgtgttaggattggcaataacaagaaaataaaattgataataaaaaacacaaaaggatgaagggggctcaactgcatgacttcgtcgacagagtttaattgttgtcacctctctgaaagaccggaaagggacagacagagcttggttctttgattgttttaaaaggttcagttaaattctttaatgttatctgttgtcttccatgtgtaaagaaaggttactggcttacttccgttttatcggtgtatttcacatgtacagaaagttcacaagaactaaacagtatacgtggccttctttggctcttgacagttcgaaaatcgaaagctacttatccaaagatgtcgacttctgctaagctccatcttgctcgccacgcgcgtccacgttccacgtttgaaggcatttctgtcccgtccagattcatcgaatgcaagttcgcatctggaaacaaacacacggcacgaacatggcttttacaccacagaccgaatcactgaaagtctccttttgcttttctgaaatggaatctgctgcagtagaagctatcccgattaactgaacatgaaacaaagccaatctctggtagaacaaaccctgcattctccctgttgtaatcaacatgtacaagtgccaagataaaaactgagcacctaatttattttttttggtaataataagttctttacagtattccgtaatttggagtagctgttaagttccatctcgtcagcagctgcctgcagaattttaggagcactgcatccacagtggatccccgaattgtcacggctgatgtaagcatattatggtcagatgattctttttttataaaaagaacttagtcagatgatttaacttaacattttttaaaaattaactaactaattaatggtctattaggtaaagttttaactcctaaatttagcttcagaagttaggtttggagtaaagttgtgaagcagtccaaatccagttctacttctccagtttattttataaaagcgtctcattcaactgtactttgaaactgaaactgtttgactaagctttagtctaaaaaaaactaaatctcaagctggagttgtatcaaataagctctaagcacctgcgtgcgtgccaacgttggccgtgtaaaagccgcctcagatgctgccaggacatggcggcgtaggaactccaacgaccacgtatccacaaaccaaagcccccctttaaaatccgacacaagaaacagatccaaccaattcgctcgcttaagccgccggcaaatcaacccaaccccaaggtacggtgctcacttctctctcttctcctttcctttttttttggttgtttttagcggtggattttgggctccacgcgcgtcgcggggcggcaatcgcgtctcatcaagtgattcctcgcgctaaagttcatcggatttggattgcaagttgttgtcaatctcaggaggggctctgtttctctctgttgtgcgtgtgcgcgttagggtttttcgtgtggtgttgaggatcc

SEQ ID NO: 5505 - DNA, 2000 bp, Oryza sativa
cattagtgctaagcttaaacacttgcattcaatttgtagtttagctcttagctggctacttctatttattctaaaaaaaacaactgaactgtaaccatttttattactttgtgacactttcatgtatgcatttgtgaacgtacggcatgcatgtgtgttttccctgtgctaaaacaatgttttttttactgcgtcctatggatttgatctgggagaatgcatattgtttcattgcttgcttgggaacgtacagctgctgctttatatttccctgtgctaaacgaaggcagggtttatatgacagggattagaaacgggcagggattcgaaccccacagggtttgagtgagataggagggattcactcaatccctccctggataggatcccttggggattaattcccaagcaaccgaacaaggcctcaaggagaacggtcaggtcggcatgttggggctagtgtgcctgtgcccggtatgtttatgtttagcagataaaatttgaattttttttatcttaaatttaaagttgattttggggttttttttattgaagtttattttttaagcctttgctactaaatcactaaaaacacgtgtataaaattttattcatagattattttttgtttgtaaatatatcgtttcgtttattccccgaagtcatgagtgcggtgtctgttagaggaaagaatattagaagaagacaaatccaaagaccattttgtttaggatagcatttctacgtggagtgtgataagacggttcgcggtggatggcagctgggagcaatgcatgattaactgtaaacttggggacgtttttgtaaaatgtttgctaacgtggcgctctaactctcaagcattcccatgacgtttagatagattaattaatatatacagcgtggtatttgtgcaaaatctatattcaatagtaacataatcgcaagattcccatgtaataatagaatagaacatatgacgttgtcatagttgaattggacgatcgcgctaatgatacacgacgacacgggagacgacacctgactgatggacacaccacaagcgccgggtcaacccgcggtggaacagttggacaccatcgagagagcaccgcaaggatgggagcatccgagtatgcatagagcaggtgcaatagctataagagcatagtatatcacactattagctctaaatcatctatagccaaagtaataactcatacaatagttgtttactatactattaatatctggccccacctatcatacacacattacgtcttggagtccgtactatctgtagcccactgctcttctctcccttcatttatctctttaaaatatgtttatagctggtttatagcctgctattgtacctgctctaagccagctataaccatatatcgagaagaaatataagaaagcgggctacagatttgtagccagctgctacacggactttaagacattattatatatgtatgagaggtgggatcggatattaatgatgtagtatatttttatagataactattttatgaatgtactatcagattacctaaagatgatttggaaccatcagttggctatactattaaacttgctcttagggtgtgtttagtacacgctaaaattggaagtttggttcaaattgaaatggtgtgacgaaaaaagttaaaagtttatgtgtgtaggaaagtttggatgtgatgaaaaaattggaagtttgaaggaaaagtttggaactaaactccgcgttagtatgacatgtaagccccacagtacagaaaacmaaagtaatcttccttttggtctgattctcctgaaacgcatcgctatccctatgaccctatccacccgcatgtgcttctgcttcgtagttaagcttttctagttttattttcaaccaccgcgcactcacacacactctccgacgatattttccttctctgttttttttttccttcgccatcaagccggattcgaggacggagggatca

SEQ ID NO: 5506 - DNA, 2000 bp, Oryza sativa
agagaaatgccctatatctcagtaaccagaatcttccaagtgcaaaaccgaactagtacaaagaaaggaaaagaatttgcacaatttctggccaaacaatccagcacaggcgcgagtgactccgatccgcacgtgtactacttgctttgctgcttccaaatcttctacgactactaaacgtaccatgatagtacatccaaagcgatcgaaaccggaaacctcctctcacgagtcaaaaacaagttaacatcacgcttggaaaccgggcacccgagccatctagcagtacacaagtgtaccactcaagagtactaccgttccatgcatccatccggccaaaacgccaaagcgcgcagtagaaaaccagcagaaaaaaaaaatcctcgcgaaagttgccgtacgcacaggggatgactgacacggccgctctccccgtcgttgccacctccatgtcccctagcagactaaccggagatgcccccgccgatgtgaaaccgatcggcagcgtcccgtacgccgtagctttccgcgcgacggaggcctctacacgttcgccttcgcacgcgtgcgcgcggggccgtcgatggatggagcgagctaagaatcgaagaatcgatgacacgggcgccggtgtacgctccggccctccttcgatcggtttcttcctgccgaccttccacttccaaccaaggcgtcgccatcggcagtttgggtagatattgacgtgggattgtagtggtgcagtgcaaggggtgtcctttgctggcgttactgcgttttgctcgttcgagtgcgtacattctgatttctgcatcctctggctctgtcccgggatttggacgtacggcctacggcgcgtgtacgattggatggaccgggtgacggggtgagtgaggcagcttaaccaaatcgaactccacaagtcactgatgaataatgctgaggagctgcacggtcgtgggaaagtcttccagcgaattaaggacgtcttggttgagaggcggtatccaaatcaaccactacactaataactagctgccttcgtttgcattttgcacgagtttgagagagagcagcggggccagatccgcatctcgcgctttattcgtttctatttgaccggcgaaatgttactttggacttgtggaggattaatatatagaggtgttacctaaaagtttcagtttgcaatttgccagtagtgtgcatgtttaagaaaattatctacgggggagctttccaaattttatctcagggttgcatggtaaaaaaggttatccatgggggaactttcatactgtttgctcccaaatgctttgatgacatggatccatcagtacttttacggttactagtagtacatttctttaaggaaagattatcgcctctttcccccttgctcgctttgtcgacgcacttgcctacatcaacagcaccgctttttgacagatatgactgcgaaatatgatcttctaccgatttgctagtaatgtactcctacgtagtacgtaacattggatgcaaaaccattggtacaagattatcaaacggagggaattaaacggacgaactgtgtgtatcacatggaagagctcgtgaacagaacacgttgtagcactgtacggtacccgtcagagaaaccgtaaccgagtaaccgaccacgctcgggaggtcgccagtggccacatgaccgcaggtccgcagccgtcacacgaaccaatcatgcatagatagaaggccaaatggacaagcagacaccaaaaccaggctagaaacgagagcgagcctcgcgcacatgaaacccctccgttttctcggcctcgcacggggaaacgacccgtacgcgcgccacgccgtgtctgctgctcgtctcctataaaacaacccgttgtcacgctcgccttgccattacaacgtcgctagcttcttccgctcgtttagaaaacgccaccaccaccaaagtcaggcacccccgccgagagagttagctagctgcgcgc

SEQ ID NO: 5507 - DNA, 2000 bp, Oryza sativa
gttgagggacgcgaaatagacttatccccttgcaatagccatccattttttccagcccaattcattcagcatcctctcgtgcataggccttctcttttttgttagggaaccgtccagtttcatccttatcgacacgacctaacgcttggtcaaccaacacgaaaatattggacgacaagccgacggcccacacggaatcctatctcgtggacggacattaatcctagcaggcagccttggtccgaggccggacacgtgaagccaaccatgacaaaccctcacgcgctcctgttaactccggtggacccttgccacgccaccagtccaaagcatttcgccgctggggaccccccgtcgcgacgcgccgtttcctggctggcacacgctcaccatttcggcgcaatatccagctgcatgcacgcatttcccccgggcgccccggcacacagccacacgccgcctacgagcagcacgagatcgatgcgtatgcgttttcctgcgggcatgcacaccgcggacacggcgaaaccggctcatcgatccgttgatgcgttcacgtcgagacagctggatcatcggcgtccggtccgtcgtcgcgtgtcgtgtggcaatgaaggtggccatgctttgtacgtagcgtggcccccgttgcacttgcacccaaggaccaagctggaaatttttccggaaaccgtggcttcagaatttgtagaaattgtgtctctccatttcagtcttgtacacggagttgcttgtagaaggtcggtcgggttacacgcagagagataataggtaatgtattgaacatactttcgtgccagtaagagttaaggacggtacgtagagagtagtgaactgttatgtttgagctacaaaaggaaatctagagcttttgctccagcaaaaaggagcccatacatacatgatcgtcaagagatgacttgtcttggttagcttgagcctgaaggttaattgcttcactgttcagcataccagttgcatgctaccagctagtgcccacaaagtagaatctagaaagcgctaagctttcggactctcaacaactaacaaagtcgcatcggcttacacccgtaccttgccttgtaagagaatccttatattgctaatcctcctgctccatctcgatccacataacgatccactgttaattcgtccttcgacatatggaagggtctgtgcgttgtccctgtcgcctttattagctgcgtgcaattcctttccagcacagtaagtgacctaatcaattgtagttaaatccagatgcttccagattatgcacttaactgagatcaatccgagaggccagtttgatgcgggttgatgagcgaggtgtcctgcaggtgctttggtgaagcacacctgctccatgactccatcccctcaaatgttaaactcacatgcatgtactatacagttttttaaaacagcgtttttcagaactcccaggtcatgtttaaaactgaaaaaaactatttctaaataaacatactacggagaataaaaataatctgaagataatctatcctagtacgagagtaacagtcgtatactaaagtaaagtaaactctgtacaaaacagtggttgataaacacagtgactgactacgaatattaaactctgtacaaaacagctgaaactaaagatccgcacggcacaactgaaactgcccttcctaaacccagacgaccaaagatcaaaacaaaaacaaacaaaaatccacatataagattgtctcgtaggcgtccatcgctatccccacccaacaccacactacaacggcaacagtagtagtagtacctgattatccatccctaacaaatcccacttccccacacacgccaaaagcctctcctctcctttcctcctcctccagtcctcctcactgtccgtcccaagaaccactcggtgcagccgccgccgccgccgcagccagtgccattgcaagaatcgcgagggggtattgaggttgggcggcgag

SEQ ID NO: 5508 - DNA, 406 bp, Oryza sativa
ccccccccaaaccttcacaataccaagggtttcaatttaccytttccaatgcaatcggacccaagtggaatttacccaaatgtcacccgcactagacaaccaccccaaccytttcggcgcgagccggattagacagccgccctcgtgccgcgtgcgccaccgatgacgcagtcactcggctaacacgcgaatccgacggccgggacgcgattagcggctcgcaaagccctaattagatcccctttcctccctcctaaacccatccgtgacgcgaggcagtgcggtgcggattccattctcctcttggcatcacgaggcggcgccgcttggtctagctagtagccacagggagaggtggtagccgcagccgccgccgacgagacctcgccgccggggggagggcacc

SEQ ID NO: 5509 - DNA, 733 bp, Oryza sativa
aaaatatttaaataaatctattttaatttttataataattaatatttaattaattatatgctaatgagccttctcgttttaagtgcttgaaaatttttctctcaccaaggagatcgaacggtgccttaggatatgagtaattgaatatttataattaaaaaaaatatgaaaatagatttctttagtttttctaaaataaattatatatagaaaagttttcgtacaaaatataatataatgtttagcagtttaaaatatgctaacaaaaatcaagaaatgagccaatccaaaacgtaatttagaatggcccgtagcctctccttgttgatcgcctatataaaccgcgccatgcgccccgcttctgagcacacgctgcacgtaatcgcgaacgcgcgacatgtacgcacagccaccgccattcggtgctcgcgcgtaatacttaattaaccctcacactactgtagccactgctcgctctgcactctctctctgtctgcatgcaaagccataattaggagccaatgaaatagcagtcaccgagtcgatcagagcaaaacgctctcgactcgatcgcgcgcgcgcggtttggcggttcccttcctccgctccgctcctctccatcatcgtcgtctctgtgtgtgtctgtgtgtgtgtgtgtgtgtggcagtagcagccagatctcggccccggccccggcggatcgagagaccgatcgcgtaccccacccatccac

SEQ ID NO: 5510 - DNA, 2000 bp, Oryza sativa
  misc_feature (1)...(2000): n = A,T,C or G
agaagagagcattatagggtatatgcttgttggattgattattggacgagcggtatgcatttgggattctgaagcttatattagcacggtcagcgttacatttctctgaaagtctgaattcgccttgttcacggagtgccatttaattttgcagtacgtatgcataaatgatcagttcgtcgatgcatgtatttccgagttcgattgatgctacgataattattgacagcctgatctaatacttcaatcctaggggtttagacagagtcggttaagctgtcgctttgatttgagaaatgagaaattcagagcgcatctcccgtgctcccatttttgtcaagctgcagacggtgtatgatgcgtagtcgcctatggtgatctttttatccacggggaatcaaaactggtcaaaacctagctatgcgagggaaaacggccaacagatcgttcgttaaggtgtcgacttggctttacctgattccctttgtgcgtgtgttggttgtgtcaggctttcatcttttggctcaaccagcatatgctaatactaaaatttaaatttttaatttaattttaaagtagtttttgagttttttttatcataatttcttttacaacataatcgtttaagtcgcaaagaaaataaatgtaaatgttttaatcacacattatagtttttcgctaatacgctatttggcgtattttgtgcatatagccatccgatgaggctatcagttaaaagaattgctcctaaaactgcagatcngaatytcttgctgagtagtacctttytaaggattgttaaaaaaaaaaaagcttaatccatatatgttcatttaatcagcgtgtaattgacaagcaagcagtagcataaatttccataacaagctagctaatgaataggacatctaaacaaactaatcctaatcaccatcatgctcttattagttcggttcggtcacatcgtttttaaatccgcacccgtttgtttttgcgtgcatcatatctcttcattcatgtttcgttagtacagctgcaatctgtgcgtacttatcagtgatcaatgcatgcatttgagtgtcactccacgactcctcagcttgggatcagaataggtgacgagaggttgccgatcattcggtatttcggtgcagtgagccagccggacatacaacctctgcccacatgtcaattgcacacagggttcatagtcccgagcggtatcttaggttataaaaaaatatattggtaaatcaataaaaaccaatggaaatcgaagaagttttttttttgtcaaaaaatcaaattttagtttgattttttttaacttgactaaagaaaaaacgagtgctttgtgctatcgtggtagtccagaaaatccaattttcgcgtaaactagactgatttttgttgggattgtaaacgcttgcacctaatacatatatattactgcacaacagcatagcagggcagaggcaagactaaggcagcttagacttgagcccggcttacctccataaatatgcttaaatccttttaaaccattacatatttttctagaaaaccaatatcctattaattgagccctactcgagcgctaggcttagaaaatttttggctccaccgctactacacagaattccgttccgagccaggaaccccttttcctgcatgcgcgtgacgcacaccaatcatatcacaacactaaaccgagcaaaactaaggcccaaaaaagaagcaaactggctaaaaccaagccgtgcgattctgacccgtgtgtacgtccacatcgtcaagccgctcaatggatccagctcatgtacgttacattacaccctcttctcgtctctggtccaaccatccgaccgaaaggctacccttccactccagtggcctataaaaaccgcagctcgcacaacgatctttcaccaccactgcacgaaaaccatctgatcgatcgatcaaaaaccgaatccaatccaacagtgttacacacacacacg

SEQ ID NO: 5511 - DNA, 2000 bp, Oryza sativa
acaggccgccgtacctctgcgctcgcaggccaccttgcctccacgcatgcttcctgggtagaatgaagagtgtagaacagagcagagagaaaaggaggaatagaaaaggttggaatatattggaatgggcaaaaggcagactatgggtagagaaaaaagagaaacatagtctgagtaattttagagaaagtagcaatttaatgcactaaattatctattagaaatatgtccgttaaaatctaaccatttagattaccgtgataaaataaaactattaaaatttagttgttcaaaatatagcccttagaaaataatacaaatatatgcttagttgaaagatattagtaaaagataggaggatgtggtatggagtatgaaatataaatgatctattggagtgagaaggatatgaagaaggaatctttttttgatggccatccatatgagtgtaccgagaatcaaatttggataagctgctggggatactcttaggccttaactacttagatcatgatgctgtttcctaagggttacaatgttttacctccattaggattgagtcgactagacgttagacataacaagcaatcatgaggcaagaaagttgtagcccactagtctagctcgcgagccttagccacttcacatcaatctagggccactcacagcgcgccaccaagttttatcgttcttcacatgccacgtagatcaagaacagtataagctgcatgctccacagtgcaagttacatatagcgggttaggtctatatccagctttagctaatatattgacgtgtaatcattttaggtgttaaaaaaaatagttatccatctttagggttgagtgacgcaagaatttggccagagaatcaattgtctccctcctagacaagtccaatggcgactctgttcatcatttggccagaggtgtcgtaatcaacatgcccgtacctaacggcatcatgtcggagtactaaagagcccagctacgattcatctacggacgtcgtccttactaatcccgaactcgatcaatcaaaacgtaacctttcaggtattgaaaacttaccactactccagtaaatcacagcgtgtaatccgctgtcacaaaacacaaactcccaacagacacatcaagggcgcaattcactctcaccagcagcaacagtcgtcctcgagaccgatttgtgaccgcaattaaatcactcgctcatcgtacagtacgtacgaacgatgtgcatcgaccggtcgatgccctggatggaatggccgggccacttccttcgcccatggggcaaaccaggcgaaccttccccgaatcgcaggccttcgcgcacatggcggcaatgccgtcgtgttggctcgtccgtccggatcacgatctgctgcttccgcgcgaaccgaactgcactgcaggccatgaactgtaaagccgaggctggccgcggccccgtgtgacgtacgatccgcgagcaaagccgagcaaaagcgccacaaaagctgcacactttaccacgtactcgcatccatccgtccatcggcaggcatcacctgcccggtttacgggttaccgctttcgcggatgccgccgcggggatgggtgtggtgtggtcaagtaaagtcccccgcgtctctggcccccacaccccggcgtaggcacgcggcggctggatccagcgtgcgtccagccatgcatcgccccsgccccaaatctatccggcgctctgcagcgacgcgctccgtgccgcatttacttctttaaccgtgtacgcgacgcgccaccccagccggcatttgcccgtcggataccacctgtctgcccgcagctctgctattgctagctgccccggccacgcccaagtataaataccggctcataggcaagtgcttcgccatcccattccagtgaccaatccacactgatcccagtagctctcattgtcctcacgcttcgactcgcttgctagatctttgggttcttgtgtgttgtgatcgcgcg

SEQ ID NO: 5512 - DNA, 2000 bp, Oryza sativa
ttggcagtaaacaaaaaattagacagactaaaaaaacatttagatgataaccttgtggtttaaacctttaaggtgagctgtcatctgtatccattttggtacattggcggttacagggaaattttttggactaatttcagtcaattttgatgcttgttgctacggaagtagaaatactcaaatactccctccatccctgaatatttgacgctgttgatttttttaaacatgtttgaccgttcgtctaattcaaaaaatttaagtaattattatttcttttcttattatttcattcattgttaaatatacttttatgtatgtatattttacaaaagtttttgaataagagaaatggtcaaacatgtttaaaaaagtcaacggcgtcaaatatttagggatggagggagtatttccttacaaaaaaaaagtagtagaaatacttgggccaataaggcaataaccatgcatatttggtttgcttaatgggctgtatctgggcctgacaagttgtcaattaaaaacgaagtataaacacttctctagcaaacaaattcccgactcatatctgactcagactcaaccagattctttcaaacttgagcttaattatacagtaaaaaagactcatcaacacctaccattaggcagcagatgacagaaatgttctacatgtgcatcaacgtgatcacatttcgacaatgatcgataatacaccaacatgcatccccaaatagcttgggactgtactacttggtatatagtataataccatctccaattgttcttgccatgtttgtttcctgttgatctccttgttttgcatgagctggacattggtaattaaattactcgttagacagctcccagatccatgtgggtaatcaagtttttaaatttgtttatgccttgatgacaaaaattagccatgttgtcccaaagagatcaaaccaaccctaattgtaaatttgaactttgcatcgagttccatgttactatatgtctatcaaatcaggcgtgtacgtccttattccaaatttaaattaaagaagttgcagtttgtaacttaaaattgtcaagatgtcaagatcagtatagctgcggcaatcataagccttaacaagagcatgggaatgataagagagaagcatcctttggagactctactttattatcacttttacttttgccatcaggatatgttgtacagcatgataaaatgaggtcatatttgtttgtagccttatatcagactaaattatccatattgcaagtcatttttgttttgtactaagtcaaatttacataactttaaccgagagaatagaaaaaatacactaatattcacagtaataaatatatgcaaagatatgtttcgtggtggatttcaatgaaactaatttaatgtcatagatgttggtatacttttctgaaaacttagtcaaaattagagaagtttcacttataataaaactaaaatgacttacaatacggaaaaagaaggagtatatgcaaacatttaggtaaatactcacaattattgttcttctacaacatgtttcacaaggaacagtacttgtatgtcactccattcctcaatgttatgtggacctgaactcacatgtcacatagacaactggagatttcaaaaatattcagccgcaatccttctctttttacaccatagaatattttcttccctcactgattcttcatattttaaagccattgttggatataagccacaaaactccagatctggcagctgatagaaaattataagtttctaaccaaagcaaggggtccagcttgtgccatccatcgatctccctataaattggaagccacttatcactctaatcactcattgcatacacggttaattacataaagccacttactatatatgcagcttagtagcagagctcaaggttgtagcttcagttcaagcaagaactgaacttgttgaaggttagcatcagttagcagctaaggccatcgcc

SEQ ID NO: 5513 - DNA, 2000 bp, Oryza sativa
ccttccccaataggggcgctgggaagtggcattggctgtagcggcgctggggttggagcacgggtggttccaaggaatgctgtcggtggtagcagtggggagaatttgagggaagagatagagagggtggaagaagatccgcgccagtctcaagcgttggggaagagcgacggtcggcggcattggggaggagtggcggccggcggaaaggatctgagcgtcggtggaggcattcggggaagcgttcaacctcggcgagcttgtgggcgtaggagcggccgagagccaccgccgtgttccttccccgccagccacaaccacgttcaccgcaccagtccttgtcccaattggcaagtcaagcatccacgacaacatatgtggaggaggctagcgagcggcacaccgacgaggctggtggagtagtggaggaccgtggcaccgggcgctcgtcctttcccggtgacggaaatcagatgacgatggcgttaggggcgggggggagaccaacgggaggtgctaagaggattgcggggaggccgaggggaggcgggaatcagtgtgggtgacggcggaggaaggtggtggtggcgacgggtgaccgtggaggttgaggaaggcgaggtcggcttccgggatactgccaccaacaagcgccgctacctctacctctgccgcctttccatcacgcacccaccattgctcgtccccctttgcgtgcgctcactagcggaccgtgacacccgcgggctcagcagcggtggccagtgcgcgaagaggcctggccggtgacgctcctccctccccaccccatcccctcttaacggcctccgccgattcggcattcgttgacaagttaagggaccttaagtgaacttattccgctcaatgcaggccaacatatctctaagattactcaccttatacatgggattttctgttcgatgggccataatcaatatttgttcggctagaaatatccccttggatgaaaagaggcccattacacacaagactttagattttcaggcattgggatccgtgacctggaatgctaatactatgatacgctagatgctatactctttctagtctaaaatataagtatttctaaattatttcacagagattaaaattgaggagaaaagattttggtgcctctcaacaaaaaagagagggttagagacttaggtgtgggaggatggttgggattaagatggggaaaaatattgaatggaaaataatttatgtgataaaatgtagtgtaaatagtggtacaaatgcttatattattgaacaaaactgaaatcctagatatacttatatattgaaactgatgaagttattaataaaatgcaaccaaactcacaaccatacattaatatattcaccaaaaaaaacccagtactctggcattcttatcatcaagaagaaaatctcaagtggtgcacgtgcaaccagacaggctagacgcagggtcgtaggcggcagtgcggcacaagatagtcaaccgagaaaaatcaatgaaggcggcatatcaaagcatatgccgggatacacgaacatagatgattgatcgaacaatgacaaattcaacttattttacgtgaaaatgtggcaacacatgtatatcaaaattgtactaccttcgtcccaaaatacttatcgttgtgagtttttgtttgtaacattttgatcattcgttttattaaaaaaagtatgaaattattatttattttgtttatgacttgctcaatagtactttttaagtaagacttatattttttatatttgcactagttttttaaataagatgaatagtattacaagtaaaaagttaaagcgacaactaatttggaagggaggtactattattttccttgtatcgcgctagctcctaaacgacggccatatatactgctcgttataaatttactgctcacacagtcacacagtggaattcgactatcctcagtctgccacggcgccaaacaggactagag

SEQ ID NO: 5514 - DNA, 2000 bp, Oryza sativa
gatgtgctgaagcagctcgatctggcaaccggagatacggtatcaggatggttctcggcgccggatttgtggttgccttgagctcaggtcggggtcgctaacatggatgtctcggcaaccaatcaaatcaaattcatctgtagaaaaatgagaggaaaaccacacatatcaatggcgtgagtagcgacttcagttgagtcgaaagatcaaactgggacatttcagtggttaccgctggccaacatgcttggaacgcagaaattttwatttactcatgtgagaattgaaatgtcttaaaccctgtaaaattatgcattgaaaatgggccttgaatggatcagaaacatagtaaacaaacccaacggaaaataaagataacgtctgtgcggatacaaaagggttaaaaaattgaaaagaaaaaaaaaagaaaagctgatactgcaatcaggcaaaactgaacgcagatgctgtctatacgttcatggatgcgtgaataaaaacacgtcagttaaaactctaatcggattgagatccggtgcagttataaactctaaccagcatcataggactgttatgtattttcagccgtttattttaatgatcaacagttcagattcactgctatagtactcgaacaacagtaaaataagcaatgttttatattacaacacttttgccacagtatcaaattaatctgtaccgtttaagtttgatccaacttagcagctacaactgctaaagttgcagtcaataatataattgcagctgattcggatcaaactccaatcagtcagtgtgtgcttcacattctgtaccaacaagtaacattaactatgatctgacgggacgctttggaagacgattaaaaagattaggcagaatactgtcaattacctgggtaacatcagatgcgtgtttactctttaccttcatacgcaaaagctgtggtactccctgccgaagtcttcatcaagtcataatgccacggctgatcttgattgtacgatttagaaagagtcgtgatgctagccaaccaaaactgcagcaacagacttgtatttttcagttgttcacgtcagagagtacacatgaaaaaaatcgtatcccagtcgaactaagcaagccagtcattacgagtatgagcttccaggtcaaagatgtacgaacaaggcttcttttttccatcaaacacgaaaataaaactcgaaaagtttcactaagtttccataaaataaattctagagtgaaaatcagagaaagaaaggaatgacggtcgaatagcattgcttctagtaagtagtcaccgacccagtttcttgttgaaatatacaagtacaaaatgtaagatttgcaaacaccagcatcgagattatcaaatatgtcaacgggaagaacgaccgtgcgtgcaaaattcatcaggttgctgatgtcggtgaagaagttgaacctgcacggttgcatgagtgcgctgcatgactacaattggctgctaataactagtgctctacatgactaccttccaacaatttgtttaagtctatactaacaaaccaaaggcccactgattcctgacccagtttgtgcagtaagtagtcagctgatcaaacggcaccttggtttgcagaaattacctgggttaatacactcctatcattttagcaaaaggaggcatgagaagctatatgattgactgcttcatgtagcacagaactacattgaaaggtggcagtggatatcaagtatcaacagccgtcagcagattgtttctcctgtgcaaattatattagcataatgggacttgagcaccactaactctccactcatccaattgtccaattgtttaacctgatacacgagcacctgccattgtacgatgttgcctcccaaaacaagctccatactcctagcctctcatctgaggctctgaaacctttcgtctcaaacaaaagatcacataatctgtccccatctcccatccaagaagaactcacataccaacc

SEQ ID NO: 5515 - DNA, 2000 bp, Oryza sativa
tcccttgctactccctcgccgccgcaccctccctccctcaccgttgcactacctcctccgctctgctcgctgcaccagtcagccatggctgaggatgcgagcgagtggcagcggcgagcacgggcgaaggatgcgagcggacggcagcggtcgacggcgccgcgaacaaggggcaacgacgacagaggggcggcgccggcgcgagcaatctgggaggagggtgagggcgtggagagagaatatgggaggggagagggagaggggaaaaggcgtggggcccatgattggcaagtcaattttggctggccaaagttggccagcgggaggagtggtttggccagccggatggcttggagagggagatagagagtctgttggagtgtgtttttgtccaaaaatgtcaatttttaacttggagaggaagatagagatgttgttggagatgctcttacaccaagctaacgagcaacgactgtcttctttatctttaacttatatagaaaccaaattttaactccttctttaacttatataaatcgaacttgattttttttaacttataggaattgaattttaaccaacatgtttcagagtgatatatcacatattaacatatcttgccattttctttcataattatttggatgatttgcaaacaacgagggaatatttcctcaacagtttaaaatccattcatgactattagtaccatcgaaatttactttagaaaacaatcgacgcacctacggatcgggtgctcgattttttttaaaaaaaaacaagaccacacatggatataatccgatgaaaaaatatttagcttattattgaattatttttaaatgttgcacgttgttccaccaagtagatcggaattgtttcactaaatagatcgaaaatgtttcaatcgtttaaaaagctgaaacacaacaaaatcacctcataaaacattttgctacaacgtatgaaaacggttttttaaaaaatcaggcgttgtttcaccttatataaaaataatatttcagcaaatagcgaaataatgttttaattcactgcaacatttgatctatacatagtgaaacattatgagtacacttactgaaacattgttggtggaacaaaaattgaaacggattctctaaataaagcgtttccataatatgtgggtaatttgttgcaaaagaatatttcaattcactgcaacatttcacatttcatccatacataattaaccattataagtacactagttgagaaaaaaaatgaaacgtattctcttaacagagagtttccgtaatatgtgggagatttgttgcaacggagggcattgagtggtggggaccgtgtgggaggcaggcggagacgcgcgtggaggagggcgcctttttttcgcggagaggcgcgcgtgggggagagggcgtccgattttttttcccgccggatcgggcgcctgccctagcattttccgaaaaaaccgaaatatgggctggagtggtggttgtctggaaagctcaagcaagttagcatgatatgattcctcctgctttgattccagtacatgtcgacgtcccttccgtgatctatcaaccgatcacgccaaaaaacattcctaattaattcggtttttcgccattggtgcatgttacgaggtacagtgcagccatgccatacgccaagattgtgtgctaaactatcatcaatcaccgaacagaaacaaacgtcagcatgttcctcaaatgcagcatctgggtcactataatgttctaccaaaatatattcaggccaatccagatcaaccagcaaatcatcctcacatgcaagctcacagctgcacccactaatcatccagcattgcaccaaaatttctcctataaatactcaagccacaaatgccatcaaaccatcacaaccacacagcaatcgagctagtaatcaggagctcctgaaactccagagagctaatcgctcgtcagcttagtgcgcgtgatccagcggcagca

SEQ ID NO: 5516 - DNA, 2000 bp, Oryza sativa
aaaactttgagatgaactcatttctaatggctaaaaagtagtatgtttgaaatatacctgtggagaatgacccctaagaggtataggaccctttaaagtgggccatagttatgaacccatatatgggtaatcgttaaagatgagctttgatctctagagtctataagaaccatcacaaatcatgagcatcataaataacgaatgataaatacgagccattagagaaaagctctctagcaggtctttctaatctatatgattttcaactggcgacctgcatctctattatctctctcgcacaagttgaactcttgaaacgagcagcgctcatcgtactcatgagcataatgcagatgttgccagctttgccwgccctcccctccccccccccctccccaagtctcttccttcgccccctacaaccagcaatgctcccttgcttaaccctctccacaaataataaagtaactgaatttgactacttcgagctcgaggatgccatattcgactagtttgagctcaagaacataggatcttatgtagtacgacgacgataatgactagaggccactacagtggcccatatgacggcgagcaccaacgcggctaccgtctagctcctatcccaagccggagcaccgacacggatgctgctaattaagtgctaaccctcacccatccgagcagaagcaatgaaatagtggcggactgtcgtttctccctctcttttctacaccctcagcctcgagcactgcaagctcccactgtgattatgttttttgcttttttttttgtcgattttcatatatgtcacatttgatattttttggcccgttatagatgtcttgatcactcacggatgttcacatgttacaatgagtcatttctcamaaccgagtaatatcacatcggatcactcwataattagtgataaccttattgaaccgtcagagatgaacggttatgttgtagcgaataaaatcaaacacaatgtaataaataagtaactcatctggcagacaaaattcaagatctactcctttttccactaggctggctgaagaaagtcagccgaaatttattagagttaacgtctaagatcatagtttttttttaaaagraaaacacagaagaggacaaagagtgtctgtttttatttaagaagaaaagacttggcctagattttaagagaaaaccaagccaaaaaccctcacataagcatggtttgaagtaaaaacctaggctaaacccacacgaagaaaaagccaaaaaaaacctgcgacggcacaacgacgtgattatatatattggatcaggtagcacagcgacgtgattagattatttacatacgaggcaaaccaaacaagactacaagtgcatatgttcgaattttcgatagaatcatccgacgacgatcccgtgagccaaatgaaacaaaactgcagcctggaatttattttccctcttctgcaagtacgtacactatgaaacctgaaaacaacttaacacgggtgtccttcgtcgaatgattctttcgctgtttattttccctgatcattaattattgcatcgttactaattaaaaccaactttatttggcattttgtgcacgttattagctaggcacagagagacagagcagccaccccatacgcgaatatgcttaagcagaattatgaccaaaaccttcaagcaggtacaaacgtcaacgtgcattcacaaagcagcaatcttggtctctagctagttctgttcaatactagctaaagtatttccagcgtactttccttggagaatccagatcagcttcctaatcaccctcacatgcatggttgctcgtcataacatataaccaatcagcattatattgctttaatcatctcctataaatacgacgtcaaattgaatgccaaaccatcacaagcactaagcaaatcgatcgagttatcaagagataattaatatcgtttcggtttagtgcgcgtgatccagcagcagca

SEQ ID NO: 5517 - DNA, 2000 bp, Oryza sativa
cacggctgcacctttcccactcccgttgaggccgaattaaaaataccaaaagaaaaagggagaaattccaccgcccccctcgaggcccagctmaccggcggccgacgtctccggccattcccggcgaccctcccsgsccccccgccggctcatgcttctcggctcggctccggcgaccccccgagcgtagccagatctgggcgtaggtggtgggggaggaggaggaccttgctccgtcggggatggggcggggctgcggccgctggtggtgggtcgccgtggctttggtggtggttgccgcsgcsgccggcgscgragggggcgcktgaggaggcagcggtggcggtggcggtggctccgcggcggcacgcgtacgcggcgatgatgtacatgggcactccccgggattacgagttctacgtggccacgcgcgtcatgatgcgatccctcgggaggctcgggtcggacgccgaccgcgtcgtgatcgcctccctcgatgtcccgccgcgctgggtccaggsgctktaagcccccccccccctytctctctctctctctctctgagtctatgtcgctctcgcgccactagcctcacggttgtcttttagcttggatcgctgggtaatgatcaaaatctgtctccctcgtagatgttcgatttgtactttggagtatatttgaatcgaggtctgattcagctctctctcctcttttttttttcacgcgctggagggttgacttcgtgcctgttttgttgtttgatgcgaatttgtgggtttcttagtgcaaagctcttcccgtagctcaatgcaattttttggtcaccttgcctttgctgattcttatgaagttgtttggttatttgagcaccgcgcttgccgttttatgccaattgatgactatgtgatcggtgccactataaatggctagaatctcttcttccctgtccgtatcaaattcttcgattgtcgtttgttgccttctcttaagcttgttgttactctctctttttttggccttgttttgctgtatttttctctgaattttctggcttgcggattggcagtgtccttgccatgtcctggttactattactgtttctccccgtactattcgacgaagatgctgcttgttcggaatgatatcctgtaactgttacgtaccttgttacggtcattgagtttgcatatgcattcatgttgactttgtagcctagagtcattgaagtttgttgagagagattgtgcgtcctggttgtgagatattcgataaattgtgatatttgtgctgctaatttcgacctcaagttgctgcgcaaattgcagttaactgattaactcattgcctaagctttattatagaacagttttttctgttggactactgatttggcctttgttacagatttgttcaaaagtggtgagaattgacctgtgtaatttscactgccrattccactgcctacatggaagtttgcgattggactgcatgttcattacatactccagtggactagcatgtgaacccctcatattgtccaaactgaccacatgtggatgtcgacctgagttgattttgtccctgttatggcttgttggccgttgcctaagaacttacagtttcagagaatgctagctttgttctgaagaatttgtcagctttctttgtatcctagtggtccatcctttcccctctgttctgagaatatcatacctgtgctgsccagattgagcatttttaattgtggagtttagtaatagatattcaatttaatatggtatatgattagttgaagtaggtagccatgttgggccaggaagcttagccattattgagtcatgtaactagcaagagtatataatattatgttattggcactaatgaagttacaactaatcatggaggaacaaatatggacataacaaaactagaggaacattagtgatgttgtaacttataagtaccatgcaagaataacagtggcattattagtggaacca

SEQ ID NO: 5518 - DNA, 2000 bp, Oryza sativa
gcagcaaaagcaagttctgtctaccaaactagtctgagtcccagatgtggtgcttttaaagatggagtgccaaggatgtcgtgtgcaaagattgctggaagagacaagctgaagcgacgtggggactggctgagctcatcaactggtcctgatgacgcaaatcttttgacaccgaagattgttagctctgattctgccagtgagaagtgtggtggggactgttctgaaaacagtgctaattcacctcctctagacttgcctctttcatttcccttgttgccatctctgtttcctcttgcgactcaatatccacttcctaaggattctacagagcaaccatttaagccttactattgctggtgcccaccatgcccatcttctctgcagtacagtgtaacccctctgcatatgccagttacatctgtagaaccactgcccttgccgcctttgagttctctgctatcaaatgatcagccgccgacttcaacagtttctgcaaagatggatacaactgatctcccgtcacttaatcttccatcgatactgcgtgatcctttacttcacctgccgcttcctacttcaccacttgtatccttgcatggttcacaagttccaacattcacaccattgatgtctgaccccattgtgcatgtcccggtcattgatgtgtgttcctctggccaggcttacctggtgagttgcgggccttctatgtctgcgactgttaccctgctccctagcttgaagcccctgattccagaaacagaatctttggttgagagaagcgctagggaaacactaatgaggcttatagcctcaacaccatctgcaagtaatccccagctggtgaacattctccctgcagtccttactgacgtgcctgaaatgaatgtaagcaaacgaaaactgttgttcgccttaatttaactggcttttgatgtagcttacctggcctcgttctttttgtaggtgaggaaacatcttggtgtccatccaggcgacaggctaagctcatcttgtagcgtcgatgtgattggacctgggtttgccgtcacagaggatgatgcatctgttggagatggggctcacgcaacttttgcggaatatgatgatatcggcgatcagcagcattttcagagcatgtaggtggtaggttgtcgacaaggtactcgttggttgtccagaatattttgaaaggcagttgtatctatatggtaatagcttagcgttgggtttacttttgtgacgctctgcgtactgcctatttgctgtgatgatttagctgctcagtcaaaaacctcattaggttggtcaatgtaattagctgtttgtagtgtattcattcataaaactaaaagcaaactacccaagttaatttgctcgtgcgtttcaaagattgaaatgtggaatggttatgcacgtgcgtagctcagcgtttttgcttgaagttactgtggtagattggggttttgaaccaaatatgaatgatcaaatgcctgatgtaaccacacgtggcattgtaaaccatgcaaatgtaagggcaagctaattgactgacagcttttagttcacaaatatcagtaagatttccctttttttcagtacaactccaattcaattgaaatgtttccgaatggcttttcaatgcaaaaatattgtgcaagtgcaagctaattgacagcatgtggttcatcaatataggtctttccaacacaactccaatctaaatgtttttgaatgactctaaaatgcaaaaaaaaaagaagtgaagaatctgtgggattaaaccgtagtacttgttaaataataagagacataaataacaaaaaaaaagagggatcaacgaaaccgtgatggattcggtggtacgtgtgtacttggtatggattccggttgggtgcgcgtcgattgattcatttgattggtaggtattaatgctatatatatcgccgccaccgcgtgcttcggttacatatgcagctggagtagtagcagctccg

SEQ ID NO: 5519 - DNA, 2000 bp, Oryza sativa
tccaccgttccctcagcaaagtcagcattgcttccctcttcccgatgccattgccaccctagcataggtgaccctcgcggccctcatgctgagaccgcgagacggtgagcacaacaatggtacggtcgtctcggtctgtcaatatataatcagcagtcaattaatttacttacttcgaaagaaagctttgcctgctcctctttatctcttccataggtttcacccccatcgtttatccacggggagaaccggagaagagagcaatggcggcaatgcttaattatctgctggagtaagagattaaagcaggctctagcacgagggaaaaccctttaaaaagacagacaaggcagacgacgcatatgcatgcatggtgacctaactaagcaagcacggacggtaatggtatggtggagtgtgaagtgcggactaataaagcacgtatgatgtgaggtttggagtagaaaatgaagtggatcgatcggacctgagcacaaatcggcggggttctctctctcatacgttcgccgatctcatcaaaactacttttgccaaattagatcgaccggaaattttggctagaccacagcggtaccatgcatgctttaatcgtgcgtgtgagctactgccgctaataatctatctatctgtatcaatcggatacttcaagagagttctcacgttaacgtaaaagaatgtagttattgactggatggatccagaagcagaatttcattggttttagaacccttttagttttaaaagcatactctcatgaaacttacttgtaacttaaatgagagttgttgtattacttacctccttgcacaaatgtaagacgttggttagtttaatttttagctaaccaacgtcaaacaaaaaaatggagggagtataaaacaaactaactaattttgaatgctgaaattcaccatacgttatacaagttgtttctaaaatttaaattttaaacttgattactattttctccatcgaaatattttttttagcatttgacatttaaatcactaaaggcatgtgtttcatccattctattgctaattactcatgcagcttataattagcattagccaatggcaggggcggatccagcatgggggcggcggggtctcgagcccccactactggcgtgaagactatgagagaccccacaaagaccccactaaaaatttttaccatatatagatgggagggggactgtaactctatctagtttgctcagaccccactgctatttttttctggatccgccaatagccaatggagtcttaatagttttgaagatcaaaattaaaaaaatataaagttgttctcccaagttgctgtattttaaaatatccaaaatatttagcataaccacaatattgacaacaaatatcccgtacccatactcgaccaaagatatttcttttgcgtgttcgcgtacactgtggctagtgggtttttcacgtgaggaagatgtgcgtgcctggatagcatatgcgatcaccttatatgcacctatgcagccatgggccggccgtttccccggtggatcgtgttcggacacgtcgcggcccctccacgacggccttggctccattgccaccaccagataaagtaggcgtgcatgcgccccacccccaggcgagtcagagcagcgcgcgcgcgcgcgcgagcgagcgacgccgtgagaaaccagagcaccaaaccgaaccgccgtttctcgcgtctcgccctctccgtgactctgcccgcggggacccgcgctgcagggggagaggcccacccaaccggcaggtgccctcccccgctctatatatacgcccgacctctcccacttctcccccacatgcacttgcagtcagtggtacaacaccacagcaacgcaccaccggccatcaacctcctctcccctgcttctcgctcgctctcctgccctgtttcttggagaagtgagcttaagtgagagcctctgtccctcgcacacgctattggcc

SEQ ID NO: 5520 - DNA, 2000 bp, Oryza sativa
acggtggtgatagcggcgcgaagctcgtggcaacggtcgcggctgaacggcggcaagggggctacggctagtcggcggcgaggtgtccgttggcagcagcggctgcggtggtggtgaccgtatctacggttggaggaggcatggcagtctcggacagctaaccgggggtgtggcagacggccgcacctggccggcgtggtagcgattggaggggtcggaggccagcttggtgcagagaggcgcagccgatggcagtggaggccagtaaggcgcaagaggcgtggccggcggcgaggaggcccgcttggagcgagaggcgttaccgatggcgggaggccgaactggcgcgagaggcgcgtccggtggtggaggccggcgcagcacgatgaggtgcggccggcagtaaaggaggcaaccacggtgcgatatggagctgccgggggtgtggcgcggtcttgggtacacgaaggctggctggagggggcaccggtgcagtggtcccacatgtcagcagaggttgagtggtggtaaagcattggtgcgacaaccatggacttgcaggtgatgagcggcgggtgaaaacccagcccggcctttgccggaccgacaacaatggttcattccccctcctaagggcgttgtcgtgccgtctcatcccttaagggtgtttgccgggcgaaagcccagtcttgactcttttgagtccttgacggacggcggcagtggttttccatcgcttctctccttggagacatcgtttaggcatctccttgtcgaaaccactcgaacgattggtgcaagcacactctagatagagttaggctttgtgttggttgtaagggcgtttttgggcattttcgtctgtgttcctttgttggcctagcggcggtcggtcacgcttagcggcaaccggttcggtgctagtcttctctcggacctgtgtgttggtggtggtatattttttctctttttcctggttacgaccttctaggaatgtaatcttgtaatttttttttctgctttatcaatagaacttcgcatcgtctcgtgcgagtcgctcaaaaaaatatctactttagagaatcaggttcttaggccctgtttagtttgcgagacgaaaagttttggtgtgtcacatcggatatacgggaacacatttgaagtaataaacgtagactaattacaaaacatattacagattccgcttgtaaactgcatgacgaaattattaagcctaattaattcaccattagcaaatgtttattgtagcatcacattgtcaaatcatggagcaatgaggcttaaaagattcgtctcgcaatttatacgcaatctatgtaattagttttttatctatatttaataatccatgtatgcgtccaaacattcaatgtgatagagtgaaaagtttttgtttgggaactaaacagggccttattcatctgaaagcctgaaacttatgtcattatcagattgcaaatcataaaatggtactcacaccgtcccaaaatataagcatttttgaccttaaaacaatctttgagacgctactctgaccaataatatctataaaattaagtcgttttaaataaaaagatatatatattatgatattttgtttaatgataaatctagtagcatcaatttaaaatgatcttttttatttttttcactattaatggtcaaaattaaaattgtttgacttagcattattttaaaaatgcttatattttaggatgaagggagtagtattcttgaataccattatcaaatatcaattatttatgtggaaaaatatgtcgagctcaaactgtccttttgcattatcgatgaccttgaccaacatagccccagcacacacggtaaagactagagacggccagctgcaagtctgcactagcgtactgcatacgtactgaaattggtagcttctcactctccaagtcagtctcacaagtccacattaaacaagcatcaccactcgtaactagtaacaaaaa

SEQ ID NO: 5521 - DNA, 2000 bp, Oryza sativa
ccatacgtaattaagtactccattcatatattttaatatatgacgcgttgacttttaacaaacgtttaacctttcaaaaaaaattatgtaattataatttattttattgtgacttgatttatcatcaaatgttttttaagcatgacacaagtatatttttatatttgcataaaaattttgaataagacgagtggtcaaatgttagttataaagtcaataacgtcatacattgaaaatacggagggagtagctaggacgtatatatgcgcgatattctcttgatgcagatagtcgcgtacacaacacacgtactacgtagagatctcggtcgatctcctctcaactctcaagtctcaagtcgtctcagcaactctctcagccttcatttccatcatgtttccttgtctttaccattccaccgatcgtttaccaagaatatacttttctactgatggagtatatatatttgtagtttactgtacattatttgtagttttgtaccattaatttgtactactagttaacagtctcgactagattactccatctgtaccataaaaaaagggcagatttttctttgccttgtgctactagtatgcgtgtctttattgactcccagggcaatagattagtactactatacttctaattaagcttgcatgattgctagattacggtcataatggctagcgaaagtacgtacgtacgtgtgccaaacctgcctgcctgcctatatatctgaacagagtttcaacaaaagtactcctccaaatgatgcactacggacgtagtattattctatagcagtacagaactttacatgtgttggaaaaaaatctaaacaagataataatatttacttgttccgtaacatttcgatcaaaactcaagagctgctagttgttattatgggcggcacaaaagcgaaaatgagctggttgtgggctccaatgtggttgacgatgatatataccagcccatgggcttacttttgggccttcttatttggagtgtacaagaacaatttaggcccttattagttctcaaaagtttaggcttaattagttcacctgcgtttttctcttctatcttcgtcttagctgtgaagtaaagtagtaaaccatatatgaaatggatatatactgccaggaaaaaaaaacacgtgaaggataataattatgtctctctggaaattaagtactccagttcctctcgcatgtgcagtttgcttcaratgcatgcctgcctgamacttgttcagggcttgcttctagatgataatccgggaarargarttttgatcactcgaaggggatatcctctcgttgtttgcatatcactcaaatgattataaaaaaatttgaaaaaaattaagaagatgtattaatatgtgatatatcactccacaaacatgcaagtaaaaattcaacttctacatctcgcaacgaaaaaaaacaaatttggctctgaatatacgttaactagctgcggttcaattkgtttttttcgttacgagatgtagaagttgaatttgaacttatatgtttgtggagtgttatatcacatgttaatacacctttccaattttttttaaatttttttataaccatttaagtgacatacaaaaaacgaggggatatcccctcgagagattaaaacagtttccctgatgctccatataatactactactactacaagagtaagcgcccagcgttcatatcatatgcatgcttaaaagcaaagtctagttcttcagataccaaatcatccaagatgctaaccatgtcttaaagctctcgcatggttcatataaccttcaacatgtagcacacgcagttgatctatcgatcgatcgatcgtgtctttgctttcaagcaaaattaacaatcgatctaagaargaaagaaaagctaagctatatatacacatgcattctctcatctctaccatgcacagcagcagcagcttgtatcatcctactagtagtagcttgcaaca

SEQ ID NO: 5522 - DNA, 2000 bp, Oryza sativa
cgccgcccacaggaagaacgggaacgcgagcggcggcggcggtggcgggcgagtgctgaggacctcggcgacgagcttgggagccacacgacggagcttggagaggtccgcgacgacgggcgggccccaacgctggtggcggcggaacgcgtcgaggaggaaccgcgcgagcggggagaggcggctggcggccgcggtggcggaaggcgaaggcggggaggaggaggaggaggaggaggaggaggaggagggggaggccgcgacggcctcggttgggaggagtaggcggtggccccgaaggtcggcgaagacgccgcctcggttgggaggaggcggtcgtggcgcggtggccgtcacccccgacgggtcgctcactgcctcgctctcccacccgtcccgcctccatccgctcctgctccgcctctccgcgctgcccctgcacgcgctccgcctccggattgacgaggactactcgtccaacacgccgccgcttccaggttcccgacgtggcgacgaggcgacgcgttcggccgctgagaaggaagaagcgcagtggcggcgctcggctcctcgctgtcgcctccccggtcccatctttggccgccgtggagccggccacagcggccgccaccgccgcagccgtcgccggccgtcgtcacggcgccgccctcctcctcttccgcctcgccccgccgagctccgggccagccaccgcccttcaccgccggagtcgcgaccaccgtcgcctcgcgttgctcggcgcgagtgaaggggaggaagagagagtgtcatactgatatgtgggtcccacgctgactgagctgccacgtagaacaaaaccggggtcaaaaaccgccgagggacctattttgatcggttttgtatagttaaggggaatatatatatatctagttttgcggttattggacgattttgtatccggatgactagtgaggtaccttcggtgtactttttcctttggcagtggtggccatttgagaaaatcttattcacccgccgccaaaactcaattgacagcccagttgctttgcctccccgaaacaactcgcacttaacttggaccacgcgctgcaaagcctgcaaggctgcaacgcatcgtgccgtggttcccatctttctcccaacgccaaggggcgaaatgtagaaaaaacgtgaagccgagcatttctttttgcgcctggcatatccctcgcgcgactaacgccagaacccgcggcgtcgtggcacaaacacctacacggctacacctcatgagtcatgatgatccgtgggttcgttaggcagagcgcgcgttgcctccggtaggctttgtagccaaagttgtcacggtgcggcagcacacgctggttaagtatcgcgatccaagaaagcaaagcacggttttctccggtgctttccgcatcaagcgcgcacacgcgacgcgacggttcctgtagtttccgcatcgaccacatcctcgcgacgtcgcgtcgcgcaagctagccggccgataactctggtgcggtccccgcatcactactgttagtttcacgcatgtggcaaaatggtagagacggccaccgttttctcctttcgcgttgcgtccgcgatccgatcgatcgataacgacgtgacacgtgcacatatcccccatccgtcaatccaatccgatgcgtctcccgttcatacttcatacatcgacgaagcacggaagagagaacgggagagctccaggtgtgcgcacaccgctaacacagctagcgacacacgccagctctcacgtactttgcgtgttcaccccaggcacactggctcgcccccatgctgcaactcaagctagcctgcacgctgcaccgtcgtcgtccatgctgctctctcctcgcgtataagaacaggggcgctgctgggccgggcgtttgcaattttgcaaagcgagaattccacacaggttacaccagtatatacgcatcttgctaaaccgactactgatcgagatcgct

SEQ ID NO: 5523 - DNA, 2000 bp, Oryza sativa
agagggaggtgggagagcatgcgagagaggggagccgaggccctgcctccacgtcttggacgcacgcgcacagcggcgcagaggtggggtgacgacagagtgggcacgggcggctgcacggcgcaggcgggccagggcggacggcgaccgagggcggtcggccaccacgacgagagcgcgcgcgggaacgagcgaaggcggtggcggtttgaatcggcggagcgctggcggggagcggcgagagagagagagagacgagaagagagcgaggaagaagagaggcgctgcctctctcttgctcggctgagcaggcacgtgcggcgcacgtgagagggggggagaggaaggctgggaggggagatgggccgagggaggaagaatcggcccaacgaccaaagagggaggcaaaatagacttttrccgaggagatygattmygaagggattgagatttgraatttgaatttygaacttgatatttggactcatsggaatatggtggagtcaaggaagggagatcaaagtgaaaactcaatattttcgaattggttttgtatctggagacccgaagaattatttggggaggtttccaaagaaagaggaaaaaggaggaatcttggaggttaaagctcaaggctgggatatgtttggatttacatccttggagttgggacaggaattcaaaggttgttagatagacggacgaaccgatggataaacttgtagatagatagatrgatggatagataggtagatagatagatgaacaggtagatagatcgatagacaaggagggattcaaggttgggatttgatattcttggaatcgagagaaatattggcaaggaattttaaggacgggattgaatttcgatgtttgactttagaagatgaatcgggattgacattttagaggtggaggattttgatggcgacgggagggaacaacaatggagatttgaattgagatcttggcacaacttagactctcacacaaataacgaaattttcgcatataggattttggcgaattagtttttaacatctcacgaaaagcggagcgttacatccatctactccctccgctgccgaccgggtcatggtcccttggctatttcctgccatcgcccgtcaactctctctggtgcttctctatgcgacaggcagggagaaaaaaaaaggagtgagaggcaggggtatgtggacttggtctacagaggctattcaacaaggggagggaaacaagagaccgacatgtgggacccacatgagtcccacgttgagtcagctgccacatcagataaacccggagtcaaaaaccgcagagagaactggtttgtactggttttgtaagttgagggatgcgttctatttgattttgtggttcaaggatgattttgtaactcgacgacaagttaagagacattcggtgtactttttccgccatatttctcttactacatgatatgagctcgttcattaattgggcccggcccatggtttaaccttacctgcaatgatgcagacttgcgatacagagcaacgtgcaagtgcaacgaggcaacgtccccctgcttctgtaccatctgggattctgggtcggcgtgacggatgggacaagattgctaccccacctgttggctttctgaggcgtacccggaggaggcgtgatgccgaaaccgaaacacgaagactcgcgacacgacgacgtacgctccccctctctgtccaccgagcgacacgttacggccgcgcgactctccgaacgccatgcacgcgcccacgtcgcgccaccgtgcccttcccggtggacacgtcgccacgcgcccatcgcgacgtcctatatatccccgccgcggccgcgacgctacttcctgcaccgccgctacacgttgcaactgcgactagtcgatctcatcgatctctcaaaagactacgagctcttcacagggaatcgagtgtgtttcggtcgtttgggccgcgccaagcggaagcggaggg

SEQ ID NO: 5524 - DNA, 2000 bp, Oryza sativa
ttgatacctgatacctgtgatacctaggacttgatacctgtgatactcgtgcaagagaatagttaatatatctatctcgttgcaacagaattccgttttgtagcggccctcttttccttttcacaaacatatatattcgcatcagcgttacgtatgcgtacgtggttacttgtgggccctttgctactttgctgtcacagcgtgggcccttgggctacagtggaagcatcccacgttggcatgggtgcagtgtcgttccacacattacgcgatagaaacggggcaacagtacttggttgtacacctgcatatgcgttgattatgggcaacagccaggaacaaggatgactcagcaagaaagcaaccggaattagcgaggaccacgaccagattaaactactccatcgaagcatatatttgtacgtgcaaaaacgacatggttcaaattcaatgcatggtagtagctagcctagccctgtttatttccaaattttttcttcaaaacttctaacttttccattcacatcaaaactttcctacacacacaaacttctaacttttctatcagatcgttccaatcctaaccaaacttttaattttagtgtgaactaaacacacccataacttataatcttgcgttgcatcgatctcctcatctatattcacagtctgggccctccttggaagacatggatatatatcctccatgcgttgtgcccacgcagaatgcacaagctagctatatcaagatacaaacttttttttttaacaaactgatacatgatgtgtcaatttcgttgaatatagaaggagtaaaagttatatgtacactatacggtcgagatacaaatttactcatatatatttcggttaaattttgcatgggtcggtaccattcatagttaataagttaaggcatattggtgacccaatgagagtcatacaactaaattgaagggtacatattaagcttagccagcgatgcatatatatcagacggaatgggttgctctggtgaagagcacatggcattacgtgcattctgcaccgtttgatttactgtgggaggtttaattacatcaaatccctacagtaaaaaatagtagtacatgagccaaatccaagcaccgtagttattgtgccattttgtgatcgataagccttttagccaagaaatgaacatttgaacgtcatgatccaaggcagcagaatgtcctagctactagtatttgcatcgtgacgaaaatacacagtagctaatgggctttttaattagtcgcaggaaatttctatgaaggaagcttaaatcagtggtaaccgataaaggaagaacttgtcagccgtctatcaagcgaataattgtcctatgaagaagagtggcatttggaagcatacgcatgccgttcccgtgtatcctgcaagcacaatggggtcgatcggattaacacgcaaaaaaccgctaaaagtctaatgggcggtctagtacgtagtactagtacgaaattacggtggactagacgacgcaatgcgattgctccacgtctccacaccgccagcataaaccattccaccgtgacgtaatcaccacacgaacgcttcgtagatgacacaggcacatacatcatcatcacccatatccctacatggcaacatatatacgtagtatgcagcagagcagagcagtataaaaattgtataatactactcgtactagtactgtctactagtagtataataccttctgcctgtatggaggagatctggtcccacctgcagtcgggaagctttccgcgcacgctgagtcgctgaccccgttttccccgtgtacgaaaaaactgcgttatactataccgtgtgacgcgccacccagagcccacgacccgactcgaccgacgcgcgctgtataacaacccggccccgccgccactccatccccgactcacccaaccaaccaatccccgactcccacgcctctctctgctgctctcccttgcccccga

SEQ ID NO: 5525 - DNA, 2000 bp, Oryza sativa
gcaatctttccagttcccgcttttcttcactagttgtcctccataagttactgatgagcaatagcacaattaatttatgcaaacatatgctcactgttattacagtccattgaatttgccattaggaatttttagaggtgaaaatggctaagaaattagtgtgccaggtttgctattatatacaaattttatgaggattgcgtaaaaaaaaacaaattttatgaggataaatgcatacttactcatccttatagtgttggatctcaccctcaggaaattctcctgatgggaagagttcatcaacagggatcgatggaggatctgtctgctgaagaggtcccttcttctttctacagaataaataaattaaagcatggttctaaaaagaaaaggaacagtaatggcttaatttaacataaacttacttcgctttgcttttcttctttttcttcttggcagctattactgttccttgcaatgagattattttaacttggaatgagattatttaatagcaagtgctaaagagaattgcaaaagcttcaactctagctgaggaactcagcaataagagcttgcaagtcagagttgtcaccttgtgctccatcttgagacggatagtccacttctgcatcatcatcattttctggtggtgagtacggagctcctttgctatctgcaactttgcttgcttttaatgaggcctcctgtgtttcaaaaccgacttcctcctgcagccaaagaagtaataataatgttaacttaatagaaagtaaatttatagaaaggcaatgagccaaggaccaatgaaaagatggaagccatgagaggttcagctatcctagaaaccaaatgtcatttactattaggtggagtattgaaatcatacatatagctttcaaactcctggtatggaaatggtacctctgatctctaacaaaaaagattagcaaacaggccattggtaacaacttacaaggatatattaaggtaaactatgaacataaccaaactaacaatatcaataaatgagaacactgcaaacactgaataacaggttaattctaaacggcattcgcatcattgtctggcacccaattttcaaaagttacacatctattatcacggtatcacctatggaacatggtagtgcaaagcatggtcagcagtattgcttagtgcacaaaacaatttaattcacgccaaagatgaaactagtgcagcacacctactttggtttcttgattttgtccgatacataaagcctccatctccttgattgccacatcaacagaaccgcgaaccatattgcacgaataaattatcaaaatccaataaattattacaagcctgaatgacacagcagagaagaacataagcatcagtacttcaagtacacccacaaattccggaagcacgaactaaatcacaggacatcgaccgagtgcacttagttcgccgaawtccasycagrmmrtargcscaccttctagaatcaacacgaaaagctcgtggccatggcgcggcggcgaccatagaccacccctcacatgacataccttccttagtacaggctagaggggaggtgggggggggcgactcgcgagttcgccggaagagccgccggcgatcgcccgccgactgaagagcaggagagagcggcggaggcgtggctcgccgccgctgcctttgagtgagtcgtcgtcttgagtcacgacgactgttcttgtacgtgtcatcgccgccgacccaacctgaccggcactacaactgggccacaccaaccagcaagaaaaagcccaacaggcccactacaactgggccacacatcattaatgggcctaaactttcgtgagcccggcccagtaagagatgaaaaggccataataagacggtgagacccagacaccgccgatccccgaaacccttctccctcgcgtcgttccgccgccgccgccgtcgtccagggcgaagcttgcgtagagatagcggcgacgatg

SEQ ID NO: 5526 - DNA, 2000 bp, Oryza sativa
  misc_feature (1)...(2000): n = A,T,C or G
agaagggggaaggccccaccgccgctgtccttacaccaattttttatttgtaataattaattatatctaaattaaataatcagtaattggaagctgggatttatcaaaataagaaggacgctattggttgtagcgtccaggcttggatgctgttgcgctccacgtctaggttgggacgttgtttggaacggcgtccacatcctgaacttttttcttaaacggctaccaagattcttcatgtgaggattacattatatttggagagtgtcgttttgagtagcatctaaaatttatttatcatggcccagttttgcagtagtagttgtaaaaattgcttactactcccgactaataacaaaacaagagatggacagcgagatccatcaatgattcgatgcagctgttattcatgaattttatgggcggtaatgttaactgttaattgaaattacccctacataaacttagcgcctatgaatctgaactactcagtaatggaagcttcagtaaaaaaaaaataaactgaaggagtcggattagaaaaggacactggcagaaaaagaaacaaatgggaaccgccatggtgacttggtgagggacagcgggctcggccaacagacggcggcaacaacctcaaagcgtgaagacgaactgctacagcgtcaggatggacagcgtgaaaacgaactgctacagcgtcgggatggacataagtcgcaacagtcggggaggaggaccacagacggtggccgcctcctgggagatgaggtggagggcgtctgcagcctcccagatcgaggagggcggtggcagcggcacctcgacctaaccccgccacgacattgggtccgattgcctgctgcgcaaagagattgcgggcgggaacgccggataagatcaattttatttttatcgctgtttacttccctttcatactagaacagtggaacagtagtcagcagagtatcagattggacgccgtttggaacagcgtccacwgcggacgtcaabmttgacaangatatgtcayactctggacgcaacgtccatcctacatttgtaaaatcaacatatgatttattaaatatttaattcaaggattattaattattaagaataaaaaatcgggtccttacagctacacggtttttggcgctactcgagcagtggtgaggcgggagaggaggaggtagcgtagaggcgggggtgaggggtcgcccctgccctaggaatgacgtgggggagggaatcatacggagttataatcattccttgaaaacaaactactggactatagaaaaattctagttggttttcataatttttttttcagaatccactgttccgggctctcacttttttttccgaggttatcgaactaaaaacttgtaagaaagaaaaaacaacaaactaacagaaacgttgatagcaatttggcagctcgacggcagtcacggtggcagacccaacaattagtctagcgaaaccaagaggccaacacccatcatcatcatcaatattcatcatccatcattccatctccactccacgtgccgattgaattccaactggaactggagggaagccgactgcatcagagtgctaatatggccacgacgaccacaagagcaagcacacagctcgtcagggtcagccgagcaaagccaaccgcggctgcccagcggtgcgaaaaggccacacaatataccgtgcgcttttgaccccgcccccgatcggcccagcagccaccgcaccccacaaactacgacgctcgctccsgtcccgcggttaatattattgttattccacgtaatcccagcctgtccttcggcgatctcaagagcccctccctcttcttcttgtcctgttggcggctagactttcgtcgatatccccgataaaatccacccgtctccctctccccactcgccttcgcctccatctctctccntcctgccggcttgcatccgctcttccttctccaggagaagcatacaggc

SEQ ID NO: 5527 - DNA, 2000 bp, Oryza sativa
ggctggaggtccgatgtcatgaaatccacaatattagattaaacagtgaaacctttgttgtcatcgacgaaatccaacttatatgtatgtgcaatccttatgagccgatgcaacgtccagataactcaccggctgaaaccccgatgaaacgcttattggcaatcaagaagcatgctagagattatggttctaagcacgacttagtagatcaaacttaactgatgcagcactaagtatgaaaagaaacataatatctagacaatcaagtcgttgactatgttttcagggtggtagatgcctaggctaatctaatctagcaacgcgatttagccgataccggcagaaaccctaaagcgagagacagccaataaagctaaattgatatgctaagactagattaacagagacatgataaataggtaggcaaatatatcatccaaaccagagcaatccaagaggtcgaatgtactgatgcagccttgaacgacgctgacgtaaacgatacaattgcctgggccgacggaacattggacttacccttttgccggagatcgaacaccgatgcagccccgcgtcaggtgccaagtcctgtcggacgataaaataaagtagaaaaggtaaaaagtggcgatgcgccgaatacaaccgaattgtattgatcacgaggatagattacatagaccctaagtgtacatatttatacccatgggttgatacaagttcttgtcggacaagaaagaaactttcctaaagataaaaggaaaagataaagtctcttataggacactaaacacactttcctaaagataaaaggaaattaacaaactattcctaattaatagataacttgccatgccgcattctctttgaactcggtctcttctggataagcttcctttagtagatcaatttccttaaccgaatatagcaagaatccgacaactgacgacttgacaactctcatcggctaatctcaggacttcgaagccgatgctgactctaagccgatgactacttcgggcttgccaaatttcactgttaacacattggtaagtggtactaagcagtaacacatctcattgatgttccttatctcaggtagccctattatgctctacttcctcgtcaatgttgtccctcttacgctacctatgcacctcaatctgctgtttttttcccaaaccacatcactgccatttactacctccgttacgtaaaaaaccaacataatactggtgtgacacaccctagtactataaatctgaacaaatatctgtccagattcatagtagtagtactagaatatgtcacatccggtattagattcactttttatgggacagagggagtatatatcagtgtaaaatggaaatttgctaattccggctactccatcatccttcacaaaaaaatgagctataaaatattgggaatgtgtcttctggtcattagattgtttcctagaaaagaatcaaccgattccacgtttgcaatctcttcaagatcacccaattaaaccgtgcaagcacacaagaagatcagatcaacactgttacgtagacgtcacgttagcgaaactgtcatctaaaaccatcgagagagtcaaattgcaccagttttaatagttgcgggtcargatatccgggtattgcggttcaaaatwccaactagattcggtcactagttaagatwgaccaactgaacttattccattttcagaggaaaaaaatattccaattgttacccacgctacgggcccatcccacctctcaggaatactgggcctcgtgtcgtgccaggcccaatacgcgtcccctgttccaccaacctcctctcctcagatgccacgtcacacactgtcacacacaccagccaaaacccgccgctaccgatcgcgctctccagatcgattcccccaacatattagggctcacgcctcccaaagtcaaaacagcccagcccgaacaagcatttcctcgaacacttcgccctccaccacc

SEQ ID NO: 5528 - DNA, 1886 bp, Oryza sativa
atatatatatcttgttatagtcctttaaactaaatatttttaaagttattgatggtcatagttataaaagtttgacctcaatattgtctaaaacgtcaattaatatggaaactagagggagtatctctgaagtcgatatctggcgtcttgtcttggtgtatgttggcttgtatgttgatcttctatcttgatctattgttccatatcccctctcctcctagagggccttgtatttatacccataggtgtccccttgtccaagtagaactaggaaaaccaatatggatacaatccgagtagttcttgtcattttcatgtagaactctggttgtctttccttatccggaactcctactatatccgaaggttgtttctgtataagacatggtatgtggtgaaccctgccgagatttagtcaactactattaggtatgtggtatccataaccctgacagaaacattctttcgctatttgctgaaatattgtttttatataaggtgaaacatcgccctatttaaatgattgaaacattttcaatattaaaaaagggaaacaattccgatatacttggtggaacatcgtgtaacattttaaaattaattcaataataagctacaaaaaatttcatcggaatatatcaatgtctcttgttttaaagatttatttgcaatgaattgaatgatgtaatcggatggataaataatttaagagaaacaatagtttaaagtagtttttgcatgctgatgtcagcatgacgtggacgctcaatgtgtagttgcctccgtatttgttacaattaaatctttacaacaagatctcactcgattatattctgattattttttaaaacttattttgtattgttgcgcagtagttttacttagttgtttcaataagtatttcytaatgtttcactgtttcatatataaatgttgcacacattttttccccactgtctaaaaaatgttttagcaaaataattgttcttgtaaatatatcatatttcacgtgactttaaatttttcattagttaggactaaatgttttgtacaataattgttgatgttgcagtcggtattctcgaaatgttgcatatcttttagacacatttaattaaatgatgaaactatttttctataagaagtgaaacagcgctcgattatttttttaaaaaaatatagccatatgatatcttgttgcaatgatttagttctaatgattacaataatgcaattatattgaagattggatagataaattattagataagattatgtataacttggtaaataagtatatatatacatgcatgcaagaggtagtgagagagagttgttagagaggcgtccaattttagagaatttgtcggacgcctgatgcgtaggcgtccgctattactacctccgtcccaaaataaatcaatcttatacaggatatgatacattctaatacaatgcttaaatttattataaaaaattatgttacgagtttggtttatttgacactgaaaagtactccctccgtactcgtaaaggaagtcgttttagatagcgacacgatctccaaaacacaactttgacttcttgtttttataaaaatatttagtgaaaagtgatatatgtatatttttatgaaagtatttttcaagataaatctattcatataatttttatatttttaaacttaacaacttgacttaaacattattctaaacggtattctttaccagtacttatgtaagatccgatgtatcagctcctccaggttacacttcagttgaccccagcaggtgttgacctgtagtctccggctaccactctagcttaagcagtctagcgagctcatcgcgtcgcgctcttctcgacgagctccaatttcaggcaag

SEQ ID NO: 5529 - DNA, 1416 bp, Oryza sativa
aaargaaatcataacaaaataaactatataattttttgaawaattaatatgaatagtcaaatgttgaactaaaagataacagcgtcaaatattaaaaaaaaatgaagatgcatagtagattggatgtccaacttcttttcttcgttcgattccttaatttgttggagaactttcaaccatttaggattaatgaaagactgtttaggattttaactacgcaggattaatatatatggaggataataagagggtctccaattaattagtatgaaaaactacccaaacccatgaatccgtacatgctacgttttcgtcctatcttacgataaagatagaacccactaaatcctaaagttcaatatgcaaatatatcatattatcatcttctaacaattattatatcttaaatatcatacaagcatgctatattatctataattttattctataatttattaaattttagagctttaaaatgcaagcatgttaaaccaccatcctacataatttatataatattttaatatatcatctctccatcatttattataatatcctatatacatatatattttatcctcacataattagtattatttctctcttctataattaagccatatcacacaattatttctagctcttagatgattaatttatggtccaaattatcctgctctttttcttctcactataccaccttaattatttttaacccttaaatgactaacctattgtccaaattattccccttcttttcttctctcttaaaaccccatcactttatttttacatttaaatcatcattctatgtgctatttaaatcatcataaaccacatcaacttatgtaaacttatattatctagctatcttacatattatttttatctattgttattatactaaactcccgtagcaatgcgcggggtttcacatagtggattgaacaactaataccgtctcattatttactaatacagatttttagagtattacccgctctttaaaatattacaatttagattctaaactaagcacatcactatatgttatttttcgaatttttgaaatgactaaattataaaaagaactagtcgagaatttaggtcaggtacatctcaatatttgtatttcttgatagttaaatttattagtagttccgaattttcaaatcaataaaataaaataatatattgagacaataagcctaacacaatgcaacttgatattttcaatacacaattgttattgtatatagaaaaaatatatggatcttgcactatatcctttgttgagttcattatatattgttgtgatgaacgctgcagcacaggaaagaactcgaggcaagtataaggaagcagctccaaggagtggaattatcaccatccccatatgacactgcatgggtagct

SEQ ID NO: 5530 - DNA, 2000 bp, Oryza sativa
gaaaataatagtttcgcagcctcatcgtttggcatattggaggaaaaaacgaaacgacatatttgtaaatgaaaaaataatttgtgaataaaacttttatatatgtgttcttaatgatctaaaagtaaagattgaaaaataaagtataatgaaaaaaaaaccccaaaattaactgtacatatataaggttaaaattttaaattttagcttataaacataaagaaataagatgaggctgtcggtaaccaacgaagcccggttacctggagaagtccattccaattggacgagtaatctccttgggcttttatttctccattttgcctttggcattttgagtgttcacttcgaatttacgttccataagtattacttttcatttagtattctttttcttcttacgtataatttccttacaatgtattggtgtgttgtaagtatcaactctaccaaagtatgaaaacatgacattaattaatttttgacatagacgttaacggttttttaatctcattcaattcatttatgttttaattttatgtctttcagttagctctattcttaatactagttagctctattcttgatactttatgcttttacaagaggagcataataccatacgcagtggagctgcattcttggagtcggtagccaggggtctattttttcactttggctaacatagttcctataaaatattgttatagattctacgcgttttctttttacttcatccgtttcataatgtaagactttctagtagtgaacgtattcatataggtgttaagtatatatgactagatttattaacactcatatgaatatgggcactgctagaaagtcttataatatgaaacggagggagttgtatttttgctgcatatgatcaataaaaaaataggggtttttccatatccttgagtttttttatttataatgagatataaatcatttccattatatataaaaaatacacccacgatctaaggctgccgcttaaatatcttaaaaaaacgtggttttatttgtagagtgcaggaaatgcaatttgacaactataagccggcaagaaaatattaacattggatcggcagtttgggagtagcaaacaacgcttaattatataagtactgtactactactaatcatcaacgccttcttcgtcctaaaaaagtattaggacataaacgcggggtgttctccgcaaaatgtgattattttaaatcggtgttgcgccagaggccgcgtcttgagcttgctctctctctctatcactctgctcagctcaagtagccagctcgaacaagaagaagaggagaaaaaaatcgcgcagcttctctccctctctcttacttatagcagcagcagatccgcctcccgaaacccagctctttgtgatcctcaagagccgcctccaacccccaatccacgcgcgacccaagaatccgagaaatttttctgtccagaataagagggtttggtttgattttgggagctccagttgttttcttctcctccttcttcttcttcttctttcttgcaatttgaggaggtttgctctggtttggtttggttcttggttgttgctgccgctgccgcggcgaatggtggcgacgcgaggaagggaatgggttcgttctcctgcgccgcgggcgatctgtcgtgtcgagatagtggcgcgccctgacctgagagatgtttgttcttgttgatttttgtgtgtttgtttgactgaaaggtgctcgtccttttcggaaagtgagggggtttgttcttatttctggttcttgattattattaggattagtttgttcctttgtgtgattcgattccttgccgcgccaaatcttggtttgagatttttctcctttccttttctctctcttggattggatcctttgcctccctcgccgcccattcctccgtgcgatttgagtacttcttggagtgagttcttggtgagtgagatcgagtactttgaggaggatctagaggag

SEQ ID NO: 5531 - DNA, 2000 bp, Oryza sativa
ttgagagcttgagctttcaagccgttgggagcccataacccatgaaagacaagaaaattaatataagaatcaggtggtatatgctactgcctttgcatgtatattagcatacaaatttgttttagacagcagtattggaaaaatatagtgtgattatgtagtttgcccccaacaaaaaagtgggacaatgatgatacagcatgaaaattttgcaccctcccccacacccaaaacattatggtgctttttcatgctcttccagagtgcactatgaaaaggatgtttgtaaaattcataaaaatatgaacttgtgtatcatgttcacacctaacttcaaaaacaaaagcacaacataaaaagaaatatttgatatgcgatactatttttgtaacatcatgatttaaaatcaatatatgaagatcttcccaggttgtcttaatcaaagaaggcagtaattggattctcagatgaaatgtgatattcaagggcaccatagttgatctgcgacaatggaatttcctaaagttggaaaggcaggaaacataataagattcaatcatgcagctcaattaagataataatccaatttcgtttcgaatctgaaccataggatctcaccagagccagacccaccctaatcaagagaacaatcaccaggcaggaatgactgtcttcttaagctttgtattgatttcagcagctgcagaaattaattccagaaagacctagattattctaggctgataaaaatgatctagtaagacaatcatggatctgttcagagctcaagaaaaatttgctattaaatatctaccttttcaaactgcccctatatggtggagccatggtcaaagaaaaataatatggattcaaggatatatctctaattgtgtcttctccatttgtttatgatcctcgagaaaatggtaggaggaaggcagacaaggtgatgagatggctgttttcttctcatgttgcgtgcatggatgtctttcagaggtaagaacaaggaacccacacttggtttagcacgtgggaaatatctgatgaaggtgatcgggtcgatgaaggtgatcgggtccacatcataggttcaaaacttggtgtggttgagcatccaatattccctacttcagcgctgttgttcaattggatgtcctgcaaatggcggctggtagtaagcagggcagatgtagttccacagaacaacctgcatgcaagtatgcaacatatatgccaggttattatattagctagtagtatataataagtttcttggttactactcgtctacttgttgaagttcttgccttgatcatggatacttcacatttccttctaacctctgctttgtcatttcatacctgatttcagtgtgggaacacagaataaacacattagtccaagcaaataagttttcaagccaaataatacaaaattacagctcaatcatgtggttaccttccataccatctttctgcctaagttaaaagtgtctaaccaggaatcaatacgaagacacaagtgttatgatagccctcttatcacccaaagcacccttcttaaaaaactatatctggcagaaccaagcacaacattacacatataaaacaactacgagcacaagacaaaggtagggaaaaaggattaggtgaagtttctgtcacatcacatgatagtcatactgtttgccccaatagacagcattcctaagtcagcataatcaaaggctcatatacatttaagtatggacacagccaacaagaatccttacccaggaccaaggacatgcaattgcatgcaccagaaacgagggcagattagtcttttctcatccaaaaaaaatgtatcgtggttctgttccttaatatggttcaaaacaccactatatataacccatgttctggtgaccagtgacctgagaaaaagctcagggaccaagtagaggcaactcatctgccctctcctactaggattgtcgtcctacttcttatccatca

SEQ ID NO: 5532 - DNA, 2000 bp, Oryza sativa
ttttattttcaatttcagttgtttcaaaattttatttctacttgaactctcttttagttttttctaattttgaatattattttattttttattctgaattttaattaatctcgtattggattcttatatgaattcttctttcaatattgcttattttcaattccgaattttagctaattttaaattgtattcctacttgaactcttctttttttttctaatttcggactttatttttatttatatttcgaattttaattaatctcatattgggttctatatggactcttcttttaatattttttatttttaattccgaatttctgctattttaaaattgcattcctacttggactatcattttatttttctaattttagatttattttatttttatttcgacttttgattaatctcgtattgggttcttgtatggaaacttctttcaatattgcttatttttaattccgaatttcagctatttttaaattgtatttctacttaaaactctcattttcttttctaattttagatgtcactttatttttattttgaattttgattaatctcgtattgggttcttatatggactcttcttttaatatttcttatttttaattccgaatttcagctatttttaaattgtattcctacttgattatccttttatttttataattttggatttttttatttttatttcgaattttgattattctcgtattgggtacttatatggaaacttctttcaatattgcttatttttaattccgaattttagctatttttatattgtatttatacttggactctccttttctttttttctttttctccgattaatgtgagaatttctagcccccacagcgaacgtgatgcctcctttcaaagttgttttaataatataatagtttttatttcgaattttgattattctcgtattgggtacttatatggaaatttttttcaatattgcttatttttaattccgaattttagctatttttatattgtatttatacttggactctccttttctttttttttctttttctccgattaatgtgagaatttctagcccccacagcgaacgtggtgcctcctttcaaagctgttttaataatataatagatagatagatagatgtaaggaattagttacacacaaaatactacatattttatcatctaataataattgaaatataaatgaaattttaaacgaataataagacgtggcatataaacagtacaaagctacgttctttcttctttctggacggaggtagtggtaagtgtattctaaacccaatgactaggataatgtacatatcattaaataagtcgtcatctaaaaaaaatgatgtgacaagtaaataaatgaggaaagagaagaaaaccggtttttacacaacatccaaaacatcatgtgagataaatagcattaaattgaaatatggaatagttgggtttaaattgaaagagtagtgtcttgataatttagagtttataaaaatcatgtataatgttatggactggccctaaccacgccctaactaaaatcaatttactttcctaataatccacgcgtggtgcaacccagcgccgacagctcccagccgcagatctcgccggccgtcgcgcatccgacggccactcaccatcggcgtcgggggaggcgaaaacagcggctgcaattccgcttccaggtggagggggaggaggcccggtttgtgtgccacgccgccccactccgtccgtggtttgctacccaagaagacaagaagaaggaagtggcgaaacctcaccctccatcctccatcctctcctttcttccttcgaggaggaggagctatatatagacggggatggttcatctagcctcctcaccggttttgatttgatctgtgtgatttgagtgagtgagtgagattctttggaggagggattttggtttggtttggtttggtggtttgtgcgggattttgtggggaggagagta

SEQ ID NO: 5533 - DNA, 2000 bp, Oryza sativa
aactccgggataccgtcccccgacacctccgtcttcttcttcaactccgggcactgccctcggacaagtaacgacacgaggtaggtgacctcgactaggaccaatcgctttagcattagaaccccgccggcgttgctgcatcgcctccatcgccgtgtggctcctagcaagctctagtgcctccccctaccccgtgtcgtcttgcccccgtcgctaccactgtgtggccaccaatgattcgtgtggtggagatagccaacaatgctggtgaagcagcaagagaagaaagagagagaagaatgaacatgtggtagagaatgtttggataaagccgacgttcgatattttacagtgtccggacatccgtccgaaagcattttcgactttttttgtttttggytttwgctacacatcactcgtgtgaaaaaaaatttgtttacactcaaattttcgtccttcagatagacttcaagatgtgtgctctattttattttacatatcttcccaatcttgtttttcatttttttgggctgctatataacggaatcccgttttcgaacaagatgatcccgagtaggtatcaggtgtgatacctatcasgtatcagryrwywswmsaywmyasrmwrmwskmkrrtmkskakyaggtrtsakrystrwyasstatcarayrwywmwmsaywckwywcasgtkwyasstgmwasywkcawrtrtsatayktrwtagcttatcaggtatcatgcgattttctaccacgtatcgcgtgatactcgcgaggtatcatgtgaaacctgtcaggtatcagatgatttcaaccacgtatcgcgtgatactcacgaggtatcatgcgatacctatcatgtatcagacgatttctaccacgtatcatgtgatactcgcgaggtatcagacgatttctaccatgtatcacgtgatacttgcgaggtatcggatgatacctaccaggtatcaggtgattcctactagatatggctgggcatcccgttgggggaggagcacctcgacacgcgcggtcgccccctgcagccgtcccttgtagacgaggacggcgatggcggtggcagaggacgggcgcggcgacggcggcagtagcgggggacgggcgctgcggcggttggggatgggcgcggcggcggcggcggaggcaacggtggacaggcgcgacaacggcgggggacagcgacggcggccagtgagtatatggataagaatcgcgttgtggagaggagctatcccgttgggggacggtatcccgtcacctagcattccccttttttttctcaaacacaccacactaatgagggcacacgtagggatggcaacgggtcgggttcgggcacgggtagagcgattccatgcctgacccgagacccatgtgcccatgcccgacccatgcccgaaagggctatcaggcaaaatcctatgcccgtgcccatgcccgtcgggcactgcatacccgatgggtacccatcggccctgcctgtgccgtgcgccaccaccgccgtcgtgcgacgccgtctgtgccgtgcaccgccaccgccgtcgtgtaacgccgcctaagccgtgcgccgcctactcctatgcgccgccgccagccgcgccgctgccgctagcccgcgttgctgccgccgccggaagcgaagccgcaaccgacgcaatagccaagtcgccgccgccgtcggccgtgaagccgcaatagctgaacgcaacgccgcagctgctgtggggattgggtaggagaaggaktgggaattaggttagggtttctattagttgagtatatatatatatgtatctggttagtgggccaaatgggccaagaggaaagggtatgaggcataagagatgggccaaaattagcaaatacatatgtatcgagtagggcatggattatccgcgggcaaaaaataatacccggccgctgctcgctatgttctcgggtctcgggcgggcatgcccacgggcaaaatattacaccc

SEQ ID NO: 5534 - DNA, 2000 bp, Oryza sativa
agctgccctgcgccgagggggaaagggcccctctgacttttcgcatcggctctaattaatcccaacaccgttgaaaagttacgcacgctagctacgccttgatccttttgattgtttgattgattgccatttgaaaaaatgcttccgtgggtgtccggttgtatataaagaattactgaccatagttcacttaaagtagaagtgcatatcaaacttacggtgaatattggatctgtacccttctaccaactatagctattagcaagacttggcaaattgatgttagggggataggggcacaattttctctccgccgtttttcttctagtcaatatgcctagttattttctgagtattttcgttaataatcacgagaggctccccgcaaaaaaaaataataatcacgagaggcaatcggtcacgaatgaaactatgaaagcatgagctcaattgtatatagcaacaagaaaaggctaaggctgtgttcggacccagggttcccaacacctctccatcgttttccgcgtacacgcttttcaaactgctaaacggtgtgttttttgcaaaaagtttctatacaaaaattgcttaaaaaaatcatattgattcatttttgaaaaaaaaattagctaatttctaattaatcacgcgttaatggaccgctccgttttccgtgcgaagaagatttgttcccaacctcccccagcaaacacagcctaaatactcatgtgtttatgctagtatttaggggtgggcataaaaaaaccgaaccgaaatgactgagaccaagaaattcggtcctaaacagtaaaagaccgaattttattcgatcaattcggttagtctcatcgcttaattgaatagatcgaattaacaaaaaaaaatctaaatgtaacctataatccactaagttcaatatgattaaactctaatttccacaatcctacttcttctaggcatgcaacctaataagagtctttactcatacgtgcttacttttttttatgttgaaaattttcattatttctttgcatataaaaaaatattgtggaattttagtcaggaccgagaccgaatttgtcgatcctaatatttttgtgttgaaattcggtcttcacttttcaaagatatcgagaccgaaattttcagtcaaaccgaatacccacccctacttgtatttcgaaattaacatacatcatttttttaaaaaaaatatagccgttatgttaataactgccagtgtaaatcctttacattcctcaactactaataacgacgagtataaccgtacgctaaaaattcctacaccacataacggaaataaacggcattcctaatcgagtttcttcattaaaaaaaagccaaataaaacccctaaaaacggacggtctccggtytccaaacgcgaaaggcgtgaaaccagtgcacgcatcacccatctcgtaagccttagccaaacgaaacacacccaacacaacaccacacaaggtcggcaaaccaaaccccacacacggccacaccgttgcgcgaacgcgcacgtgccggtaacaccggtacaccccccgcgcgtcgccacttagccaagccggtcgcggccacctgccggtcacctccgcccgccacccaccggctaccgcgggtggggtttgggtgcgcgtggccccccacacgcgccaacgcgcgtaaataggggcctccctcttttatctcagccgctttgtttgtttctttctttctttctcctcttcggatcacgcaagaagaagaacaagtctccgtgttcgtgttcgttgtatgttttccccggaaagaagctttgattgcagccgagtcaaaatctttcgagagagagtgctttgcgtgtgatcgagagaggtgttgttggaagcttggttggttgggggagttcttggtttggtttgtggggggtggtttccggttggatttcgcggttggggaggacgagcgggttgttgagcggttcgggggaggaggcggtg

SEQ ID NO: 5535 - DNA, 2000 bp, Oryza sativa
cgacccagtcctatacgggtaggaacctttccattggtggacttcgagatgactttacttaatgtatacagagaacgtccgtacacgcgccgatgtgcagtattgccgtatagcgtacatccaacggtagagggtataccttatccgtaaccctgacacttatactaagagtattgttgatctgtatcacaaaatagtcgtatgaatgaaaaaattacaggctcaatcacacacaagcgataaaatcactcacaggtgaatcaaactagaaaagaaaaaaatgattcagtcaaaaatccatcctgtggctttgctggatcttgctataaagatgaagaggatggtctgtgaacatagggactggtagtggagagggcaacccatgtgacgagccagtagtcgacgatagaatcgtggaaggatgtagcggtgtggtctagagatgagctcgacgttgtgtagtagcagccatccatcatctagcaagcacgaaaaaaaaaagccaaaacactctcgttcatgtcaatagagatgacgagcaaaagaaaaattgcaaacaacctccatcaccggcggactccaccctatcctctgcgaccagccacatggagcacgatgtgcaaatgtaggacccgtacaacccatcaattgagataagttaatattagagattgcacgttaatttgatttgcaaaaaaaaaaagcttcatgcgtgaagttgaaggagagcacgcagatccaaatcagagtgtcagttccttacttgcttattgtatcaatgtcgccaacgtgaagcagccgctggttattgctatttggcctaggtgaacacctccttactggttaaggtgctgtccagtgtccgacagcgaggcccgaagcagtgccgtcgcctcaaccaccgccggccactgccatcaaccgccacgatgtcgtcgtcctcctccagggtgtgttgccaatctgtgggctagggtggtgtatcgattcagataaaaaaaaggaaaaaaatgaagcaggggcgagagtggttggttgggaacgggaaaaatataatatataccgaaagcagagaagttgttttttatcgaagtaaatcatttactccgataatggtgggaacacgatgcgggacgtggggtgggatcgaaagcaagaaagttatttttattatcgaagtaaatcgtttactcgaataaaggtaagtggtagaggcccgcgataggagtaaatcatttacatcgacaacggtaggagtgggatgacggcacgtagggtggggtgggtctgtgctgatgcatgtttggcgctcggaatgctgcgctcctaatagtagttctgtagattttaactaatttagtgccaaaaatttccgaaatggtaggacgggtagtggtggaccttacggtcagtaagttgaacctaatcacttgcacggttgcaccacaaatcagttcatttgacaagccaacacagtgattagagtgtagaaaaagaagctcacctaacttgttcatataactcagctgcttccaaagtcgaaagccctatttgaaaacgaagcctgagctgcttccctagaccaaaagctacagatgcacgatggatacatatccgatagcgtgcttccttgccttgcctcgcctccgcccccttttatgccaccccgtgacatcaccgttggcattgcacgaaatccaaatgaatacaacgtaaacagcttctgcccgccgggcccccatggccccatcatcggccatccgagtcaaccgagtgagccacccaccataccagcagctcccactcgaggcggacatcacattatcgtctcgtcttcccaccagcacctgccgcgctctcccccctcgattcccatttgatcccacacctccaccaactagctgccacgctcgctttcccctgcgacatgcgtgatgtgtgggcgctccacttgttaaccatctcgcgcgcacgccaggctcggctcctcgatcgacgcc

SEQ ID NO: 5536 - DNA, 2000 bp, Oryza sativa
gagcaatcaacatcaagctggcgacagtcaatccgtgttggtcctgattcatgaacaaaacacaaaaagtaacatgatttgctcgtacgaaccactgagcttgaaaaaagaagaatattatattaaattgatatatatggaaatcatttttgacggattcctaagacttgtttggttggagactaatgatgccacaactttttgactaaagtggctaagattagtcttgtcatacttttgtggcaaactaagggcttatttagtttggagaaatttaaactcataggaataggaaaatggaggactaggaatttttccaagatctttgagtggatggaaaaattcatatgttttctctatacaccttgtagaaaaggaaattttactttgattttcctatagttcaatcctacaaaccgaatgacatctataggcattaatccttaggaatccaaatcctttgtttttcatcaaaaacaaacaagccctaagcttaggcagagttagagagtataatatgtgggccagatgactaagagataggtaaaatagagttgtggtagaaatcaaatattgtctacaaaatagaggtatgataaatttagttgataaccaaacatgcccatcaggatacaatgcattttctattgttagtcaagtacagaacaaatgtttcttattttttgtacggttaaattgatttcagcatgaaaacataggacaacgacgtagaaaattgtaacccaattcaacaagaatcaagagagcacaatttgggtatggtgagtgaattttggatgaattactttatccaataaacttcaagcatcttggttaatattcatgcacaatgaggtgtgttttaatacytttttttttgaggttcaaagagcaatataatgctgcatgccatcaattcagtgcctgttatcatggattatatatttgattgtagagattttctatacttgattatagagatagatcaaatattttcaggaataaacttaaaaaatactacatacgtaatctgtagcaatatagtacttcagaacacaattttttttgaacgtttagaagtgctataccttcatagtataagctgaaaaagacatggcctaagtacatagttgcgcccatatttcatatatctgaaaaaatcgaacaaaactctaaaacatttctctttctctttagagaatgataatgatttacatctctaaccttttccattaagcatacaactaatccaatactctctttagggagattctagcaattgcaacatcttccagaatctacaactcttctaaacagtccaaattcttacttagggtgtgtttagttcacgccaaaattaaaagtttagttgaaattgaaacgatgtgacggaaaaattgaaagtttgaagaaaaagtttgaaactaaacttggccttgagtagattttaagaacagtcatagaatatagagaataaattagaaaccagaaatttaaaagcgcaacctttttctaattgttatcaggcggttactctgctcattaaatgtttattagaatattaatctcccctaaaaaggattatttccctttacacaaaagtatgttgtgcattcctatcctaattaatccctcacccccacaggttagcaaaaaaagatatactccagggacctaggcgtaaaaagccccctgcctgcctgccgtcccacacgggcacgccgcggcggccacgttctcttcccgctccgacgaattctgctctccattctcctcgccgttgacgaaaaccaaactaagccaagactttgactcgctcgtcacctcgacctcaccatgcgcgtcgctctcctcctcctcctcttaaaatcgatgtcgatggcgcgcaccaaccttcatcttgctgccccsgcgcgcacgccacctcgccccgtccccaccccaccakgcctcactcctcctacctcgccctcgccctcgccgttgcggcggttcttgct

SEQ ID NO: 5537 - DNA, 2000 bp, Oryza sativa
taagacagttgcagggcttgatgcgtcagggagtgtggtgaggaaccagcttgcacagaacattgtacaggagggtagttccagtgtgatttcaaggacaccatgtcaggagctaccgctctcaattaggttgacggaccaacaaaacgagcatcaccttgtgaatggttcgtctaattctgagaacttagtgaaggtacctccatctcagggtggccaggtaactggtgccaagaagcgtaaatctggaaatgtgaggaggtttgagcagaataaaccaacacaaggacaaggagaatgtggagcattagtggtggctgaggatgttggttccactgaaggagaaactggcgataagaaaaagacagagggctgtcctaaccgagttcatatcaccaagatcatcaagccagtgcgatttgcagcagctgtgaacaacgatgtgcagcaagtttcaattacattcaaagcactcaggtattttctgtaatttcttttcgtagttataggcctaaaatttctaaatctcagacatgttttttttgctagctgatattgctccctttctgactacttttattacaaaaaggaaagtgactatatctagcaatgaattattatttggctacaaattgagtgctttatgtttcactcatttagagatgtcgcaaaaagaatcctctggtctcttcactaatcaaataatatattctgcatttttttatgaccatttttatgtagttattcatattgttagtttgatatgtttgaactgtttttctaaccaagtgtttcgacaggtctgatgggcaggaagtcatggtggacgacaaagtaattgaaagcaaataatcccttgctggtacatcccattgtcttctcctattacttggatgatgagggaaacatctaacgccaaaatgctctcatgttttttttccagcttattagctactacgagccagtgccttcgttataatccgacttcgtgagagatgaactgaaggaactgggtttagctgcctgtgtatttaattagcatttgtgtgtttagaagcttgtagctctatgggcttgataatttagtctggtcttgcagtaggttgctaaatgcaagaaatgtattgcttggtctccccactgattgcttattcgcgccatcttatgtgtaacattttgaacagtggggagatatgtgtaatctatgcttagggatcttatgtttcttttctctatgtttagttatttgggatcgtcgtgacctgcatgcatcttttctctatgtttagttatttgggatcgtcgtgacctgcatgcatcatagacggtaatgactgagaagctcgtgaatttcgtgtgatgaatgcatatccagtagaactgaataaactgcgtaatgttcgttctctgtggatctgtgatgttggcgggtcaagcttgaggtctatactggagactatttcagactgtttaactggttttcttcagagtcccttctcatttcttccgcttgatacttgtcttgttcaattgacacgcttcaacatttgcaacttgtcttgtactttttaaaatgtgcttgttgtcatgttacgatttatctttgtgatttctgaaggccttacccgagtcataactcataaatacaacgaaaaaaaacagatgatttgggccatttggcccatagctatgtcatgtggtgattcctttttggaataagttcatctaggtcccttatcaacgaatccgattttcgtccttcaatcgaaaagataccctggtcctcaactattaaaaccggtgtagatgaggtccctcggtggtttagatggtggttttggctgacgtgacgcctgcgtggctaatttgactcaatcttcgtctgacgtggcattgacatgacgcttacctggtaacttgatccgaaaaaataataaaactcgtgggacccacatgtcagtttcacatacaaaataataaaaaacaatggtgggacccac

SEQ ID NO: 5538 - DNA, 2000 bp, Oryza sativa
ctgaagatcttgttaagtaaccggctctgagatagtttatttgggatgagttaatctatatgccctgtgctacgtacagatcgattgacttgcatcaagtagtaatagttaaaagtgttaaacgtgaccagaattagctagaattgcgatcaacgtggtcagtatgtacggtcactgtatatttagctttaaactagttcggcagagaaacgggttttttttgggggaccaggtctagagtactgttagtaggttgtagttatatatatactctgcttaatccccttttaagtttcaacgctaaaagtaaatgccaaagcccagaaccttctcaagcaaattagtagttcaatatagtacccaaaatcaaaatatattgagccatcggcgtcttcgttgattgaaaaaaaaaaggaagagttcaagacttaagccttagcaagagcaaaacgtttttcgaagactgttccgtagtcgtaacatagttctccttttaccttgtttagttaattttttcccctgctatagttaatgaaattggtacaccttatattggttcgttaaaaaaaatctgaatgtttgattttgactcatgtgatgaaacagtaaaagcagtgagagtcgctgtatttgctttatcataatatattttgtattttttttcttgcattctaaacttttctgaaatgtccagattaaaaacaaacaaacttttgttgctttagtttcaactgcctcatgccggccggttgctcaagtgaataaaatgtcaactcttctatacaaatttaagaaaactcatatataattgtaatataatgattattctcgtaacaaaccttgaccatacattatttttgaatcaaactatgagagtcaaactatctttggtcaaaatttgacttattgggatgatatttttgttgttgtttcagggatcgatttcactagctccacctgtttaaaatgcaaaagaacccacctcttgaacaaatcttagtttaggtttggggttccctatgttctaaagctttagatcagaagaggcaaaacaattttttgacttttatctagttaaatttatgtccttttgactttttagttaaattttgattgggtttgattaaattaatttatagaaaaatatagtagaattttcaacataaaagaaacatattatcaaaatatattcaatattagattcaatgagactgattcggtgttttagatattgctaaatttttctctaaacttgtttaaacttaaaaagttttgactagaaaaaaaatcctagcgacttataatatgaaacggaggaaatagcattttaggccgtttcgatttgaagaaaaaacatagtaaggaatttatagaattttattctaaaaaatgttcttccttaaatagccatttgaaataaaatattggataatattgaatcctacaaattcctcattccgtgcatattatataagaaatttaacatgatatccaatctcatgaaaagttttatttgagtctttatttcttcttaaatttcggtattttcccaccatctaactaaacaaacatgttttttcttaatgtttttcaattatctattttacacaagtattattgttaaaatcctatatttttttacgctgaaatcatatattctttattattatttttttaatcctatgtttccaagaagtgctatacgtacaaatggttggaaaatgatggttttatcatccgatggtcctggtttttatcatccaatggtcctgagttctataatgaaactatgaaattaattaatcatctacattaatcaatgaaaaaccttgcgtagaaagggaaacaaaaggctttttaacataccctgccccacctcaagaaagcaaggccgcgcgactatttatagccagaggcactcactcgctcactcgccgcagaccgcacttccatcgatctctctcctcgccacgggccacggccttctcctaacgggagcc

SEQ ID NO: 5539 - DNA, 2000 bp, Oryza sativa
tttctcaaaacttatgttgttcagtttttccgcgcacgttccccgatcaattaaacactgtatttttttagaaagtctatagaattttttaagaaaaaaatcgtaataatgcattttattaaatgatgctttttaaaaagaatctatatattttttaaaaaaatcgaaataatacattttttcaggtttttaggataatacttaattactcatgcgctaatgagccacattgtttttcgtgcgggaggaattagttacgaacccaaggttcgatgttcgggattcattgttcataactttatctctcttatttttcgggcgcacgctcaaacagctaaacggtatttttttaaaaaaaatatgaagggaaattgttttaacaaaataatattaatttatgttaaaagttttttaactaatacttaattaatcatgcgctaatgtatgcttcgttttgtgtactggataggagggcccctcctcccgaacataaccttagttgctttgcattcacgctgccgctcgccgccgtacaactccgtgtgtagatctgtagagaggactaaagatagatgaggtaaaaaggttgaccgtgtggagaggataggaataaggctccataacccaatacgtatacattttagagtggataaagaaaaaccggaaacaaatgccatattcaactatttatccaccacagtctatatataattgaaattgtttttaatccgttgcaacgcacgaatattttttctagtataatacaatggaatagagcatattattacggttgctcctatattcaatattttccacactcctctggaactacagagctcggacgacgggcatgagtttggacagatttggctgataaacacgaacacttcggcggcagagggatgggcagcaactatctggcgtggtggcctcccattgcgaccactttctcttatcttcggacgatagcaagtttcagccctctcgatctcgagctcaccgacccctactctctgacatgtgggctaccgtcatctccttttttttccatgttactagcatatgggcccccacaaacttctcttaattctttttagcactacgtcaatacaggttaaccaagttaacatgccacgtcagaaaaaaaaaacgttgactataatatcatgtaaggaccatataggacaaaacctattcaaaccatcccgcggagagcaaaaataagccagttttaatagtttagggagcttctatatctagttttgtgattcaggggtgtgaatcagactcgggtaagagaggcgatatgccctatcatgccgtgacagctcaaggcccaaattcacggagctgatccataatgaacttcagagttcaaacttttcagagatccccagacattcctctggttttccgacgttcatgagttcgtccaagtttggaacgttgtatgccgcaaaccaacctctcaacgatcacgtacgtagtacgtcttcttgtggtttttttttgtcaattgaacgtggaagtcttgtttctggactgatcgttctagtcgattgttgaatacgaaggccaccataaatcttcacatgctagcttgctgacacactgtgattcatatggccaatatacagcgagcggatagtggcattaaaccgcggcttcgcgtggaattccaccggataggaaggtaccgggtcgcagactttcaacctctctccattatggcggcgcacgcgcggttcccttctgccgcagcaaccgcagcgcgcacgctagtgtcctaggactccacaagtattgggatatggctaaaattctcgattagtttggcaagtcgcacaagtacaccacaagtacacgacggatgtctcgtatgtagagaagacgctggcgctcgttttataaaagccgggcttgtgatcatgatatctaattcaaccatcacctctttcacaccatatcccwwwawkggsraacttmaccgacgccggaca

SEQ ID NO: 5540 - DNA, 2000 bp, Oryza sativa
aaccagcattgttaatttggtgctactaatagtatatcttttgtgcaaggagtgctactaatatactccatccacacaacttcctgccagaatccatccggctaacatgcctgctaactaccaactggcttgccacatgcgttgtgaaacaaatagtctaatctaatggcgataatatagtatccggctttcatctgggatcgatactaacgacgtcactgtaatcgtgcacttctcttcaaacaaagcagccagaaaagaagatcacacgcgctgagtttggtaagaaaagatattgtgatagataaaatcgatttcgtgtgtgctgaaaaagagaatgaaggaaatctgcacagaaaaaatagacgtgggcccacggacctctattggtgatgggacccactgctcagtgtaatcactctcccaggtcattaagcagctggctagatccgtgatcgtggcagtttttagggatgctaagttaaactgtgacgcgccgaaaagagggccaggtcaatagctggatcatcgggtgctcgccatcttccgcggtcactcgtttgacggctggtttggctgtatccgtaatgtcagatcctcattttaatagtagtgcaaataagtactcctggtatcatttgggttttttttcttcctcctatcacgtatactacctggcaaatatctaacctcaaatacaacgtacacatattcatcaccataagtagtacctgtggaaatgtgaccatcgatgtcgaacaaatttgtcatggcaggataattttggggaaacaaatccggttcaccaggaaagggcagtacttctactaaaattattgatccatgcgtcagaatttcagtggaacgagttgtttctgtatgcgaagcggggcgcatgggcagtgcaggtgcagcggtgtggtggcgcccgtgggtgcggctgcggtgagatgcggaggttttgaccaggagaagcgaccggttttgtggtggctgccgcggcctctctgcctaacacgctgccaaaattaactccgacggcgcccacacatccacatggccctgcgcctgcgactgcgcgtcgtcagcggcagcacccccgcgacacatggacgtacgtcggccccagcacaccacccctcttggcctttggggccttgggcgatcgtgcgacgcatgcacacacccgggcgcccgagtgcaccctgtcggttggaagtggaaactgtgggtgcgcgcccacgcatcgaaacttgcgcccgctttccttcttccaaacttgtaaaatggggtgaattctcaggtgcgggctggcaccggcgaaaccggcgacggcgaggcagtttgggccgtcgtaaagcgcaaccagacgcacccaatgcttccttcgatcggtccgtccgcttgtcgccatcacggcacgccctgacgctccgcacagcagctaaaaaaagcccctccacaatagaccaggcatcggcgaacagaaaatttaaatgctgccgttttttccaattcgaaaaaattcgccaggtgcatttcgatctgtccaacggcgtcacatttctgattcaacattgctggaatgctaatccaatcagtaatactaaaaccaaactattagaatttgcaaagtatcctatcgtgcatgtatctccaggtgagaaaaagatcacgcgaaaagaagcaggataataaaaaaggaagaaatggaaaaagccgggcccgccacagcaggcacacatatccacagtagacacctcaatcccaactgtccccacacatctcccgatgccaaacccccgccaaaatccgcagtcaataatcccctcccctctttagagactaaacacagaattaagatcgctaatcaccacccttaatcgcaccaaaacccgttcatcccacccctacctaccttataacagcctccctctcccctcaccccgctctcccccatcatatcatccccaaccctaacgcgcgccgccgccgccgcc

SEQ ID NO: 5541 - DNA, 2000 bp, Oryza sativa
ttgcttcatcctaagagaaccatgcttctttttactcttagaggttgagagctaatagatagttaggtgtcgctcttgagccacgatctacttgtggttggccgggaggaaggtgggtagtattgagatgtatgtagtatattataaaactcaatatataagtgtcaaattatcatcctcacattattttcataatatattaacatctacacattcatcatttctataatatttaacatacaattatctaagcatattctacatcaatgtagggcatcaattagttattttttgttctgcctataatttagaagcgttgattgagtccgtggcgtcggtaatcttctgcatcagactggggtcaaagatagcaagtaaatttgatgtttttctctctttttacatgtttctacaactaagcaagtattttaatgggtagcaggagaatatggaaggaaaggcagtgcaggcaggctccaggcactttcccttccatcaaacttggccatgccaagtttgaaagggaagttcattcatcgtataataagtatttcttcgcatattcacttcatcttcttttgtgttaatttgtgtgtgccaattcataattatgaccatattattttcagaatacctggtaaggtgcgaagtgagcgttgctctaggtttaagtcctagaaatgacatatgtgctcgtatttactgctaattattttttcagtagtaggcaacgtacctgtctattgcgagacgcccgtggtgacttaaagatatgttggtccagtctttccaagttgttcataggggtgattgcgagatggctgtaatgatttaaagatatgtcgaaccagtatttcagaattgctcatactccctccattcaaaaaaacaaatttaggactggatgtgatacattctagtacaacgaatctgaacagatgtatgtgacacattctagtattagattggttttttatcggatggaggtagtatgggtaactgtaggtaggccggcacatgtcagactcaacatacagcttgtaaaatgtagtagaaagattaaagcttccggtgttagtgaaaaataataatttcttatcaattggagtatttgaatttatttatttcttttttggataattggatcttggggcaaccaacccgtcttatattcttcttttggtaataataaatccttagcaattggagcatttgaatttatttatatctatttttgagtgaagttgatcaattcttgggccaccaacccatcttatattcatcttttggtaataataaatccttagcagtttgagcatgtaaatttattttgactatcttttttgactggactggatcaatttttgggccaccaacccatatcttatattattctgtcgctaataataaatccttagcaattggaataaacctaagttactcatctgacctagtagtaaagtactccctccgttttaggttataagacgttttgactttggtcaaagtcaaactgcttcaagtttgaccaaatttgtataaaaaaagtaggaatattttcaatccaagacaaatttattatgaaaatatatactgcatccgtcccatattactgttgctttgactttttccttaacgtttgaccattcgttttatctgaaaaattagtgcaaatataaaaaaagataagttatacttaaagtacatttgataataaaacaattcataaataaawtaaataataattctaaatatttttgaataagacgaatgatcaaatataacaamcaaaaacttaaagcaacactaaatattactatatttgtctataaacttagttaaacttaaaatagttaaattttaaccaaagttaaaatatcttataacctaaaacggagagagtgctaacttagtttgccctatatatatttggatgcacactaacttaactctcattaacacacatatactcctccagtactccacacatatatctcagg

SEQ ID NO: 5542 - DNA, 2000 bp, Oryza sativa
actctcttattagttattagagcttttatatgtcatgtaggatgacctgaagtaataaatataatttcgcaaaaaaaataagtaataaatataacaccatgttttctcgacatgttacaggtttgggcatttggcacagaaatttcttactgaagaacacccacaaatacgcatattttctgcccacgaggatttgtggtttgggatggtgccatactttcacaacttcaacactcccaccaaaatttatccgtgtccctcagctatatattcgaagatatgtcaagcacacatgtacgaataaatactgccaatccagaccagtaagttaattaattaccgggtaacgatctgtttgccaatcacttaccgtgtatcgttcttttcagtaggagtacaattttccagcgcgaccacgatacggatacaggacctgaaccggcggtttttcgcctgctggtaccgtgttgcgacgtgaccgcctgtatttctcatgtcaaagttggcatcctgtatcaagtggtaatgatcgagctactttgtccgggacacaagtcaggcccacagttttctagcccagttgttatgggaaggtccagttgagtctcatcgaaacccaattcttgttatttgttctcttttctccatactattgcaacggatttaaaaaaacaatttattgcatatatattgttaaagcctttaaaataagtcattcttattttctaatataccatatagcaatgaaaaattccatgataagattctttgatatgcaacggcaagttatatttctatgttgatttagcccattgtaaggggtttctatggcccgataaacatttgtgatcctattcgtattgctttgtattcattttatttgatagttttkgtttttgtttctgaatttgaaaataatattaaaaaactaatgtggtagaggtagtttctgtccttctccgcttcgtttcccctagtcctatgcacacaatatgtcaatatgctactggaaagaatgcagaattggagaagagtcaatgttgcatgtcaacttgttagtataagtacagcctgttaggtcacatcttgtgtttctttatttttctttttaaatgcaactcacatgattcagcgaactacggaaaacaaaatatagaagcatccgcaaacttctgggtttaatgtaaccgtctcatctttgtcttccgtaaaaaaatgatcatgttctactgtatcctactaaattatactccctttcgcagctgttaatatacgctttagctacccacccggggtttctactttctgtacatttagctacccacgcgttcaggctacaacctacaaaaatggggaacagtggactaaaaggttttccaagtgtaatcacgagatccctgatgaaattggttgtggctggcctttccttcttatggctgaggactgtgttgcagtcattttctctcccatagctgtccttatatggtgatcctgattccacatagtgtagcaccggggagtggattctaatccctcgaggggatatcctctcgtatacctttttcttctaaattcgatgcaaatagttgtgaaaaaatctgaaaaaaattgacaatgtagagtataatgatacctactagtccaccaaaattcatgttcaaattcgatctacacatcgagaaacmaaaaagacaaatttagatataaacagtacgctactattcatacgctgaatttgtcttttttatatctcgacgtgtgagttgagtttggacttaagattttgtgaagttgtatatatgtgttgtatgaatattgtcaaatttttccagaatttttcataaccatttagatggtttttgagtaaacgagggaacatcccctcgagggattagaatagtttcccgtagcaccgctcttgtttatataagttacccattgtgtatatatatatatatgcctcaatggttttgaccagaagctgccggggatctagcacc

SEQ ID NO: 5543 - DNA, 2000 bp, Oryza sativa
taatatatcataatatagtgcatagttcttttcttctcatatacaagttggtttgtgtataatgcaagcatgtccaactgctcaagaagcaattgaggtttgcaagtatttgtggttgacgaatagcattttgcgttcctccgtgaattgttaactccagtctgagaggaaaccggagccttgcaaatgggtcatggagtattgacgatgggatcagaaagtgttaatcaaataccatcggcacttcttggcgtgccagacacatctgttctagaagcagaatcggaatccgttcattccggtcaaatagaaacagagcagtatcttggtgaaaactgctgcatcaatcgataatacaatgttctattttttctgtaactgtcataaacaatgttctggaagaaagcaaatgcgaagaaaaagggaacatgaaatcaaagtttggatttcttttaagctgaaaagaaattcaaagcgtggaaacgaatttgaccgcgtgacgcgtgggatgaagaggagaggagacaagggaaaaaagaaccttctggaggccggtttaggcacggcttttcttttttgtcttgcttcattctaaaataataacttcattttgtcttgtcttctgatttatctaattttaatatatttgccccttggttttaataatctcgattagaattctcgttactataattgtcctataaatttagtgagatcaaagaatgtattgttgattttcgtcttttaagcatgaattagggggcttctttatagaatgtaagtatggtgttatccgggtagtgatgtgtgtgcgtatgcgtttaccatgtaataaaaaatgtctctaatattataaactcaaatgtaataattacttacaaataactgagaaaaaaaaagtaaattttagaaaaactgtaattatagtgagaaaactattagtttgctgcaacattagcatcatatttcagtttgttgtaattataccgtaggaaatcatcataaaactgtaactttgcgtagtatgtgtaggtgataacagtaagcttgggccacgtaaaagtatagttttgtaataattttgtataatatcattgcaacaaaccgaaaataggttattaatattgctgcaaactgatagttttgcactatagttatagtttttttgaaatttaaaaaaaaaaagatctactatacaccctccgtttaaaaataagttcattcgtaggaatttatatacaacgtttgacctttttcttatttaaaaattatttatgataagtattttgttgccattagacaataaaatacgaataattactttatgtataaattatgttttttaaatattttttataaaatatttaaataagtctagtggttaaacgttagatataaaaaccaaagtgaagatgtttttgaaccgagcgagtagatccaaacgccatcattccctggtgcggccgaaaccggtggtggtggtggaggggaccggtccaaacccgcggatgtcagcatccaccgtttcgcatcgcggattaactgtgttgctggaggcaggcaaggcatatgctgcgattccacgtttttttcttctcccaaataaaaaggcgtcttcgttattgtattggattccagaggtgaaagctaggaacacacaacccacacgcctcgctgcctcgattgattgattgattccttggagaagaagaaggaggaggmggagatcgagcagccgctgacgctcgtcgtctacctcccgatctgatccgaggagcgaagcgaacaggggcaagatgcattcgacgaatctgctgctggaggagcccatcaggatggcatccatcctggagccatccaagccggtaagacctcctcctcctcctcgccttcgatgatttcgcctcagatttttgctggttttggttctggttggaattggattgaatggaaccctaactcgcttaattaatttcgcctccaagagctttttcccggcg

SEQ ID NO: 5544 - DNA, 2000 bp, Oryza sativa
gacggaaaaagtttcgtgtgtattgtatcaggaccaatgagacagagcccaccctgacaccttgctagggcggaggcgtactgacgttgccacgcagttgcaccaactcatggacccttgtcgaggattagagcattagcagttggccaccacattttgccgaacctaacgtgccatgtgagcaaagaataatgttagctacatgtttcacagcaagtcacttatagtgggtcccactaatatcaccttttttcacttttcatctcccctttttcctatcttcctctccccaatggcggataaagcgaggcgaggtcaaggcgacaacgccggcgaagcggcccacgcgtcgagggcgatgacgttaggtggagtggcaaggtcggtggcgcgggagcagttgacgagcgaccagatccatccctcgccttgtccccaaaagcagtggcaaggttggcggcacgggagcgagggatggcgaggtcggcggtgctcctcctctttgcattttccatggtggaggaagtgaggcggccgcggccggtttggcgacggcaccacctctcctcctccgactggcagggtacggcactgcaagagcttggtggcgtacaaaaagggggcgacggggcgggtctagcgctgactcatctacctcgtccatgactatggccggcgttggccttgagctcccctcctcagcaacgagcccggtgacggtgcagtgtggaagcaggggcgacgattttcttggctccctccttccctccccgttgacggtctccctccctagtcgtcgagacaagccgagctttctttcctccctctctcctttccctagcgacgagtgtgggctgccttaacgatgctgccaattttttatgaataacatgtgtcttagtttggtcacgcgttcttagtttggtcacagaaaatattgacgtggctgagaatctcctacttataagcttgagtaaggatgggaatggttagggtcgatccatttatgcactaaacctatccgtaaatttgtcataacggatttgtagggtcgctccaaaaatataaatggatcaaacggatcaatttgtcctaacggatttgtagggttgctccaaaaatataaatggatcaaacggatcaaaccattagaacctaaggttcaaggggttcgatctaaaatgacttcacatgtataaatgtttcaaaaatttgtacaaagttgcttcgctatataataattcattcctacaaaattcaactaaatttaacaagtttttaaagtgtgaacgcaagtttaaaaattttggatccgagttttacatgtaactagaatttttgggtcttagcaacacattatgggccccacatgtatgaagggctcaaaatttacacaaagttgcttctctgtgcaataaattattccaccaaaattcaactgaattcgacaagtttttatagtgtgaacgcgagtttaaaaattttgggtccgagttttacacatataactagaatttttgggtcctagtaatgcatcgtgggccccacttgtataaagggctcaaaatttatacaaagttgcttctctgtacaataaattatcccaccaaaattcaactgaattcgataagtttttatagtgtgaacgcgagtttaaaaattttgggtccgagttttacccatatgtaataagagtaaccgatccatttggatatctatgtataacctattgatataatagactcatggtggatcaaccctattaaaccatggataaacgaactcacttaaaacggtttaggttcaatccatatcctaaccattcccatcctgaccgcttgaggctgaatggcacataaacgtaccgtgaaagttcttagctgaggagagaagcgaataggccggcgatgggcgtggacgcatggtgcacgagcaacgaccggacgagtgaatgcagctgaggcgggaggaggcggtgtgggggaaggaggcgcacagca

SEQ ID NO: 5545 - DNA, 655 bp, Oryza sativa
ccatamatgccatwaccccccctttttcttytccaattcttcaaatccrgattttaggtaacgttatggttaatttagaaagggttcaaattctrgattggtcaagcttggctaaaggaataaagaatagctaaataagggcatgcacaataaatttgawaaattcttgatctatatttatagtatcgtatcatatactaggatagtttattttaaatgaaaggattagagatagctttcgaaacataagtatatgttggtatgtccacggtttctttttcctcgattcaaagactcagcaacaacgatgcggcaacaacttaactgcttcacggcagtacacaccttggtatcgatcgtagcagccttaattggccaactcctttaatttgctccctctccatatagcaacagcgtcagatcacaatatatccacaaagcttataaatagtgctgcctagcttctctctctctcaatgctagctaaaccatagctagcttgcctacctcctcctcttcttcttcttcttcttcaaaagcttcttcagagtggtggcgatatcgactacacactgttcttggctacatcgattgattgatcagagagagatataacgatatcgatcggatcagttaaatagagtaattgatcgat

SEQ ID NO: 5546 - DNA, 2000 bp, Oryza sativa
tggaggggcagcttgttagctcacggcagatgactctgctttgagcagctttatgtcatacaagtccacatgcttcttttggcaccttgttgctttcacatttacagcttggatgaacaacggttcatccaacctaaactgtactggctacttagtcttaaccactggctagtgcactcagtctgacaatgctatgtaatccaagtcaaacttgcaagacgtgacatagccatctattccaacatgaacacgtcagcaaatcatgagctcatgaccacttgctagcagctaagggcagccactgaattagtcatctagattcacaggatcatctcagacaagagatcagcattcagcaagctatatgagtattatgattaaccaagtggatgcaatgcatacatgaatatataagctaagctgttgaaattaattcacaacgcacagctgttgctgtgacatttgcatgcgtagtacatgattttattcgcaagcaaaggatttcttttgctttgcatgtaccgtgttgcatagccaagttgttttgattccaatcttagcacttaagaaactgtccaccccgggcaacctgcagctctgcaacaacaaagagaactttttatgtggggatgtgaaagagatctagcttgagcaaatggatttgatggggagattgtgaaaaaagacccaggtgactgaatccaatagttaattgggattgtgcaggtgtaacccgtactgaactactaatccttttttctcttagctcatcatgaaggtcaaagatggccgtgtgaatcatggaatagtaatgccaggttctggcagtttggctggctctttttatgacagaggctcatgggagagtttcttgattgatgtagggtaggaatttctattggaagattgtagagaggaacatgttacatatgctatattccttatgggcacggtgatctgtcgcatacctatgtctgcgaagaataagctgattggtttgcaactaaccggaccacacaaggtggaggtcctggaacactggtctccatgcctgattactagttctattatttaaggattttcttttctaaaataatagcacctgtagctcttacattttcagaattgcagaatctgattatcaaactttagtgtctttggttcattgcctcaaattttcagggaattatttgaaaataaaatgaaccagtcattatttcttcagtagttcagttcttctggctccttatcagctttgatggttttctttaccataacgtgaggctatgcttaaatctctcagcctcacatcacatgcaaaggattgtgttttgggaagagatggaggacatctgttcccctcttctctctcctctccaatcgtacagtgtgaaggggagaatcgttttgcctcctgtgcaaccaagaaccattttttttccaaatttcatttggggatttttttttttcatttctgggccttttggttgatctttactacacggatttgttctgttcctctccaatatgctccagatttggtgattatgggaatcgcagcttcttggttgaagatctgctgcattggtacgttccagatatactcttttattctgaacaattttgtttgtacatgacaccctgcatgttcatctgtgcaattatttgcagggaagattggatccttgctccaattggtaaaaagattaggttattgcgatctatccgtatgatcattggcatatgaaggaaaaaatgtcccgttcttggcttagcgcagctgaaggtactgctgcattgtagcattgtgaacttttctaggtgaaaggcctcatcttctggaaccacacgttggtatgggtgaccatgattttacaagcgcttcctcctcaacaatgtggtttgatctgattatctttgtgccacattaataggaattttgtggaaaggatttgatttttaatcaacctacatgcaaatcagcggtgcattgatcttcg

SEQ ID NO: 5547 - DNA, 1537 bp, Oryza sativa
ggccgaawttatcccytcmwaactcctawaatttataaatgtaacaccawttgtggagattagggtaccccaatacccaacacggcatggttatccgactagttatggggataacttatatatatgaaatatgtaacagatcatgacttgggtattacgtttccctgtatattatggaacggcctaaagtcctggtttgataagattgtaaagtagatttaggaaaccgataccgtattggttaaggtttctatcttgtaaccctgccccccaacctatataaggagggcagggagccccctctaggggcaggagacaacctgatcatcaaatcaatacacacccggcggattcaaatccccaaacaggagtagggtattacctctcattgagagggcctgaacctgtctaaatcctttgtctccgcatccatccacttttaggtctcgtgcgctacccccttttattattgccgaatccatgtttcgacaagtttcatttgtatccttaaccataaaaccaaatatataaatatatatagtatcgttcgagaatcaaaatcagtataaatcaagtctctcgacaattttaatggtggtttcctcatacgtgatgtgttgacttatctttgtcccatgtagtgcttacatatcattgtaaggaaaaaaaataaaaataataataaactcgataggacctacatatcagttgtgggggtccccttcagaccaatttcccttcctcttttcccacagccgatttagagctagacggagaggcacccgcggcgggcaggaacatggaacgggaggcagatggagggaggggactagcccacatggatggttgagctcaagctcaactcaggcaggtaaggggatgaagattgtcactgagatgtggagcccattgagggcctgtttttttctccaacaaaggttggattaacttttggatactcgtggtatgtttttcaaactgctaaacagtgcgtttcgtgcgaaaatttctatatgaaagttgttctaaaatataagattaatccatttttcaagtttgtaataattaaaactcaattaatcacatattattaccacctcgttttacgtgaaacacttaaatttttatcttcatcttcaggagattcaaacaccacgttttcatttgaattattttctcattttttgcagactagaacataatgtaagcgcaacatatgtgaaagaaggccaaatcaacaagttatgtaggcgcaatgttagtcaaaaaccgccctctatactgttaaggactcgatttgtagtggttttacaagttggggactctctgggctcatttcgtgtagttttgggttgaaaattaatccacagctgagggatgtagagtggaccttttccaactctagccacatgacgtcttttagttgggctgggctggaacggcactgcagcgccgcgcggcctttacgggatggtggctgaggcccacatatgtacgtaagggccccatctcgccgaggagaggctgggcgaccgcg

SEQ ID NO: 5548 - DNA, 2000 bp, Oryza sativa
cgagcctcttcagggtggtgtctctcacggtgaccttcccggctttccgcagctgcgcggcggcctcacatgtctgcaacatcgattgatcacgacacacgcacacattctgtcagtgcctactactacaacaaatttactcttgtctgcagcaatactgatggtagtattaccatgacgaagacggacatggcgtgggtcttgagcttggggktcttctcgagcggcacgtcggagttgcgcaggaacgagaacatctggctcgccgacggcgcgacctcgaagatcctggaatagagatatagtagcaccaatcacgcacaccgaaatgtataatgcctcagaaaccaatggttggtgccgtaaactgactctgcgaagaatggcccagtaagtattgcgtagcatgtagtagtacatacttcaagaagaagcggagtccaatgttggcggaatccttcttcatgatggcccacgacttgagcacaagcgcctcctgctcctcgctgaagctgaccgctccccccgacacgccgttgtttccctccacgagagccatggctgcttcgatttgattcctctgtgtggtgaatcgagtacaattcgagctcaattcaactcaactgttggttgcgatctgagtccgaactggagcagagcgaggccgatttatataggtggatcggtcccaggctggagcggcctttcgcgctcgcgaggagccaagaagcatggagacgggatagccatgccatgatgccactccaactctacggtgagacgtacaggggggaaggaacaacagatcgacttggagactacggcggatatccattcgagccgaaaatctgtgtgccggatgcagctgcgagagcgggtagctgtgcctgcgcaaggcaggcatgccgcatgcttctgcagtgtgcgctctcgtctcgcctcaataacgtgggcggccgggcgcgcgaaaaccagcggcggctttaacctttaagaaaccaagtcaaatactccacgctctctcgcctctcctctcggtctcgggtcgtttctttcttgtccaccaagacgcaaaacggtcgtgttcgctcggtcgttcgtgcagcccaaaagtccagtagtgtggaacgttccacaaacgaaagtcacggccttttttgggcccggccagccagacactccgagaagatgtcgtttcctcgttaactgggctctcggttgggccctctacgtggactcgtggagataggtctcgttaattgtttcacttccgccgatccttatcgcggacgacggccggcggggtggatgcggaacgacggcgaccagcggcggccgtgccgtttgcttgcgaactagccgtgagcccatgagttcgatcgggcagtgtacgtgatttgtggacatgccaatcgccaccgtctcctctcctctctccgttcgcgcccccgcgaaacgcggtggtctaccgatgcgtgtttctttcctacctatattaggctcccatttgtgttcccatttgccgccttctccttcttctccgacggcgaacaccgtccatcgcgagaactcttacctcgtcggcgtcggcgtcggcgtcggcgaggaggagcaaacatttacggctggcttgcaatcttaatcgtacgtacttcttcatggcatatcttgtacagtatttattttttttaatccattaaaagcgtggttgtttttcattgtcctgtccgacgaacaaggccttaaaagttgacatgcatctcgtgaaaaggaaaaaaaaagaagcaacgttttctattgatttgttgcggccagcaacaccttttccattccgtgttctatccatgcgcggtttttctctatctgacgctcgtgacaatttcagttttgcagtgttcgtcattcaggaggctcccggccgatccggtggatcggatcggagcgggagcacaaactgcaaattgccacggtccttgcacttgatttccggagccaggagg

SEQ ID NO: 5549 - DNA, 2000 bp, Oryza sativa
aacaaactagcattattgggcaacaaatcgcaacagcctagctgaccatccagaaaggcgacccgcacattgcaaccaacttgcacgttccgcaccgcaccatcccatgttccgtgtccaccattcacaccctcgctccaacgcccccaagccccttcgcgtagcgctcgccgatctgaccgatccacgcatgcaacgcacggtggcatgttcacaaacgaggcgcgcccatccgccgtgcagccaccaacacgccacacgctgatacgcatggccgagaaaactaacgcaccaaacaagcccacgacgcgtcagcggctcaccgcccgggtgagcccacccggcgccgttcggtgcgcgtctccacgcagcggatcgggaggatatcgcggggaacccggcatggaacgaaccagccactccaccaccagcccaccacccacatggccccaaccccgcggccccgcgcgcgggcgcagccaagccgccgatccaccaaccccgacccgcaccgacggcccagatcgcttacccacgccgctgmacgcgtacgcgagggttggagccgcaaaattccagcgtggaatagcagcacggcatttcctccctctctctctctccacgggaggcggagataaaaaggcacgcagccgctccaagaaaccctcgcccccacgacgctcgctctctcctctctctccctcttccgccgccgcgcttggggaaggaaggagaaagcaagccatcggcccccgcctccgcctccgaagggtgagctgctcccgtcgtttgcctctcctcctccctcctctcctccttttttgggttgtgctcggtggagacggtgatgtatatatagatccgtggatctggctgtggctcgcgcagatctgcttgtttcttccaagtagacttgttacgcctgttggtgttcgagtggtaggagcccttgggcttttccaggttcagatcgacgcctccttcctctggtatgggaggatctcctgttcatctgttgactgggtggtcggttgcttagatctgttctatttctgctttattttgtgcatgtattgtgtggtttgtagggttatggctcccctgtgcgcggatcatgtgggtttgggtttcgtttcgttcgtagaatctttggatgttcgggttggctccgaatctgtagatcggaaggtcattggtcaggtggggatggtggggcagccaaaagggttgcgtttttttactggttttctttattttcactgacgtcgactagatctggtcgtctcatgtgcctcagatgcgtgatctgaacgcacacaacccctccaaacatgactctgtttctcgatttgatctgaccgtgaccgtattacagtaacgatccatccttgtttataaacttgtacagatttactagtataatcctgtgtttcatgcatgctagttttatacttctcattacctgttggtagaatttaataatgtgctctggaattgcgattccttttgctctgcacaaaaaggaacggccctgcttggacagggaccatccttttctgcgacctatttaaagttctcatggtgcgtcgtgatggtgatgttccctactgtgtagaacaccttatactgtttgtcatcaggagttccactgcaatttttaatacattcctggatgcatttttgtagagactgtacaattgtgtaattacatgcttatatatagttttttgggcttttgttcttggtaaatatcagtttattagctctttccgtttagtttcttaagcactacctctgtttgtacaccatgatttcttctaatgaatgaaatatctcaacaataaatctttcttctgcactgtctgttcgtatgctatgatttcttttgagtgaaatatctgaactacaaatattttgagtgaaatattttgcctgtgatcctggatttctaaaccagtactgttgccttttatgatgcaggacattgttgctagttggtg

SEQ ID NO: 5550 - DNA, 2000 bp, Oryza sativa
aatggcgattcttctttgtgagcagaaagaagtaaaacatatggtgtttgttcggtatagttatgcaggaaaacaccccaataataggggtcctagatgctcaaccatcctgactcgctttaaggcgatgccattcaaaatcatgattcatcttgctgtgatttttcatatggagaattagaaatcagaagagaagaaagggccatgtatgtggcaaagattgttggaatgtaaagcgcaaaatatgttgagcctacatgattgaattgtttggacaggtagcgcaagctacaatttccatacacttgtcatcagatatattacattgttgctgatgtctcgttgatacatagaaatctttctgcccttgctttacgattcaattgtgattttacccctactttttagggtttgtgattttgcccttgtttttctgaaataaagcagccgtctagccttggttttgatagaagtttggtgggtccggaatttcagatttaaacsgaagatagaaaatgttattatcatttttgaatgaccattctacccttacccttggttcaatgraagraccmaatccccaatccctatcccgatttccactccaaaacccggcggtggcggcggctacgcgcggccagagggadgaacgcagccggcgcggggccagctgccacggaatagcgcgcggcgagtcgggcgcgggcagggaggcgctgcggcggcagcgtcgcgcgcgcatggaggcgcgcgcgcggcggccggtggccccgcggtcagcgcgcgcggcggagaggagcggcggctccgtcagccagcagcgagcgagcagcgagcaggtagcttggcggcgggatggcgctgttaaaggatgtaggcaggcrcggcggcgacctcgcgctggagcgcaggctagggacgcagggaggcacgacttgctgccggcgggctggcgctcctaacctcttgccggcgcagggacggaggcctagcgctattgaaaatacaggattaagagacataatggagtaaatcttgtgcatggtggaaatctgctgcaaatcccctgttttctttcccattttcctgtcttgtatctgcgagagatttgtttggtgaatggtgatttcttcctgtgatgaatcttgttggtgaatttttgcacccgatgcaagttctttgaaaatgctgcagaaatgatgttaaattcttccaaaatttgtcaaagtttggtcaaattcgaaatatatacgcattatatcaagaaaggagaggcaaatgtgtaagggtatacaagtccttctactgctaagttgacgctgttaagtgatgctaacagaataggggcaaaacagagcttcgtttgaaaaaagtgagggcaaaatcacaaaccctaaaaagttagggtaaatcacaattgcaactcaaagtgaggataagaacacaattgcccctttatttataatgctctctcctactcatcctttccggactgctcggatataaatagcctatgatttggctaaggtggtccgaactccgaacacaaacacatttgccctatctatccattactccatgtcagaagcaatggcagtcaccatgccaccaatgagagcgccagctctagttgcaatgctggttgttgtactcgtcgcgttggtgcggcggcggcgtcaccggagcaagggcgccggcggccggctggagtcgttgccaccggggcccgtgggtttgccggtgatcggcaacatgcaccagatgctcgtgaacaagccggtgttccggtgggtgcaccggctgctcgcggacgccgcggggagatcgtgtgcgtgcgcctggggcccgtgcacgtgtcgccgtcacgtcccsgagatggcamcggagtgctccgcaagaacgacgccgtgttcgccgacggccgacgacgttcgccgccgagtcgttcagcgtcggctacgcagcgccagcatctcgcgcacggcgaccagtggaggaag

SEQ ID NO: 5551 - DNA, 2000 bp, Oryza sativa
ctaagtgtaaaacagaggattgcaaaacaccggaaaaacacaggaacggtcgtttgattggagcgcaggaaaaacgcaggaatcggatgagagagacagactcaaaggaaattttccaagaagttggagctcttgttaaatttcctccaaaatccacatgcaatgtgccattccatagaaatttcataggatttagaaagcttcaatcatttaaatcaaatggccaaataggaaaattttctatagaatttgaatcctataaaattcctatataaatcctttgatttaaaggggccctaagaaatgccacgagtagctctgagcagtacctacctaatcaagtcatgaagtactttggaggtgcaagagaagacttcgagatcagatcattgcttacgcttagacaactgtcatttgacaaagttacacttacaccggttccaaatacaatgtactacatagtacaaataggcaggtctgtcatgtgcagcagtgcaggtccggctggaccggctcattacctgaaaaatttcgaaataatataccaacacgcatgcatgcagcatactgagaacaagctctttttttctccagcattattaacggtttacataagtctatattgatttctagatattatctatatttttatcccttttgttttcacatctgagctaaatgatcatatatgcttatactacaaacataattattggttatagaattaaggttgacacatttgtccaataaaataggagaatgctacgaaacggtatccattcggataggatgatacctagaggtatcgcatgatacatgggtatcaaccgatacctatccgtatcaggtgacacaggcgacacctgggtatcagccgatacctacctggtatcaagcgatacctcaaaggcatcatcccgtccgaacggggtattagccaatacctactaggtatcaggcgataccttagatgtactatcccgtccgaacgggataccgttctgtagcatttttcttaaaatacaaccttggctcatgccattcaaccaccattttctattatctgtggggctcttcagcaaacaaggctgcggctgcgctgctgcagcccgctgcttactgttcgcgttggttgccgcagccacagcctcggcagtcaatcaaccctagtaaatttcatcgtcaaaatactctgcctttaatacatttttagtatgcaaagataataattaatggtatcataaatagaaaatagaaagcatgatatctctcagtaccctcagtacctaggatcgaaacaacctagttgtaaatatttacatactaattaagatgaatagtcgaatagtaaacaacgccatacatttagaamcgatagtaaatttgtagatactcaaggcctctttagattttaaccaaaataaaccttaccaagttttggtaatgccaaagttttggtaagatggtaatattgccaaatttttagcatgatttcttatatattgaccaaatttagcaacaaactaaacgtagatatttttttaataattttgctaaaaaaaatggtatggttaaaaatakaatcaaagtgaacatgccatcatatatgttgcaataaatgaacaccacccctcttgctcattcacaaccaaggtcatatatatgagtcttcacaatcccatgtcacatgatcatgtgatcttatgttcgcagccaaggccatattagtctttctccccccaaaatatttttaaaattaagaaacacatatcgatctcctttatatagagaccaatccagagtgttctggtggcaagcatcattctaagaaacaggaagcccccagggtaaagggaggcggccggcaagcttgtgctccttcccacctgcatctcctactactcctcttcaagggaggcggctagtttgtgctccttcccacctgccaccttcttcatctcctacctcgtcctactcctatcacatcataccacacagca

SEQ ID NO: 5552 - DNA, 2000 bp, Oryza sativa
tgataactagttgaaaccccacgcgttgcagcgggatattttgttgagattggtggttggctggttgcatttggtaaattgaagttgtataaaaatccctcactattgaattgggccacgatcaaattagatgggcctcctatcgtgaatgtggtgtgcgatggttagactgtgttttttcatctaacggttcaaagaagatcaaatctactgatccaacgactgagaattaacgatgatgtggcacattgaggtttgaactttaggatcttaattgcacttagtgggttataactttatagtaagaaaggatttggttaataaagttacaagttcatcatctatcaatcatttttaactagccaaagtcataacttaatcaaagcggaggaaggagcgaattccacatacactactcgactcttttcccttatttcttgctttgtcatcagtgacgggtcataagttacaacccgtcagagattagtcatcagtgacggtcatgtagttacgacacgtcactgatgactcatctgtgacgggtgacaagttttaacccgtcagagatgacttatataccggtcaaagatgagttatatgtgacgggtgtttcactcgtcataggtgattttgtcatcagtgaccactaatcactgaccaaagccaaacccgtcaaaggtgagggtttaggcccgtcagagatgacctggtccggcgtagtggatagtgcaaggaggcaacgaagcttctcccttccccttcctattccctatcacgccatctcactatggctgggagaagtgatgcctcctttcattaccttcccccgcaaactgagaagaggggaacaaagtcatgtagtgtgctttgacaaggttatgacctaggcgatgcccacgtgttgagttgttctatcatcttctcgcccacgtactcgtatgatgtggtatcttgctacagtagctttggtgacatggactaccaatgtgttgccctgtctcgcctagccaagttctatttgtatggcaggtgggtccatgacgtatagtgttgagagatwacmagattgtagttttgtgatagttgtatttgctaacatgagatttactctggtccaacaaaaagtatctcgaggtaccggtacctcacggtattgtagtagtcgggcctcggcacggcctaggcccggccgtgactgggccaagagtagtcgggccggtacgacctgacctacacaccgggccatgccgtgccagcccacgggccgcacatgactcgggccggctcgaaggcacgacagcccatcgtgcttttccacagaataagtctagtttccctccatcttgggctgcgacatatatatagctaaaaagtctattttccctccatcttcttttggctgtgacatataaatagctaaataagtctattttaggtctctattctttggaccatgacattaatatgtctatttttagtccctatactttgtgtgccgggcccggcctgccggcccagcgtgccggttgggaggcctaagcacgtcccggcagttggggcgtgccgtgcttgggccgggccaaaataccgtgccgtgggccaagccttcgggcctcgggccttatggccatctatacgcggtattaaattgtttccaatcgttagatctaacaatgtccatcttgtccagctagatccaacgattggatacaatttagtaccgtgaaataccggtacctcaagatactttttgttaaactgaagtaaatcttccaaattttacaatacaaaatacctcgaggtaaaaaaaattatgctacctcgaggtagcaatcgttggatggtaaaattactcgagaagctatgtttgtactgtcagttctgaagctagagcatcgcattccatcaaagatgctaaaaaaaaatatcatgtttcacctggaaatcacagttgagctccggcgatctgacaaacggttgctgcagggggagtgacgtcc

SEQ ID NO: 5553 - DNA, 2000 bp, Oryza sativa
ctgagagacaaatgtatacatttgcttccttcgagtgcacacgaccagtcccacttcgtgattggaggcgaccttcgtgacctcacgttcaccggtgtcgctcgacgagctatcctaaatcgatgagctaggtgccatccaccgtgagctatccccaagccgtgttccggcgaggaggctcctacttgtgatcaacgatggggcggtagcaggcaaatgccgcggcgatgtcgatgtcgatgttggtgaagagggaacggacggggacatgtgacgaggaggaggagagtgtcttggggatgggagagagggargggggtttgggcgtgtggcagaggagaaaacgtgacacgaatgggagtgggaaggacaacgaggggaagggtggacagcatggacgacgcgaaggtggcacattggagttgtgtttagcagtcgttctcttttcctttttctttagttttttttctctatggtataagccaatctggctgattgcggtgtgtaatcattttttttaatatattgacgtataattcttttgcgtgttcgtgaaaaatgcgaaggtggcgttgatgtcggcaccggctggcatgttgcaagcctgcttgacagtcgacgctgccctgccgggcttgatcaactagaaatttgctagggtccggaactcggatcagtcttggaggtaagggttggttagaaagggaccgaaccgaaaaaaccgaaatcgagaaattcgggtcctagatagtgaaataccggaatttcgttcgggtcaattcggttagtcaccttggttaaccgaatagactaaaaagaccggaattaataaaaaaatatctaaatgaaacctacaatctactaagttcaataggattaaactctaattttcacatccctgcttcttctaggcatgtaatctaataagagtctttactcatatgcgcttacgatttttttgttgaaaatttccattatttctttgcatatatgaaaatgttgctgaatttcggtcaggaccgagactgagacggaaaagatcaagaccgaatttatcggtcctgatattttttgtgttgaaattcggtcttcactttttaaagacagaaatgaccgaaagaccgaagaccgagaccgaaattttcggttagaccgaatgcccacccttacttggaggcccatggaccaataacgaatccaattgggggaacacagttacacaggtgctgaaacacattgcggcgtacgtcatggctgactcaaactaggcagagcatgcagcaaatgattggattttgggggcagtgtcattgctgactgcgattcgcatgttgttcatctccccgtagcttctctccggtccatccaaccgtgtcaacatcgtttaggcatacatgatacagcattacacaacgatcgctcgccggagtccggcagtcacatgctgctaatgctgttggtcccccctacttgaccgcgatcggccggttcttcctctgcctaaatggctaattttaaacgcctacatatatatatactcctactatacacatgtggttgatgattccgtcctgttgaaccaacccctgatctatcacgcattattggatcttgttggtgcattattgcagctgcgatatatcaatgtgtggtctcgtgcgttccctccagaaatgtagcgatctgagagacaggttcggatggccacaggctgctgcagctgtctgcacagctgcacagttttgaaattgaagggattattgcagtgtaaatacatgtattagggaatgacctaatatcaaataattaggagtgagacttgaatccggatcgactacccatcaccttgtgaagctagccggaagatctctttacgtttctcggattattgcagtgtactggcgtacattggcattgtcgatcgatgaccatctgccaggtgaaaacgtgcgtgaatcttgagtgtaaattcgaaggagtcttcctagcagcgcatagaa

SEQ ID NO: 5554 - DNA, 2000 bp, Oryza sativa
gtcattcaacaaaatgaattacagacagatgattagattgacacattggcatggttatgacctaattataaatggtaaaggaggcagacaaaacaatgccctccagcgtgagagtgttgttctacatagtgatctatgtttatttgtgctatgtttgttcagacaatactaccagtatgaacagcaggcagttatcaaacatcatccatcacattgttcagaacatatttccaaatggcgatgcctttccacttgaaaaggtcattagtctaaattctggtacaaaagtaacatgtgacccaaggcaacatagaattagtattagctaggaggtgtcatcagttctgtttcaatgctgactaataaaagaattaagtggaggtacagcagaactgaaaggaaagtaccttggaagcaatggtgtaaaaaccattatcaagagagtcctttgcaaaagttagccattcttcattggatacttgcaaatgaaggtcatcggagtattcggcttgtctcaggagcagagcttcatatctcatagcaaggcaactctagtgaatgacagaaattagcagaattagtgaagtagtggcagaaaaaaaaaagttgcaacaccgctagtttagtacggtacggtagcatgtgcagaatgtgtatttgcacgaggagaatgaataattataagggcatcgacatatgatgcgaattggattgaacatacagaactggagcacccgatgtgcatcgcaatcgaaacccagttaggtgtagaatgaagagcaaacaaaactagtggatatgtgcacatgattaatggccccacaatcctggccacaggcgctgaggcaagtcatcggtgagtgaggacctcgacatctccggcgagggcgaaggcgcgcgcgaagaagtcggccgtggagagggtggtacccaaatcggggacggaggagaatgcctgggcggcggccttgcgcagcagacagcgggcggatgagcgagtgtggagcagcgaggggacgtcggcgccggcggaaagcgcggcgtcgagtaggcggagctcctggtccccaaacctgagcagcgcgaggagaatcagaatggagcggttgtagaagactgaaatccaagttggtggatcgtagaggaagaagggtgtgtggttacctgcggtgggagagggcggaggcgaagagggagaggaggtgctcgtccccatccccggcggcggcggccatggcttgcctccctctctgctcgacgaaggcgaaggcgaaggcgacggcgacggcgattcccagagaatggatggaattggattggattttgtatttgggcctaggcccactaacgaactcgcttccaacgaagcccagcagaacttttgtccgttttctttttttctttaaaatgaaaacgttagctcgttctagaagtatatactatatagaaaaagaatacgagcaaagcaggagtctcgatgaatcaattttgtcaagagacaaatgcgctgttaaaaggagaaaagatggttttgtcactataggagccaagtaaacatatggttgcaatgcaaggaagagggtaccgtgtatatgtggctctgtgcaacacatgaatactgacgaagacagataagtatgtaaaaaggtggaaaaaaaaagaagatgataattgtggtggagagaaatagggcaatctggtccagagcgggcgtgaggcctccacacgcctccaaatgacttttttgtgtaggatatcgacaccgcatctccacagtccacactgtgcacgccattcttatcttgtctagcttcatctagctcctcctcgatatcccccttgtcttctctgctgaccaatcatcagaggaaggagagaaatttgccagcatgcattgcatctagacgtataaatttgtgtggaattttgtacaactcatcgcaatcaacttggaaggaaagcaataaacacacaaactccaccaaaccaagtataagctg

SEQ ID NO: 5555 - DNA, 2000 bp, Oryza sativa
actgaaccatcagttcggcccattaaggagttgggccttccaaactaactttcgcgcctcgctcggctgccttctcgcattatttcccctggattatcaatttaacttcactaaatcgaactaactagctataggcaaattttcgtaaatctcaataatgtttctctatttctcgacaaacaaagtttcaaatattttttttttcaaaaaatatatatgaaatgttcagtttgctagcgttgtggagagccacacggatcagcataacttagcgtaaccagaaatccagaatcaatcgacgaatcatcttttgcgtatccctcgcaggatgcagcaaccagcgagttgcttgtggggagatcgcctacatggcacaaactcgagagacagctatcgtccggcatggaacggacacgatgttgcgcccgtgaaatgtagtgcttgccgagtgcagagtttgcttgtggattagctcggagtgctagtgatcagtgacacgaatgcactgtacagatgtggacgtatgtgtacacgcctagctactctgctattttgcctagctgattgggtacaaactaaaggttgcagttcgttcagaaaaactaaaggttgcagacgcagaaacgcttctagagattggaggcgccagattcatacgaaaaatggagtccaaattccaaaaagggcttgccgaatgccagattatagaactgtataatctgatggtgacggcctgattgattaacagtttaacacttaacagcgtgcaaccaacgaaggccttgacccgaccggagtagtggttgaacttgaattaacttgtatacgaggtcttcctaggttgagttgagatgtacccaacccaatagcaacagtacaggagacaaatttgccctctcacagcaactcagcaagcacatttccagcccagcaatcacagcttcttaattagactactaccagttcaaacgaatgcatgaggaacatccatagtttccacctgcatttcagcggtggttaatactactccattttttgaaataattagttagaccatagtcgttcctgaagtcaaaaggttaactgatttgtaactcgttttgccgcatagtagttgaaaacgaggtagatgaaagctaagctgccgatcttgatttccaaatgcatcaagaggcttaggagctggtaaatggtcagccaaatgggctaagctacaaacggatggctttaattggttgatctagtagcttttcctgaacaaatttactctaaactataaggcacattttttaaatgacagcaagtactaaaaagtgaaatagaccttgaaaatgatacattctactcatcaaaccccaacaaaaagtaatgttaatttctggagcctcagaaatagaaatggttaggccgaacatgtgatcgaagcgatttgtgattattctttagttaattgtgccaaacaaaattcaaaattaagacatctggctctgctgtacgtactctagtaccaagtaccattcaactcaaaattgacactgaaaaacggaccatagcagttcacttataacaatatacacatggaaattacataggccgccatggctaccatcttatttgtttcgaggaaactaccaaaccctgttttgaaacgtaacacttgatatatgtatacattatccaacctccaattagtcgtcaatgccctacggcgtaaaagttcattagctagctaaccttggtctcccatctcatgttaggtttatgaattttgcactcacaaaactgcatacgacatgatcctgtgataataagtagtaatagtgattcgattacgcttaattcacttccaaaacccagagaccagcagatacgaatgttgccactataaatacacgtgtacgttaattcatcattaaaacgcatacctaacagacaccggccttgcctgcctgcgacacacgcagcaatctagctcgtcacgtacacgtaatataatggcc

SEQ ID NO: 5556 - DNA, 1788 bp, Oryza sativa
ggcttkgraattygggrggtacccgccaagsktckttggcctcgacaaggacgtmatsgsgccgtaccggmacgtcgtccccaayttcgctggccaacgaytccgccggctacgatgaccggccgacgctgctcaacttccagggcgccatttacaggaaagatgtgaatgccttgttacttactgtactctttaaaagattcttaggttcaggccaataatataatgcatgctaccactttggcttgtatagatcgagctgagagagaaactgaagattttttttggcagcagtagcagttgctcacgtacgctttggatagagtcgatatgtacatacacatatgagagcagcgtattcactgccgccgccggcaacggcagtgacgccggcgaaggaagagggagatcagttggtgttgcgagcgcatcgggtgatggcggagcagccgcggcggtaggggttgccggccttctgtgaggcgcagttctggtagtaggactgaccgcgcttattgcacgacaccttgttggcgtccagcaccgcgtagctcacctaccagttcgtcggccgccgcatcagcgtctccccggcggckgckgcggcggccgcccccatcaacgccatctcctccacctcctcctcgtcgtccacgtcgcactccctgacggcgccgtcgcacgtctccaccgccgccgccatctgccaccgccccgacgccaccacgcccatgtcgtcggtagcgcccgcggccaggagcaacgtccaccgcccgccgccgctcgtccttctccttcagcgtaagggagagggagagaggggatagagaggaggaggctgacatgtggaaccacatggccccaccttttttaattatttttatatgtagctgacatgtagccatatgggttctacggtttttattattttttgggataaaattgccacgtaagcgccaccttaacactatgtgggatgaagatctagttaaaggagccacgtaggcgccacgtcggcaaaaaccgtcctctatactgccaagggatctcgtttgtccggttttcgtaagttggggaatgggtcgtatccggttttgcggccaagagacgaaaatcggaccaaccgacaaatagagggacctaaagtgaacttattccacctgctgagtgctgagcaagagcatgagattacttcgccatggcaaggacaaaagcatatctgcatatgccgcgaggtttcgctgccgtcgacttttctcgatctctatcgagagttcagttttgtagcgatagtttatcttttcggcttttgacggaagaaaataggtctcggcgacagattgttcttttttttttcttcaccagatttttgtcacatgttatttactcccaagctcgatcttcttttttttcaaatagtttggatcatttattctaagctatttgttctatgtaaaataatctattttaatagcccgtgcaaaaatcatatgtgttgtctcagttttccaaatatgtgtttatagaggtgagtgtgtgaacgttatactgtgttttaaaaaaacatatatattgtaggccagctatttgctctaaactattttgtgttaagctacctgtactaagttattttgtttttttaatgtttcttaacgaaaaatgaggtatgtaactaggacttcccatgaggtctcgtcaactatagacttgttggctgacgggtggttagtacagcgctaccgatgccatgaaatggaatttggttaatcgtggagtgaggtcgatgtc

SEQ ID NO: 5557 - DNA, 2000 bp, Oryza sativa
acaatgtaagttattctagcattttccacattcatattgatacatgatgtatcaatatgaatgtggaaatgctagaataacttacattgtgaaacggagggagtaggctatatcaaaaaacactcccaagacaactgtatggagtgtaggatcataacatgcgtgattgtgtgcaatatattttggcatgacaattttttttgaggggaaatatgggaataacaaagtctttgatgacaaaattaattatttactatcgctttttatccactttcaatcattttcttcaggctcactcaataccaccaattaaaagtctgaaaaatatcctcaatctaaaaacttcgaccaagtcctagtagttaatcttggaatataaatccaaatcagaacttcagaagtataccttggcttcaagtggctcgcgacgaggtggcaccgtggcaccggccaccgggagcttggcgccacgacttgtaaccccgtgagggccgccgtcttcccccctcagccggctgccgtggcgtccgccgctacttctccaaatgcttcagccgagagcgattccccctaggctggcaaacttcctgtcgatgccgtctgctccctcgcgtggcagcacccgcgttgacgccacccgaacgcgggctcgccggccatggccatggccgcagccaatcggtctccttccgccgcgcggcgccgctcccgtgccgccggcggccgccgccgcaacgggattgggtcaaatcaggccgcatgtaacgggagactcctggtccaatgggctagtgggccgtaactgagttattgaggcccataaatacgaggccccagaacggctcaaggcctacccaggtcggcacataaaacgagaaagtcattagtttaagattagtcaagttttaattactagtatgaattagaaaattaaatttatttgtggttttagaaaaacctttgtatagaaagttttctcataaaacatatccttaagcagtttcgaaacgtaatagtgaaaatcgagatagaatctacatcttaatcggaaaataacagggttcacgcgggctttttgaatgaggcgagatgttaatcagatgatcactacgctccttgcttttctgcgcgatatgattctgaaccacttaagtacagtagtactagcatttagcacgacttcacggatctttagctaggtcaaacgaagtttaataaagctatcgtcactttaccagcagttttcaacagcacgactatgatagggatgtgttgtggacttatcactttgatgaattatggtttccttttcttggggtcgagggcaacagtatccctcacttatgtttccattcatctctcttttgaccattgccatgaagatgctttaccctggctatcacgacggagagtacaccatgcatgttatatgcagtcacgaatcatccatgattccatggacagccaatcttctttgcagtttgcattaccatgcaactcacccatatggattcatctagctagtcaatcatgggatattactgtactacctccgtctcagaaagatcatagtttcacgttatttatgttcaacgtttcaccgttcgtattatttaaaaaattaaaatttttaaataagatagtcaaacgttagagacgagaatccacggctgcatttaaactggtacggagggacggaggtggcaggaagtaggaacgcacttgcagtcttcctatgcggcggggcactactagttcctagattccgtatatggctatgtttagttcagcgtaaagtttatattttggttaaaattagagatgatatgactgaaaagttatgtgtgtatgacaggttgatgtgatggaaaagtactgaagtttggatccaaaatttagattaagcacagcctatgtatggtgctcgtgagtcgtgagacactgaggccggccggcgtacgtgctccctgcacagcggccgtgaacaattttccaaggag

SEQ ID NO: 5558 - DNA, 2000 bp, Oryza sativa
ttttccgtctgtgtatggcaaaaaaaaagagtaraktwaaywwmactatatgttttatggtttaagttggagaaaaccacacacattttgacacttgacacttaagtacatatattttggtagtttagtttcacaaaaacacactatcgatgaatggattcacccgtgagatgacgtggttgctccatttaggatgatgacgtagtatatcctattaatttcgtgagatggctagtaataggataccatgtcctcgtcttatgtgaaagagccacatcatctcgcgggtgaatccattcattgatagtgtgattttgtgaaactacactaccaaaatatttgtacttaagtaccaagtgtcaaagtgtgtgtggttttctgcaacttggactataaaacgtgtagttttgtaaaatttactcaataaaaaacggtgagtctttatgagtacttcaatagtactaatattagtagtggaggctcgaaccccacctcccggttggatccgcccctggacggatggatggttaggatggatcatgacgactcgactagtgctggagcacacagagagatacggcaccaacgaatatcccaaggatcatgccaagtgaactatggtgaaagtgatcgaccaaaaatcaagtaatcaacccctcggaacatgcacctcgaatattcgcaccgggacagcaacttcaccgcttgattacaaacttatatacggacacgacgattgcttcggcaaaatgctaccaaaaggtccaaagtaccaccggttcaggcactcgtatactcgtattctacaagcaacgaaaaagttgtaatagcacagaaaaagatggtgataccggctgtatccagaaacggcgatcagatgcaacgcgcacggtatttctacaacccgtataaggagaaaaacactagtatgcgttaacgttatggcagcaacaacttgccaaacctaacatgatccaccggagctccaacttgcgtgcacatctcgcctcggtttcgttcgtaaaatatataaaaagcgccgtctccaacgtgcaggatggcgagccaattggctcctcggctagttcttacctgtccgagctgtgttctccttctaccgttctctcctctccctgaccggcccaagtaaaggccgcgataccatgcgatgcagtaggactcaactgagaccgggtaaaaaatacttttctctacaaaaaaataaaaggactcaactgagcaagtaaaaccacaggcagcgtcgtttgtcccgacagcgatgctaacatggctcgagccgcacatggtggtggtcacccaagacccattttttttaggagtactattattgcgaaactacaaaaagacagccgctacgcacacacacgttttgtttattgcagggaatgtccaaaacgtgactggcttcgctggaagataacccaatttttcccatcggsgcaacgcaagttgaggagcccggcggcccatacatacgctgataataattagtagcctccaataatgcgcgcttatgcgcgcgcgcgcgcgccacacgcgtgttgggaaagggaaagcaaaaccataattaccgtggcaatagacagcgatcgtggctgttcgtgacacgaaagtgaaaacgacgttgacgtcgccggccggccggccagacaaacggcatgagaatactctgtgagcctgtgttgtgagttgtgacgaggcaagcaagcagggaaaggcccaaacacaaacacaaacagaaaggggagggagaggccacgtcgtcagccagccagccatttcaatcaccagttgctttaatttcttttcctcctaacaactacgcttgcaaaggcacctaacctaaccaggtgataacttgtccttgcaaatcactatcatctacatactccagtacaaatagcctcctaacccggagcctctcgttaccgagagagagagagagagagagagagagggcagtgcaggtgtcgctggcc

SEQ ID NO: 5559 - DNA, 2000 bp, Oryza sativa
ctaaattgtggtgtgagagggcccggtgggttgtccattgttcaaagtagtgggccaggccgtgagctgtcacagcacggccatattccctcgttgtcgagtgcttttccggttcctatctcaccgtggttagttcgtgtgctaaaattttttttaagtatatgaatatatatttgaattattaaacttagactaataataaaataaattatagattctgtctgtaaacagcgagacgaatatattaaacctaattaatccgtcattagcaaatgtttactgtagcattacattgtcaaatcatggcgtaattagactcaaatgattcgtctcacaatttacatacaaactgtgcaattggtttttttcgtacacatttaatgctccatacatgtgtccaaacatttgatgtgacggaaaagttaaaagtttgacgaaaattttttgacgaaaacacggcctctatctgcatttgctcgtagcctcgtaggaatatcgatgtgcttcatatgcttcagaatccctcgaatccgtagcaacaagcgttttgatcttaggtctgaattctgaaagctgtacgtagatgctagattgataggtaggtattcaaccctaccatgttgttgtcgttaaagcgtaggattccttcaaaccaaaaatgaggagaaaaagcgcgcacaaacgctacccccgtgaataaaacggatagaggcaaccgctagcgaacaaaacccggaacgaagcaactggtccaaaaagagaaccggacacgaggaaaaaggcacacgcccgagagctccaactcgatcagcaatgcaagagaggaaaaggcaggaacaaacgcctcggagagactagagaggggttggcaatgggccaatggccatggccatcacctaggcagccagccccaatccagttcatcgtctcgataggctgctccgggatcaaaacccggtggtccaaaaggagaagcaacaagcaaagcaaggattacccagcagcagctggttggtagacccgtccattgtcctctctgactctactcctccctctctctgtcccttttcacggccgtttttgggtgtgtgtggccagtgatgagtggactttgccgctcgatggcagacgacactgcattcactccgctgacacggcgattatcaaggctaaccgagacgtttcactgctgactacagtggccactagctgacggcctgacaccttggttctctttcgttgcctgttctgttcttccaacgccccgaaacctccggtgcttctcctgtgcaccagtcgcgttcggggcaacggcaattattagtactccgtactagtagtggcactcaatgttcggtatctgctttgtagactgacagtgatagtattgtactgctatacgttggttgcattgcatgcttgacactctaggataccccgtctgaaggtctcttggactggaccagaagggtgtacgtttcttgggcgatactttgccgaatgacagatgctttccttgtttatgattgtactggagaccaggttgtgatgatcgatcagtccatacaccagaaaacgggaggcatgtgaacctgtgactcatctgatgagccttgcttggagaaggcacataagtcgtgagcttgtgtatatgcataggttgagtgagatttgtactggtactccattcaagtacagtaatcagatgtataaccacaaaacatggtactgctactacactcatcatgtatagtgcaatcactgtgagttcaactcccaataaagagcagctcaattgctcatccatgtcctgctctgcctctccattcacatctccagcacatgagaaaaggtagctgccttttcaatccattaaactagccccattaaccagccagcgagagcagctagcacaagggaacagagcagcacacgaaacagagggaagcagagtagccgagagcgagcgagagacgcagagaagcgagcagggcggggcc

SEQ ID NO: 5560 - DNA, 2000 bp, Oryza sativa
ggtatatggtccgaccatttttagccctagctaggaacaatactacctccatcctatattacttgtcgttttgactttttacttgtaatgattgaccattcgttttatttgaaaaattagtgcaaatataaaaaatgataagtaaactacatttaataataaaataagtcacaaataaaataaataataattctaagtttattttgaataagacgaataatcaaacattaaaaaaaactcaaggcaacaagtaatatggggcgaaggtagtacattaacatgggcaaattgtacgtaggattattatcttctatatagatatatgatactatggcacaggtacctgaactggcatttatgaatctaaaatggtacaatggtagtatagcaagtttgagcacaatcacatagagagtaattcttaatagaggggcttacctttaccgcgcactgcaggaagggactgaacacctggcactgttgggccatctaatgaggagacaaagtgttaatctattggagtagcaggattgacagggttaaatgcaagcctcctgttaataggtcatcgaaatggatgacgaaacactgacatggagatccctatttcaggagttgagataaaagatatggtatgattagagctttcactgttaggagcacctagaagacaaagaaataaatcatcaataagttttccgctcaacgtaagaaaactgtagttgagaattgagaaaatgcaaagaaagttgaatatgcgaataatgcgtaggagtagcacctagcctgttctctgtctcatttgtccctaagttagttagctgagaaaatggtgttggtgttagagtgtcaggcaccacatccatcccaatcaccaaaccactcctagatatttatacaaaatggcaaaacaaaatcataaagccagcagatgagtacacaatggagtattatggaaagctaagcatgaatctaaatatggacacctttaatatgtgtatgttgtggacttggggcagcaggcaactatcccataaccactgtagcaggtcaaattcaattagaaaatgcttaattagtagggattattgaatcacatgcttgacaataagtaacttgcaccattaaaaatacaggtcaaggaaatctgtcatggtggtacataataaatcaaagaacgacatttccaagggcctaagggtttcttctgtacaacagtggggatagaaggattttcttgccaggactgccgtgggaaaaagagggcattgctccctcacgtgatggcgatggccaccggagaaccaaccggtcaagcaaaaggtcgtcggtggtggcgcaactgagtggactgtcactgggagaggagaggctgctgcagctcgtggatggcgacggccgtggacagatggaatggagatggtggagacgaaatcaccgagcagaagaccgcggccgtccacagctaagccaaagaaggcgcaaaaacacactgggcaagggagacggcgatgccggcggcggcgctggatggatcgacggaggaagcgtgtggactgcatgcagaaagagaagctgggggatgaatcatccggtggggaaaaaaatagacccccctggagagcagccgaggcttcctgggaagacacgcttaagggcagagatgcttgcagccacaatcgaaaggtgtggacaacatgcaatgattgtagtttctacagtagcaagacagcacgtggcagttcatctgaaatggtattaaaaaaaccttaagttttattgatgatacaaccaggactagacgaacaattaaattcaaaacaacaaaactagccgaacaatgacacgtcgctttcgtttagtaatacgggaccttttcatttttccttttccggcgagacaaataaaagtcgctttcgtaagccaaaggcccaaaaccagcctccgtctccgtgtcacccctggctggccacatcccccaaactccggtgactccggcg

SEQ ID NO: 5561 - DNA, 542 bp, Oryza sativa
  misc_feature (1)...(542): n = A,T,C or G
taawaaaargcagatgatccatcnatnacctgygatcggtgctagattaattgttatgaacattgaacagacgactggtgttgccagtaggaaaatcttgcatacggactgtacgtgaatccaattacagctctctcgatcccctttttctttgcatttcttgctgcagtactgttgcatcaatattattaattatcatattagtagtagtagtagtagctaggccatgccaagcgtgagcggccaaattaattaattcaacaagaaactaaagcaacttttaaaattgttttcaattgattaatttgctctctctattttttttctggtccaagaagcattgtctatccatccatgcatttgtcatctgccaactcacctacctgatggttgggtctcatatgcaatgtttctttgatttttgttgctatgtaggagtagtatatatagagagagggacctgagatgttgcttgtgagtttcagaggctaaaagctagctaggtgtagatagcttcttgtgatatattgcctctgcttgcc

SEQ ID NO: 5562 - DNA, 2000 bp, Oryza sativa
cttgcataatttacctctaaccatttcggctaccttcagatctagccatcaatcaatcaattaataagggcatttccaccccaataactagaatggtgttcatagcattaaataagttgctatctaggacaaaaaaataatatggcaagtgaataaaatgagaaaagagaaggaaaacatgtcttgcatgagacatggttcctacacaacatccaagacattatgtgagataagtagcattaaattaaagtatgaaatagtggtgtttgcattgtaagagtagtgtctagtattagtttcttgataatgtggagtttataaaaaccatatctagtgttatgggttgggactgtcctagctcatctaatcacagcaaacacggttacagctaattaatgaaccaacgtcaccaaagtaccaaaccgagctaaagcgttcaactgcagtgcaaatgtgcaaatgcaacggatgagttggtacactagtgctgtctcgcactggacactggtcatccgctccaaaaagatcctgtggtagctagtgtacctggctgcctttgtgtgcagtcatgcgttgctcgcctcatcgcctgtgtggccgagagactttactgaccaagcaattcaggtcggcagagtttgttacgtcctccaaggagaggaccatgcaattgcatgttgcgaaagcagaaaactggagagaccggggcacgctgtcggcgtcatgctacaagcgttcccttgcgtgtatgcatcgtccacctagtcacttggatgagagatttgaggggaacaaggctacaaaagtacaggtttgttatcgacaattatttggtctaagtgtagctgaaaacagtcgcgcgtatagcacgtttgattaatgctcagtcaccattttgtttcggtttacatgctaacaaaagtagggtatatcacgtcgttgaagtttacattttgtaacactcaatccagtagtccagtcaataaagaattttttttcattaaaaaggtgttttttttaacttattgtagtcacaggtggtgtttggatccagggacttaactttagtccatatatttagacactaatttagagtattaaatataaattacttacaaaactaattcaataaatgaaagctaatttgcgagacaaattttttatgtttaattaatccataattagagaatgtttactgtagcatcacatagactaatcatggattaattaggctcaatagattcgtctcgtgaattagtccaagattatggatggattttattaatagtctacgtttaatatttataattagtgttcaaacatccgatgtgatagggacttaaaaagtttagtcccatctaaacagggccacagtctatgtggagcatgttcaccgaacaccgataaatattgcaaagcccagaatgattttggtcccacatgccagaaactaccacacccacatttcggttcattttcagctcaggaaaatcgtccaacaatttcagctcaggaaattaaatcgtccgagaaaggaacaagtttggagccgttgggatgagagcaattaggtcacgcttaactacaagtacagtctcattcatcgacattgattagccagcaactaaccacttaaccccgagccagcccaagcgctccgtacgttcgttgggcccccgccgcgcaggcggagacaacggtcatccggcgcgccggtcgctctccctcgctcgcacggccgcaccacccacttcgccacgaacccgacgcgagcgcgacgtgcatctcccaacatccccgccatttcctccccacccaaaaccaacccgcccgcgtgcggctggcccactttacagcgcctcacctcccccaaccataaatccccgcccttttccccccctctccaccactcaccacgctctccactacacgactcgtcgccgtcttgctctgctgcctctcgcgcccgcgcagcagtgagcagcagcaagagcagcaaa

SEQ ID NO: 5563 - DNA, 2000 bp, Oryza sativa
gtgggaatcggcaaaaatgtcctccagtttatttgtaattcacgtatcgcaaacatgctgttgtgtttcttacggaaaacccttcgtgtttcagacaagtacaacgctaagatgagaaaatttcgccttttaggggtagcgcctgtaaaccataaaaaattacgaatttttttttttcgaaaaactagccacatagatatgcttatccaaaccctatccggtcgcctcccacctcgcccacacttcgccggggctccacatctcctctcctcccacagtcggcggtcctgcctctccccatccggcggcctcgagcttgagctcctcttcctcttctctcctccgatggctggcggcctcacctctccccccatccggcggtcctctcctcggtggagcctcgaatcggacaacgtcgaccagatcgacacgacaaggaggttgaggcagatgtggatcgaggcggccttcgtcgggccaccactgcggacgggtcgaggtggccgtcgtcgagctgctactgcacaggttgacaacgacgatgagcgacggcttgtaaatacatagtacaatatgtacatgagcaatccaggaggcgactccaccaggtctgaaccaccttcctagctcaccaccttgccaccatcggcaacgtcacccacccacttccgatgcctgccctctcctctcctctcacattctttttctttctctctctgcctaatacagatatttttcttctatgaattcaattcatattttctcgatccataaacactgacggcaagagcgagccatcacagacgacactcttgctccatgtgggcatcggttggtgcctagagagctgatttgataggatgaggttggtcggtttgttttgaacgtggactaatcaacgtgaagcagggaagcctttagaggaggttggcttgttcggtttagtaggtggttatagaggtggtattggccggacacaatgtacggttttttcctaacaaactaagcactgtatgttttttttgcataatgtatggtttgatattttttttcttaaaatgttatatcttctttaatataataaattgccacaccctttttaaaaaacctgatatgtgtccataggacctagccatgtgaagtctacatttgacaaatcaaattgatcaggtctgggccaggtgtactatgcccaaaattctgtcatcatcaaatccaaaaagcaaggaacagtctcttatcgatctgtagttctctacttaatagagttgatcacttaggttaggtatatagaatagtaaccaccactaccattatagtattacactatagtactactacatcacaaaggcattagacattaattaggagtaagagcaaatcttgtggagaacctttttgtgactgtgtcgggtaaccggcatgaactcaacctgcggcgtgcacaggacacagtgtgatcagatcagataatcagattagcagcttagcttagcttagcttgcttacgtccacactactttactctccgttggaccaaatcactaaactttgtcgtaaactcgtactacctccgtgccataataagtgtagccataagtttccgcgtccaactttgatcgtccgtcttatttgaaacttttttataattagtatttttgttgttatgagatgataaaacatgaatagtactttactcgtgacttatgttttwaatttttttaaaaaaattttcaaataagacgaacggttaaagttagatgcggaaaaccatggctgcacttattttgagatgtaggaagtaaggcataccgcacaccacgtcctgggggtcaggcagtcagcctagtgaaaaagataactgtgcaagctagcttctcgctctcgcgcctataaattgggcgctcgccgccggcctcagagtgcacacacagacacacagacgcactcacacactcagcttaagcgagcgagcgagtgaacgagagagagagacagag

SEQ ID NO: 5564 - DNA, 2000 bp, Oryza sativa
gcggcgacgacgatgacgtgggagcaggggagctctcgccgtcgtcaccgagggcccaaccacgatcttgtagcaacgtcggtgcggcgatgaaggggaacctggcgaggagtgctagggccatgtcggcgccgacgtgcaattggtctctcccccctatccccccacctctacaagctcctctgtctcaccgtctccacatccgcctcctccccaccccgcgccggccgctcccggggacccacccatgccaagccccgggcccaagcccccgcctctcccccctcctcctcctccttctacgtgcgccctagcctcctcgacatggagcgtggctacgccgccagccgtgcraacgtcgaccttttcctwacctgtcggcgttgaacccaggcgagttcgccggcctcgaggttccccgcaaccgttgacgttaatgcgcgagcgcttcgagttcctaaactccctcgagcgcgtcaagttcttgaactccctgggcctttccgaacgacgtgactatggaggggatatctccctccgccggccgcggctcatctccccgcggctcctccgccggccgcgcgccgctgctccccccgctgcccacgactcctcccccgctgcccgcggctccttcccccgtcactcctgccccagcctccgtgcctctcggccttgtcggcagcagtggcatcgtcctccaccgtcgttgccctcctcacgaaggcctcggtggctgacgctgcggctggtgcccgccgccactccgctagccgtcgccccttttccacccgggctcgcacgtgtgtatcgttgtcgggtgcggcgacgtaggtggaggcagaggctgacgctgcggctggtgcccggcgccccttctccgcccagcctcgcgcctgtgcgtcatcgtcgtcgtcgtcgcgatggagcttggtcgtcgactcgccccacctcgcccgcacagagaagacagagagagaggagagagaaagagagaggtgacgacgtgtcacctgacatgtgggtaccacgcttacttagctgscacttaaatycaaaccggggtcaaaccaccgaaggatctcsgggtgactggttttgtatagttaagggacctgcatatctggttttgtgtttcgagaacgttttttatcccgatgacaagttgagggaccttcggtatactttttccaaaacagaattgtttagtaccacctcgcccagccacgatagaggggagccggaggcgctgtatataacgcgacccgataccaaatcacaaagcatacctttctcagccttttggctaagatcaagtgtagtatctgttattatcagtttaatatctgatatgtgggccatattyccatggatattaaattaatattttgtgggggarggtccaccacggtagctcgctactgggcgagccctggctttgcactgctgccttggcccggcgcacctgtaaaattttttaagcttttgctcatgttaatttggtttaatcattgaccgaattaaactgactaggagtgaaatcattgatgaatttttgacttgacttgacttttcagtgaatgattttaagatttatttgtccaaactgagttattttggttccagtttatattgaaaaacaaacaaacgagaggtgtgtatttggtttaatcgttgaagaaattaaactgactaggaatgaaatcattgacgaattttttactgactttttagtgagtgattttaatatttatttgtccaaactgtgagtgattttggttccagtttatattgaaaaacaaacgaacgagaggtgtgtatttggtttaatcattgacaaaattaaactgactaggaatgaaatcattgacgaattttttacttgacttttcagtgagtgattttaagatttatttgtccaaaccgtgagtgatttttggttccagtttatattgaaaaacaaacaaacgagaggtgtgtttggtaagcctcgtctcgaa

SEQ ID NO: 5565 - DNA, 2000 bp, Oryza sativa
cggcggtkggagggcccgaccctctctcgttcacatytcggcgggggcggcacggggaaggaggaggttgcsgcggcgccgacgccgacgtggggagcgagcaggaggaggcagcgccgcggggaggagggtccaaccctctctctcattcacatctcggaggcggcagcggcacggggaaggaggaggcggcggcggcgcggggaggagggcccgaccctctctctcattcacatctcggcggcggtggcggcacggggaaggaggcggcggcggcgccgacgccgacgcggggagcgagcagtaggcagcgccgcggggaggagggcccaaccctctctcttattcacatctcggcggcggcggtggcacggggaaggaggaggcggcggcggcgccgacgccgacgccgggagcgagcaggaggacgcggcggcgtggggaggagggcccgaccctctctctcattcacatctcggcggcggcggcggcacggggaaggaggaggccgcggcggcgccgacgccgacgcggggagcgagcagaggaggcggcggtgggggcaccggcacgcggagagaagaacggcggctgggacggcgcgaggagggaggtcgtggcgttgcgccggagagaggcaccggcggcggcggcggcgccggcacgcgatgagatcagtggcgacggggccggcgcgcctagggaggatggggcggcggggaggaaagaagcagaggtgaagagagaagagaggagaggagaggagaggagaagagagaagtgacgggtgggtcgaacatgtaatagggtcaaatgagtaagggcataagagacgttttgtgctatatttaacaccgttagatgcctttaacagaatagggtcataccgtttcttcattttcgaaaaggagggtcaaataagcaaactttaaaaagtagggtcaaattggtagttaggattcaaaacggggtcaaataagcaattgccccttgttttttattcggacattggacaagggttgtaaaatagagatgagctatttggtagggcttctacttttaaaattggctttaagagcaaagttagtggagttatggagcagcataaacataaattcgcctttctagtttatttgtgggagtactccaactagctccactcctattttgaatggagcagaacctgtttggttaggctttagcttcaaaagagatagagatggagctcaagctctgctaaacagaccttcagtctatatcaaaataacctgaaagcatacgatgtttttttatagtccctatattttttaagagtgaacttttaaagtttgaatgcaagctattagctatgctttctttttttaccaataaaatcattgttgaaaataactctcaacaccttgttttttttccgtgacaaaaggattaatgtaaccgattagaaaccggaaataatactcctacttctattatctcaaaaagaaactacacattaagagtacaattgaaaggcaaaacaatagttatcaatcactatcagggcccatactttatgcatttacgcctctattatagaattccaagcaattgaaaatataatctttttttaatacaaactgaaaagaaatataatcctacaaggaaaaggacgtctcatcttcacaaaattgcaaaatttacaacactgaccctaaacacagcccacctgaatcccaattacacctgggacccccgactcgtacaccaataagccatcgcctcgagacttccgccctcactgacaggtgggcccgactgtcctggccccacacgtcagtcaccacctctcccgcgccaacgccgcgctgtatataaaaaccccagatatttcttcgcctcgttcgcctcctccctcgtcgagacctcgaagctgtgaaaagaccagaatacccctcatccccaaaagccccaaacccgaggaggcgagaggaggaggaggaggagctcgtcggcggcgagcg

SEQ ID NO: 5566 - DNA, 2000 bp, Oryza sativa
ggctgatggagtgatgagtgaagtttgtggttgtggcccagttatgccatgttgcccttctcttctattgcatttatccgagtgtcctccatatgttccagttggagtgttgggaccagtttcttgctattctgctcactgtgccaagtgacttcaacagctatattggtgcctctttcatatgattagattctgcagcattttgaatgattttttgactaacttttatctgccactgaactacttgattcttcatatggaggtccagatggtccatgaatggaggaaacacccaagtcgaaatcgtacataaatattacgcacacatgagtcgatttttaatgggtttttttttttggataaggaaatttagtgaggctaaggatttgtcgcttgtctctctttgagcatgtgttagaaagacgctctcacacatgtaaacgtggtgtgcatgtgcatctttcgtgtaacagtaacaagagaagttcctaaggctgtgttcgttctttccttttggattaattaattaattgtttataaacttaaaaaatagatttgtttgattttttcacaataatttctacatagaaactttttacaacaaatgtatcatttaacagtttgaaaaacatgttaagagttgtagaaaagaactaggccaaactatgttcggcaatgcaggatggtaactaatcactcctgcacgtaaaacggagcgatctattaacacgtgattaattaagtattagttttttttaaaaggatcaatatgatatttttaaagtaattttgtacagaaaatttttgcaaaacatacttatttagtagtttaaaaaacgtgcgtgcgaaaaacaaaatagatgagttgggaatctgaagttccgaactcagccaaatgtataatggtgcagaggtttggaatgcatagatgatctgtcaggttcaaaacccaccgcttcagcgtggaaaagcgacgacacagttcacggccaggagggcacagccggccaggacgacatgtcgacatggccatccatgctttttgccagactggtcttcttgtgaacgtcactagcgacgaaacggttttattatgcaaaagtcaggtctgatacaaggcgcaaagaagtcgattttcagtttctactgaggtgtagattagatcaaaagcgtttgttaccgtgtacgtgcatccaaatacagtttagatatagcagttactgtggcacaatacacaagtgccaactaccaacttaacatgatgagtattgttctcaaaaaacatgatgagtagttagttccacaatcaacaaaaacagatagataagctcaaaaaaaaaaccaaaacagatagatgcatggttagttacaaagagcataatttagtaccgaccaatgattagattgaacagaaaacaataatgggtttggctcacagccgaactgccgtcgtttttctttgttttgcatggtgcaataaatcataccggagagattagttccaaactgaaaattcaacaaccaaatgttctatgcttgctttaagactatctcaaagaaataattttcaaagtcaccgaatttttcctccaaaaaagaaaaaaaaaacagtttgcgacgcttcagaacaacgtaaaactcgataaaatggaggggtttaatgaaaaaaatggagcatctcccaggtgccaagtctcctctcgaaccttccactcggcgcaagccacccacacgaggaaaaagtcgaaagcgaaaatatattcacagaaagccaccccaccttgtatttaattacacaccctcttcgactctttcttcctcttcactccccggcgttcggcgaattttkacacgcacacacacaaaacccctcgaccaaaaacccgaattcgaaacgccgcgcgtgcgtgagagagagagagagagagagagagagagagagaaaccaccccaaaattagcgaggcsaggaggaggaagcsgaggaggggagccgcagga

SEQ ID NO: 5567 - DNA, 2000 bp, Oryza sativa
  misc_feature (1)...(2000): n = A,T,C or G
tatgtgacgaagggagtagctagtaatcctacgtctaaaccaaacattttggttcgaaccaacgtgacggccagatggagcatccaggggagggggcggcaccatgtattcgtactagataaaatagagaattattctcgtgggtctcatcattcctaaattatgtgaaaaagcgttgctcaaagaataatcgaacaggtatttttttgttgtgggtccatggccgatctttggtacgtgaactagcattagagattcccttattaggatgataactaggattctctcgtcgtaatttccagaatgcgacaacggcaatactattgggtattggattttctgtcaggattctgatttcaacagtaaaatgatatctttagattttatttctgaaatatttcgtgatacaatggtataaactataggtgttttcgaggtaaactttgagaagggggacatggagttcctgtttcatattaagaagaacmaaaaattagaagaaaaaccatacaactatacgatttattgatgaaaaaccgtcacaaaacccaactctggtcatctaaacaacagaccatagcaaaacaagcgaaaccgacaaaccacctatgcgcatggcgatggaaattagttgtcagaaaagtattctttagcactctgtgatgtaaaatagcacatatctcctcttttctaccaaggattttttttgcaaaaactgctaaatcttccctgccacacagtaatagaatctcatatccacagtttgtctaaagtcaaaactgaaaacggccttttatttcctgttggtagcttctatgcctcatgtttctgctaaggcatatccgtttatttcaatagaaatgggaggggataatctctctagtttaaagaggaatggaaggttatgccattttagaatccaatttgaaaatataccttgktttttcanattttacgtttatatacatgtctgggattaatttgccaaaatataccyaatccgcagaaasgtttccccggaaccatggcaaaccgcagagtgggaaaycgggagcggaacccgagccggtcgcgtgaaaccgggatgcgcgaccgagccggtcccgcagtgccgatgtgcgggagcgatggcgccctcggccgcgtggcggtaccgcggaacggctacgcgggaatgcgtaggcggctgtgttattcccccaatttttctaactcatctcctttttccgcacacgctttccaaagtgctaaacggtgtattttttgcaaaaagtttctatatgaaagttgcttaaaaaaatcatattaatccatttttgaaaaaaaaatctaataattaattaatcacgtgctaatggactgctttgttttccgtgcgggagatgtgttcgctgtttgggggaatgatgcatgcggaagagtcggtcccgcacatctggcgtgcgggaaagaggctggtcccacgcatccattatgcgggagcgtgccagctccgggcatcgcccaaaaaaccacgttgctcctgcaggactagcgcggtactgcatccccggcctgcgggaccggctcggtcccgtatcccggttccgctggaccggcttgggtttcgctcccacatccctattctgcaggtcgtcctcgttcccgcgtagccgttctgcggattgggtatatttttacaaattaatctcatgcatgtatataatcacaaaatatgaaaaaaagtaatatattatcaaattttatacatacgtccctctcggaacgatgctcgttgcacgcattagctctagaatcactatagttatccgagtagcacgtacaatcaaacaaacgacaactgatttatcgatcgatgtagaagccctatatataaaagcagagcctatccctcatcgctgagccacacgcacaaactgcacaatcaaatcaagcgttggagagaggaagaaggtaagctaagcaaagcaagcaaagctagagagaaagtgacagcagca

SEQ ID NO: 5568 - DNA, 2000 bp, Oryza sativa
caaaggttttcaggcctaacctgccaaggaggcaaggctctcaagacttggtatcatatatttaaaacataaattgttcaacggatcaaacaattgttggcgagtccagcaaaacatagctctatgtgtttgaatcgaaagagtcaaaaaaaccgatctttgattaatagcagatagaaatgtcaacacgcttgcatcgaaggcacgtcactgcaagtgtcttcatgaactgaacacatcgaaagatggaaaagatggagaggaagattcagaaacgaacaagactcaccgtgcggtcaaattccaggaacacatttgatccggtctttgaatgcactttagaaatcaatatatgcagttcgttactcctcccgaaaagaactcaacgaagtcgtattatgctcgaaatgattactgcaacactgactcttctgaaagattttcaggtcatgcaattttcagtacatgcctgaacctgaattttcagagcaatatctgaatacctcatttttaatccaagagctcctttagaactctagaggaatagtttgtttgtgggctcatcagctgcaacaaaaatttgaatttcgaacctaattttagagttaattttaagcatttttcgtcgtagtttatttttcagcattgaaatttaggggttgttctgattatagtcaaaataaacattattgtcaaatttttggcaatttggtaatatcgccaagttttggcatgattttttatgtgtttactaaagtttgataaaaaaaactaaatagacgcaaagttttggcaactttaccaaaatttggtatggtttaaaatgacataaatccgaacaaccccttagtaaatcgctaagaagtaagaacacatgtataataatttacccatatattattatatctcgttgcctcgttcatcttttaaggactagtaatccatttcattaaggtcctgttcatttctccaataagagtcggatgaagttaaagatttttgtagcacgcttttcaaactgctaaacggtgtgttttgtgtgaaaactttctatatgaaagtttctctaaaatatcatattaatctattttcaagtttgtaataatttatacttaataaatcatacgtaaataccacctcgttttacgtaaaaaacttaatcttcatcatcttcattttctggagaaaagaaaaccacctaaaccgtagaacaaactgtgagaggttaaagccacggtgaaatggtggtcaaatgtactggaaaataaactagtgatccatttcattataaactaatcaaggttatgaagaaacaaactaatccttgatagcagagagagagagagagaggcaggttttgggggtgtaataaaaacggggtacagacacacaagtggacaacggaagcatcaactgccccggccacccgccgtgtttctggagcgccccccaaaccaccccacctcacacacaaacaccaaacacccactccccccaccacccacctcccgccacgagtccacacggccccacctgtcattcaccccgtactcattcattgccacctcccctttctcccccttttccgtttcccacgcacggcttccgtacgcggcgccacgaacgggtcactgacgcgtgggcccaccccctcgtgggacccgccaccagaaaggcgttacaataaaaaaatatttcctggcacttttgcacattggcccctgggaaaacgtggaattgacagtcgcctccctggagtgatgtaatgtaagcccgaggtgaggtgggggaggagagagaaattggtaacgaacgccatttccgatttctctctctctctcctcttcttcttcttcttcttccccaacgagcgactcgcctccacctcctcgacctccacctcgcgaggcggcggtgcggggggccccaaaccctaaccctaattccgctgcgcccgcgcccgcgcccgcgcgcgccgacaggctgttgttgttgttgcc

SEQ ID NO: 5569 - DNA, 2000 bp, Oryza sativa
ccagatcgtctcgttcaccatcttgtggagctagccggaagaccctggacgtttctcaaatttttggagcccaacatatacgcagacataattggaaacacaatggaaagctcaacatataagacatcataatggtgcgatctattggcttcttaaccttagttactgctccctccggtacaaaaatcttgatgttttaaccttgtaaatggtgattgcgaattgttaatgcttctatcttagcatgttatattggaccgctttgccctacatgcttggaagtaaaaaccaagtaaaaaagctagggaattggacctttagctcgcaccgatacaggtgattaattcaaaccaacggcagcagtgtagtgattaccatgagtacaatactatatttaatatggtaaaatagtaaattgatactgtaatatggagtaaatcacttcttggtatgtgagatcatgttcaaaacatcaataattttgaaactggaaggagtacacactgcccttctcaacttttaaacgctactatttccaaaaagaaaactttaaaatgcaataaacagatatgaaaaactgttccctcaaaaaatatatgaaaaattcaaaacaggaaatgcggtagtgctagaaatatgaaattatgaactttaatcagtgtagtttgtattgaaattttaatacaatggggaatgaaagcttatataaaaataaaaaatatatagaaaatgcaaaacaatatactaccttggtgcccccattaacgatagtactagagattgccaccactaagctaattccggtctatgagtctatccaagtgcttttacataaaagagcattgtgagctttgctgataatgacatagatttcggcaaaatatggtaccaaatgctaatgcctttcctgcaaagattctgattctaggagttgatagatacctacataatttttaggcttacttttttttcaaaattactttccaaattgttgaaatgaattttgtgctctacgctcctaaaatatattttctcaaaaaaatattctattgtattgcacacttgttttaagttcatttattaaatgtttaatttataactacaatcaagtagataatctgtacaacaatccacttaataatccttagattgtgtttgagtgatgaaatgagaaaattaagaagatacaacaaacaagatgagtcattagcttatatgaattgagtattaactgttttaaatttgaaactatatgaattgagtattactttattatatttatctataaacatagttaaacatgagacagtttgactgaccaaaaatcaaaacaacttataatctaaaacggagggagtactggttagtggtaggaactagcaacgcagcacatatgtgttcaatctgcattaggtttttggttagagagaagatactagatattaacacgtttttatcagaaagtactccttctgtcctatattattaggttcagaaaaatgtatctacaagttctcataatattaggatatgtcaaattaggtaggtttttattaaccccatgaagtattctgtaggagttttttttttagttttagttacatccgtacaggtaagcgttgaccggttggaaagtggactagtctctgcttaccggcaagagtaggtgtggaacaaagggcgtagtagcctgttatacaacaggtagaaaacaatggtggacagcagcgtgcactagctagctggaagagggttaataggagtacacgacgatgagtccggacaaactggtccagtcacatcagggcggttataacagctagctgcccatagggcaccccggaaactcgcacgcgtggacgacgatcgttcgtgtatcaggtcaaacatttcgacacagaggaatagttcccgtgtgcaaagtttcttacttccatctcccccacaaacttccatctccttcagaaatcccctatccccctcctcctctttctgtctcg

SEQ ID NO: 5570 - DNA, 2000 bp, Oryza sativa
tacaagcctataacacatttgcaaacagcatatttgccaaaaaagaataatttattaataaaacttgtatatacgtgtttttagtgatcttaaagcaaagactgaaaaatgaattttgatcaaaacccccaaaatcaacttcaaatttaaagttgaaattttaaattttgattgataaatataagtataagtaaaaagataagtaaacagatattcaaccgtgaatcgcgtaataagttactccgtagtataaaatttattcctcaaaagaaaggataaaattatggctctggcataaaacaattagagcaagtttaatagtatagcccactactaacttaaaatcatctatagccaatgtaatagtcaattcatacaatagttgcttactgtactattaatacctggtcccacctatcatacatacattacgtattgaagtccgtgctgcagctgactacagatctgtagcccgctgctcttctctatctttttttatctctttaaaatatgtttatagctgacttaagcttgctattatacctgctcttaagggcaaaaccatcttttcaccccataataacgttaggggtgggcaactgggcatacatttggttcggtcttgggtcatgatcaaaatttgaggatactaaaagaaacgcaatcaacaataaatcttgttttaggacatatttcaaaagtgaacaatcacaacaacaaattatatataacaccaagtaaccaatatagtggttttaattttttttttcaagcatgatacttccttcgtctcatacatatataccatcccgtactatttttttttgggacgaaaaaatatttatctgagttttagctaatgttaattcggttaagagactcatgattaaattgaccgtattaaattcagttagtaagaagggttagaaaacgataggcaaataaacgataaatagcaatagatcaatcacataagacataagatttaatgtggaaaatcctctcaaaagcaagagagaaaaagccacgggtgccaggcagcaaatatcttcactataacgggttgaggttacaacgccgaacggcggcttacaagaagtatatatgaaggtgaaacactaaagtgataaggatccgtccgaagctagcctttatacatgtggaaatgaatccttgagacgaattccttttttagcataaatgaatccttcaacctaaacacccataaagaaaaatactttcggtgccaaataacctcttgggctaaatcactataccaactaagtttgagcaaaaagcaatagaaaactagctttgtcatcatttccgcttcgttccggctgaagcctccgacgacgggcctccgcttcgctccgttggaagctagactttatacgtgtgcaaatgaatttagatcacaactcaacaagaaagagaccggaaatttcggtctcatttctgttagttcggttggttttaatttattttgtccacccctaactaacgttaaatcgacgaaaacctactaaaacaacaaataaatgataaaaacagttcgaatgagaggcattacagccttacaggagagtgaattttacaagggtaaatgtctagctcggttaactttagaggataaataaataattttcttaaaaaggaaaaaagagcacatactaattaatgaaaatcataaaacaaggagctccaggctccagtaagcgggagactagtctagaaaagagtgggtcctgctggacagagacaagggaaataagctgatctggaaagaaaagagaacatcagagagtggagatcactcgagatgcttcaagaccaagttctgaagaacctataaatacgcccaccttgcatcgcatctccgcattcaaggcagagctagtagtggtcacatcgccaattcacagtcgaatcaagcaaaccatccaaatcacacccaactcttcttcttcccatcctccagagatccaagcagcttagcc

SEQ ID NO: 5571 - DNA, 2000 bp, Oryza sativa
tcatttgcacacgtataaagtctagcttccaacggagcgaagcggaggcccgtcgtcggaggcttcagccggaacgaagcggaaatgatgacaaagctagttttctattgctttttgctcaaacttagttggtatagtgatttagcccaagaggttatttggcaccgaaagtatttttctttatgggtgtttaggttgaaggattcatttatgctaaaaaaggaattcgtctcaaggattcatttccacatgtataaaggctagcttcggacggatccttatcactttagtgtttcaccttcatatatacttcttgtaagccgccgttcggcgttgtaacctcaacccgttatagtgaagatatttgctgcctggcacccgtggctttttctctcttgcttttgagaggattttccacattaaatcttatgtcttatgtgattgatctattgctatttatcgtttatttgcctatcgttttctaacccttcttactaactgaatttaatacggtcaatttaatcatgagtctcttaaccgaattaacattagctaaaactcagataaatattttttcgtcccaaaaaaaaatagtacgggatggtatatatgtatgagacgaaggaagtatcatgcttgaaaaaaaaaattaaaaccactatattggttacttggtgttatatataatttgttgttgtgattgttcacttttgaaatatgtcctaaaacaagatttattgttgattgcgtttcttttagtatcctcaaattttgatcatgacccaagaccgaaccaaatgtatgcccagttgcccacccctaacgttattatggggtgaaaagatggttttgcccttaagagcaggtataatagcaagcttaagtcagctataaacatattttaaagagataaaaaaagatagagaagagcagcgggctacagatctgtagtcagctgcagcacggacttcaatacgtaatgtatgtatgataggtgggaccaggtattaatagtacagtaagcaactattgtatgaattgactattacattggctatagatgattttaagttagtagtgggctatactattaaacttgctctaattgttttatgccagagccataattttatcctttcttttgaggaataaattttatactacggagtaacttattacgcgattcacggttgaatatctgtttacttatctttttacttatacttatatttatcaatcaaaatttaaaatttcaactttaaatttgaagttgattttgggggttttgatcaaaattcatttttcagtctttgctttaagatcactaaaaacacgtatatacaagttttattaataaattattcttttttggcaaatatgctgtttgcaaatgtgttataggcttgtagtaacggggtgtgatacaaaatcctttaaacgtccgtatttatcatgctgaatgaataggttggcaagtgtttaaaaaaaaataggttggcaagcagtgggtcgctgattaatcattcgtcgttgtgcagaagcatctcgtcttgcagctacctgattaagtatatgtgattaacactggacaaatctggaacaaaaattaaatccggctggtctttctaaatactccagtttaatacagtacacatcaaatctaagtaggcaatcattgatttcatccagaccagcacttgggagtgtggagactagtctggactgggaagcaaagccttttctagaagggagcagatcaaatcaggagcaccgaaacaaaagtagatgactcgagacgcctcaagaacgtccattgcgcagctcccggacaaatcctataaatatgtgcaccgctcttgtgctgaaacccaccgaggaacacacaacaaacaagacttgcatacgtcccaaactcccaaatcgccctctttgcaatcgcttcttccgttccatttcagtagcccacaacttcgcatcagaaagcgaaagatagagcaacc

SEQ ID NO: 5572 - DNA, 2000 bp, Oryza sativa
atttacttataattcatcaaacgatatattagcgattaaataatttatggttaaactatgtatatgttcttcatgacttaaatatcgatgttagaacagaactacaatgataaaacctcaaattcaaattttagtatcgttatatacatatatgttcttcatgacttaaatatcgatgttagaaaaaagaactacagcgatataacctcaaattcaaattttagtatcggtataaacattgttggataaaaaaaatatggcctttatcacttctgaccaatgcatgaatatttagcaaccaatttttgtaaatttataagagatgtgaaataagcgtagcataacaggttaggttaggtttcttgtgatggaactcgagttcaaattctagatttgatacgggtgctcacatttatggctaattattctttcagtggtagacgatatacccgtaaatgtctacggtgactttatgtagggccagtcttttgaaggtgctcatagagtagggtgttcgcgtgtatgttcatacgggtcagtgtgtacgtgttgtagacgtctgcattgtattgtgtttcaaaaaaaaaatagaagtttaggaaaaggaagaaaaatgcatcaattacattggccctaccaatataattcatggcaccaaaccaaaaacaaccctaaataagaaaggtagtacatataaaatttagagtgaattacactttggaccacctgttactgttgtagttttatattggatcatcactagttcagtcttatcactttggactagctaaatttacgtccgttgtactttgaaccacccaaaacctcttctttaacatgtaaacgacctggaggatgtcaactctgacacgctggcgaaatcatccacctatgtctttgccgcggtataggatgaacatgggtagagaaaaaaatcggggtgatccaaagtgcaatagacgtgacccaaaaagtgtaattcactaaaaaaaacttaccaacgaagcaatgctttggcagtgatttttacctttcagtcatgggcatgacctgcattgtaaaataacgtggttgtgaattcaaactcaaatgtgtttttctttcacaagttgccgttaaaaatatgtttcgcaagagactcactgctcccagtgaaagcagtgaattgaagcattcccgaaacccactggaatgatctagtactcactctacgatgtacagtgaagtaatacttcaaaactggtgtaatttggtatgccaaaaggactccatagtttcacgacatatttccaaacggttcaggatcagtactgcccatctgcctggggcccacactagcgggcaattggttctcgtagtttctcgttctcaatcaatcattccatactcgctatcccctccatcacagaataaatgcaacaatgagtttccgtgtacaaatttaatcgttcgtcttatttaaaatattttttaaaaaactaaaaaacaaaagtcacgcataaagtactattcatgttttataatctaataacagtataaatactaatcataaaaaaaaattcaaataagatggacgattaaagttgaacactgaaattcatggctgcttttgttttgagactgagggagtacacgataagatttgatcgcaatcaaagtaacctacatcaaagaagcaagatatgtgggggaaaaatgaatactctagagcaaattaaggtgagccccgctttgtagaggctgatggagtactggagcgacggaagcgaagcagatcgagtgtgctgtaaagcgaaacgagcaagaaccagagaagtccagagatttcaggacagattagttgtgaacctataaatatcctgcctcattccccaacctccatccatcgagccaagactgaagcatttgatcgagctccaaacaaacactcgttccaaacttcctccaatccacttcatacaaagaaacctaagcagctagcgatccacgacaaaccaaca

SEQ ID NO: 5573 - DNA, 2000 bp, Oryza sativa
cagcacaaatcgacttcttcggtgggttgaaaaatagtttgctaacatagcaagttgaccgagattgacttgctgactcaataggtgtgacccacatgtcgggggtggcgtcggttgggcctcatcatgctgcaccgcaccacatgcaaggcatcacggctgttggcttagtgacaagagtatggaagagaggagagtcgctaacatgtgggttcatctgttggctcagcgagttacttgtagtcaatctgccacatcaataaaaaaaacacttcccaaactacccaaagaatcgatttgcactattttttaaagatgtgtgagatattatacctgattttatggttgagagagttgattcaaaccattcaatcaagaaaagagataagagacgcaaaatagacttattctaacgagttttctgctccatgaacaatggattcatggagctttggaaaatgggccttaaatggtgtggtagggttgtgggttatactgctatatcacttatggccggtcatctacttccatttcaattctcaatatctattcggctaagaacaaaaaatccatctcattttattaagtaagaacactactcaactgagattttttttttacaaactcatgtacaaggaggtatacttacctctataaacattcacacgtattgacatatcctgatttaaatagaacacacatattgcgatgcatgatatctatatacgatatatggacatttgtacatacgaattgctttaacacgattttcttatgttcatgtatctatcatctattacattatatttgagttatgttaaacggtgtgtttgtattgtgcatgcaaatgtgtggatagcgagacatcgtataggtacgctattctgccaatttccatgtaaccaacactaggatttgcccatttaaaccaaccgttttgttaaccattttggttggcatgcaagcacatgtaaatagtgcaaccaattaggaaatcgcctcgttgtgcccgttctgtcacacgtcactgtacctagacgtaaacttgtaaccgaacaaatcgatccgagacactgatcgggctgcccagacgccacacccatggaaacggtactctcccaataccatgggccctgtttagctctaaaatttttttttcaaactttcaaatttccatcacattaaacctttcgtgtacacacacaactttcctaacagcccatgcaccggttaaccttacggacgcagcctgcgccgtccgtccccgatcgcacggcccccgggacggcgcgaggcaaagccatcccctcttccgttcggataaagcgcgcgcgtgggcgtgggcgtggccgcccgaccggagaatacccccgcggcggaggcgcacgccaacggtggaatccaagccagaaaatccctttcttctcccgctctgcctccacccccgcatctctctccctccgccgtgccggttccccctccctccccctccttccttgcgtgccgcctccacttccactgttcttccatccaccccaccccacaccaccttctcacacccgattattctattccatttcgcgagcgaacctttacagccacaaccttgcggcgggtgtgagagaatccgccacataattgaagcggcttcggctgcagcggcatccgatcaatcatacaccgtggggggagttgggagcgagcttcgcggcgcgtggtagggcgatggaggcgtgctgctgctcgtcgtcgtcggtgccgtccgcgtccatcctcgccacgggcgccggcctccgccgccggttctcccctgcgggggccggcgggggttgggagggcggtggcggttgcggcagggcgaccgatccgcgcgtccgcggctctgctggccgcgcccgcgccgcggcggcscgggggcktcgtcgtraggscggtkttcgascggttcacggarcsggcggttaaggcggtggtgttctcgcagcgggaagscscgcggg

SEQ ID NO: 5574 - DNA, 2000 bp, Oryza sativa
cgaagtcgctttcaaaaagccagagagagagagagagaaagatagatagagagagagaagggaaagggaagagagagagagaagcagatcagcagagctcccccatctctcgctgtctcccctcctccacgtgtagacgtcgacgacgagttatatacgttcgcacgcgcgcacgctcgctcgctcgctgccaccgcctccttcgctgccaccatctccttcgccgccgggcaccatcgccggcggtggccgggttcatgtaatgctattgttgctcttcttcttcttcttcttcagcttcttgttttgtacagtagtaagaagggaggaagaaagtggttgttttcctttctttttkgtycgtttgtttggatgttaacgagtggcgaaaagttggagtcgtcttgtgtgcgagaaaaagcctcgatttctccgggtgtttttggatctctgaatctctgacgctgatgcgtttcttgatgtgtcagactaagacagagaggctttgcttgttcttctggcgcgtgtgcttggctcagctcaagctggggatcttcctgtggtgattcttttttcgttttttttctttttttttgtgtttttggggaggtgaggtcggcaggttcggttttcttgtggtgaggagtatctgtcaaaaggctggatttttatatattgccaaaaaaaaatgtgttcttcaattttatttgtggctgtcttgccaaatgatactagctggctgtttggctgaataaagtgagaatttgatgcaaatcctttgttagattgtgtgtgcatttgtgcttctgatttctgaggcggcttctttgatggagttagttgcaggaaaattgcccctgcttttgattagtttgttttggtttacctatttgatgatccaattaggatattttttaaatatttttggtgttcttcgtgtttcatttgaaaagttcttggctaggagaattggagcaaagactaaagatccaggccttatgttagtaatttcactccgactattttaatctctggttctttgtttttcaatgtgggtttctgtgttctttgcctctgagaagcttaaactagtttttgttgtagtggccatcaagtcaacttggatgagccgagtagttcaaggagcaattaaacttttgcagaatcttcagaattatttattggtttatctggagtgcttgtttttttgaccaagtccaaagtacctgtaattcattagctgcatttatttgttttcttacaactgtattatgtgcagacaactgttggtttgctattatgagctttaatggatgatgattcttgatggtcaaaaaaatcgatttgtgtgcaggctgtcctgaaggagtggaatgctcgtcggtgattagtaggtcaccagaatatcttctctcctagcctcctgggcttgtttacccaatttatcatcaggtatttctagctccatgtaatcagccaaaaacaagttgttcttcatttggtggtcccttccctatgttggcattggtgcagtaaggagatctatgcttttgttgcatcttgtaagcattttcctccaaggttatgcttattttcggttgataatccagtttcttttttttaccataagttcatcctggtttcatatgcatggatgctttttttttctcctgctatttttttcgtaaaaaaagaatgcatctttttcctgtttcactggttaaaagttccattcaagttctgagcataatacactgaagatcttcagaagggagaaaaataaattagttcttcagaaatagatagccagattgttattataacgcaagaagcatcacatggatgtgcaaccaacatctatctaaagactgcaatctaggatacagaatgaatttatcttcatattccggaaagcaggtttgttaattaatctctttggaatttctgtggcttgtagcttcctgaaatctgaagaaaataaattcggttttactaccacc

SEQ ID NO: 5575 - DNA, 2000 bp, Oryza sativa
gaaaacagtgtttaattttatttctcctttcacaattcatgtcatccttgtcatggcaatgtggcgctcatgtctccacatgccgcatctcaactaccttccctaaggtagttgcccaagcatttagcacttgataaatatgagaatgcatgattctaattagcatgactaagcatttgttcaatattgactaagtacacacgatagcagggtttacaatggtcatacagataatcaatatcaaggcatggcatatataacaagtagtacattcatattcatatatatagcatgcaattttatttaaatcaacataattttcgtaataggttcaacatgctcaaagattagtgatgacttgccttgatcgcagtcttgctgtccctgctcctcaatcgactcaacaattccctcggaatctaatttacgtgcgaaagatcggatttgaatttaattagcattcaaataaattcaccaaaattcaaacagtgcaaataaatttgagaaaatgatactatcagatagatcttgattttagatgaatttaggtttaagtttcattcaattccgagttaaaatgagtgagttatgctagtttaaagattcaaatttgagttaattcgagaaattgtgaaaagttactgttcctaattcatttgtttttattccgatctgcaatccatwaaccacagaggctggcacgtgggccatcttcctatttcttttctcggttttattttctaatggaattcacgctgtgtcattgacaggtggggccggcacttttaattaagggtaatccgctccttttaatcaccggtgggtcccgcttgtcgttgacagcaaacataatattgactttaaattagattttctaatcaaccggacccaagcgtcatagactcggctaaacatcattagggagaggattaacgtgcgctaactactatgtgggtcccacatggtttctctttcgctcgttctttttcttttcctgtcgtcttcttccttccgctcgcggctgagccgagaagcggcgcgcgacggtgcaacggcccgagccggaacggctcggcgcacggtggggcaagtggctgcacaccaccggagaccctccggcggcggcggcgaggcgcggcgacccccccgacgcgcggcgcaactgcgcgtggtggtgccgagatcacgggaacgccggcggcgcaatggagatcgattcgagtgcaaccggctacgatttaaccatcaagggttcatagggaktgcagaaaagcaaaaacctagcctatgctgcattggaacgaggtctctccacggcgagctcaaccatggcgcggtggcggccggagtcggcatggctacggcggcgcgcaccccaaatcgagggggccgctggcttctaaggtgtccaggagctactacaggcgtgagggcttaccacggagtgacggaacggcgaagttcgacggcgcgtggcacggtgcggtcgaaacaggggcagacggcggtcggtgacggtcgcaggtgttcgacgcttgtcgtccctcgcgtagcggctcccggctccctccaacagcagcaacagcaacgcggacacctcctcaacacaccccgccacccataccggccgagaggccctgcggcggcggcgcaaccccggcccaccaggtgttcgacacccggcggcggcgcgattttgtttctctgagatggagcaagaactctgggaaaaggggaagcgaatgaggggttgattttggatgaggacggggtagaattgagcttataacagcgagaggaagggcgatttcttaatggataaggataatcgatgactcggctttggttcgatctcacccaggttctggttcaatgtacaggcgcggcatgattgcctacgcgtagtatacaggagaggtctcgctagctgggaaaaagggcaccgcattacccattggtctcaaccgggggcgacaagatggagacgcgacggggatgcg

SEQ ID NO: 5576 - DNA, 2000 bp, Oryza sativa
atagttttacatatttcaccaaagtttttggataaaacgaacggtcaaacatatagttaaaagtcaaacagcgccaaatattttagcgacggagggagtatatataatcgtacaatgtttcgttttggcagctctgtgcatgcgacgcgacgcgatacaatgggaggcaaggcaaaatgtcatctctcgtaccaatttgttttcttctttgcactggaaaaaagatccgtgcatttcaaagggaaaactaatatggcattagcatttagatgatcacggtttgattttcatgatctaaccccttccaaaacaaatatagctgattttcaaatttaattttcggagttgattttgattttccttttatcgtagcttatttttaagcaagagcttttaagtcggcacgaaaaaatataaaaaaaaattatccacgaattaatatttgatcgctaatgcatcacataagcatgtcttgaccaatattcgaccagttccgtatgtataataaggctctacgtatcgtcttttctgtttttcctcggtccatctaggagatgtgccaaagtgcacatatgtcgagtcctggaaacagcaggagatatggggacgtcgtgactgaatcgcgcaacgcgtgcacttgaactcacaacgcacactgattaggagtggaaacaaagacacacagcaccgaaacaatcgggccagggccgatggatgaaaaatcagtatggactcgagcaaggtaccaaaatattagataaaaaaatatttttaatgtttataatagtgaagattagttatcgcaggcactgcacttcagggtgaacgagaagctataggtaatggcacactatgcagcatagacgtgcaatctctctataccactcatcctcttatgggattctctatggccggatcgattgcatggtagggatgcaagggctaacgacgactattgcatccgtctcaaaaaggatgtgtttctactatttaaaatttatcctaaaaatattatacctagaacctaataactaattaatttgagaaagctaattaggtgaactaattggctgaacatacctagcgttctatgcgggggatgtgaaatttctttatcttccattttaagtttactggttcacttatatatttgtccttgtaaawttaacgggttgtttgtctaatgctctttcatctcaatgtgttaatagtatagggtttatatgctgaatttgtctcaacttttttaatttatttttggatgtgtggtctagctagtttggactgaatataaaaaaaaatggagaaggaaggaatcaaacctagggtggctatactaaccgtgctgctagccattaggcccaagttagttttttttttgactaaattttgtcgagtggtaaattcttttgagaatttttcatgaatggttttcgaatacataataggatatccctcgagggttcaaatgtgttaccggccgaactgcctgcatacaactcccttgtggagtacaaattaatggccgcccagaattctggattccggtagtgtatgtatatatgtgacctattatattcccacttgtattaattcttttacgtgtttaattatatcgactttaattacctctcacaaaccatggtatgcatgcaacaccatgtaatctagattctagaaggatatatatcacccttaattagcctttaaaaagactctcccctaatctccaaaacgacaaaccaaaccaaaccaaatctttcagtccttgtcacacagatctcagagagcctcaagtctcggtcaccacagctctactgtctatctagctatctatcagctgccttccatcgtcagcacacaaactacacaagaatctgcttatttataggccaccttgtcccttctacaatggtgcaagaacacacaaattcacacacacactgacacacacaaaccgatcgattgattgattgataatgaagcaagagcaggtcagg

SEQ ID NO: 5577 - DNA, 213 bp, Oryza sativa
aaaagggcagcagcgacgcctcgtcacctgtctcgcgcgaccgggcgctgcacagagcggtgccagctcgcctcccccccgtgcgccatcgcgccaacccaggcgcggccgcgcgcccamacgtgcggctccccggattcgcgccgccgcggttacaaagcgcgccccagctcgcgtcgcgcgggggcacggcaccacgacgacgacgagtca

SEQ ID NO: 5578 - DNA, 1286 bp, Oryza sativa
cckggaagcaggtcggcaattagaacgtcaacgtcgaggaatcgctggattgcgctgcgcggtgtgcagcagttaggtagctagtcatgcatgcgtgccttttttttagtaatactactggagtcgtagtagcagcaggttgattctctgaatgttctagtatactctttcttatcgtgtcgtgctgctttccaaagctacccgtgctcgcaaaagtatcagtaggaatgaatgaaaataagcaagtttgggagattgatgcaaatgaaaacatgacatcgtctgatcatgccttccatgcgtgatctatctatcttatcttgaagtatacatatgtatagagaagaaagagataaaatttgatccaatcatgcatgcgtttggtggaacggaagggaagggaatggaatggaagaaaaggaggactagtaaaccttttactattccatgaccattactccatggtctagaaccaagggagggagcgtgcgctgtggaaaaggggcctctttggttcgaaaaaacccccccgacccgatcgattctgccgacgaaaagatgaaaagtagaagtagagtttgttaccggtgtgtgtgtggcgtcactccatcgttttcccctgggcggggtggcctgttgttattagcgtatagtagtaataaataaacgattttgctatatctcactcgaaagattttttcttatctctcactcgattttctcactcaaatttacagtgcattttcttgtaagttacagtgtaatttatgaaacttacactgtaacttttgtaagttacactgtaatttttaaatcttcacatgtaaattttaaattttgtattggatttggtctttttcttgaggatatggtaatttaatgtttattatggtgtttcttaattgctttttgctttttattatatctatcggaattttaatacaaagattgaaaaatctgtgtgatacgattataaaaatctttcgaaagatgtataggtactcccataaataaataagaaaaggagtacaagtacagtaatggctagcaatcaattagatagaggcccttagcttcctccttgattatgttttggagtattattggggatggatggagatcatgtccaccgccaaacagagtgttggaaggtgccgctctgccctgttgatatgctctcccacgccgcccatccctctccaattcctcctgctattagaccacaacattccagcagaagcagatgagggaatagcactagagtagagagcaagcagagaggcagc

SEQ ID NO: 5579 - DNA, 2000 bp, Oryza sativa
taatcagagcaagaaaaacaacatcactataggtgatgcagctaagaattttaggagtaggctggtcaccagcttcgttggaacattctgcgatcttcagtaacctgttgccagttaagctaaagccagtagtgatgtcgtcagaggcagtgatcctgcttgataccagctggattgcctggattactagtagcagtcatatgtgcatggaagtcagagtgtagtatcagcagacgtgatgggcaatcaactgcacacagcgaacgatcgcgatcagaacagtaagctaaaactctctacagagcttttgcttgcctgtaagatcaagaaagatatggcgctgacagtgacagtaatacaaactactactgctcatactgcaattgtttgaccacctgaaattaaacctgacgagaacttgctctgatcatagcaaagcaagattgtgatgatcagcttcatcagcagtagaagagagacagtttctgaaaagaggaagacgatggcagagaaggttcggtttgaggagagcaaagaaagaggttgagttgcggggaagcgggagcagcactgtaaaacggagcaaagtgcagagtccaagggtcaaaaaagtccgaaaccgcgggatttcggggtggctggtcggctgctgcatgcctgcatccctgcacgactgcactagtattagcttggaaaactgggcaacagcagctagaaacgtctcccaaaacctgtcgttagtctcaaggtaaaccaaatacccgtattatacttgatgctgtctccctccctacctcttcacctgagcatggttcaatagaccagctgcaagtagtagtagtacatatttagaaaaacactgttcatgggtggcttggcagagcgagggtctatttggtagagatttaactcctaaatttagattcaagagttggatctggagtgagttgtggagcagactaaacctagctctacttctctggtttattttgtgaaagagctccactcctattttaggtggagttgaaattgtttagctgagctctagattcataacaggtggagctggagttggagctatgccaaacaagctctgagtgtgatatgtcaagtactattactaatttatcatgctaaaggcccttttgattccgagaaaaacatagaaattttagagattttaatcctataggaaaaactcctatgaatggctatgaatcaaaatgattgaatcctataaaatcttgtgaaattcctgtgaaatggaaaatcctatagataccttggatgaaacttagcaagagctcaaggctcttggaaaatttctaatttctaacgagtttatctctctcatccaattcctgtgtttttcctacggtccaattaaatggtcattcctgtgttttacaatcatatatcttacacttctattccttttagcattatgtgctctttctattctttcattttttatttcattattgcgattcaaaggagcccaaaagagttaaaaggagtgtcagttaatgcgaacatttgtttggtaagaagaaatcaaggtaaaatattaaataatctaacttgatttgttgtaatatcttataaacacatggttttacaggaatcagtttaaaccctacaaaaatcactcttggcctccgttgcaagggattttctttatgaattgtgtgggaattaaattaaacctatataaaagaattcatgcgtttctttataggagccatgtaaaccaggttcacctaaatcccaccttccttgtttcaactctaaatcgtttactaaaccaagaaattacaaaaaaacatactcctagaaaatgacaagtcagcctcttgcaatcacacaacacatagccatccatccatccaaaaccataccaaacttgcacaaactcctttaaaaccacgccacccgccgccgacgacgagaccctttccctccgtttccacacacctctctctctctcttcttcttctccg

SEQ ID NO: 5580 - DNA, 2000 bp, Oryza sativa
tgaaaactgagcggattctttctatccgctctggaggaaaaacgaatatggatatctttcggagcaaataattcctcaaatagttcagatacgaatacgggtacatatattttctcccggatacaaatacaaatatggtatcggggttttcgacggatgcagataataatacgaatatccggcgaatagtttcggatatccgctgaagccatgagaccccatttctttacagctctatgaccttcaatatagctttttagattttaatagtagcgcacctcttaacactagtccacactattaatattatttaaacttttaaatattttgttaaattatactatattttatataaattgagctaattatatatgatgatgtttgtttctattagaagttgaggtggttttcgtgttccgagaaaaaaatatttccgtactcatgtccgatcatatttgatcctaattcgtattcgagataattcgtatttgtttcggtatctgagctattcatatttgttttccatctggcaaaaaaaaaaagaaaatgaaaatgaaaacaaacatggtatgagcattatccgtccgcatccactccgttttcatccttagtggtgagggtagttgatatctgggttctttggccccatatgtcttttattcaccattactattcctttttaaatgagtatagacatttctaaacaatgcaaatgtgcaggttaacaactagctatagacattccttggcaatatattaataatgaacacgcttttaaaacatttacttttagaattcggtataaattggagtagagaatagaggagaaaattgccccaaatattttgcgcttgtatagtatttttgttctggcttgttcttttgttttctgcttaaaggggcatgcgcttgagatcttaaggtgtgaaccaacatgttccacatcaaatagatttattttaaaaatgaacaactctgagattttcatttactaccattgatctgacatactattccctcaagttcttcatttcttatcattttggacatgatacccatattaattagggtgtatattatttattctacccatattaaataccttgaagtggtatatttagagatctgagagtgttatgtttaattggcttaggctttatttgttcgagatttttggtaggaactaaacaacagcacaccaaaatatgaaatgccattatgatatgattaattaagtattaactatgataagtttttaaaatagatttatttgtttttttaaaaagttgtgtataaaaagtttttaaaaaacatatcgtttagcaattagaaaaatatgctcatcgaatatgagggaataactaagcccaaaaaactcagaagagcattactattggaatgaaaggcccagttccgatttaatgagaattttacaacttcgctgctaataggtttttttttttcactgcatggcgcatagttggaaataataaccccattaactacaaagggcaatctcgacctataccggccaccactaaaactcttcaacgacagtcgacgagaattctacatccacacgcaacaaagaaagcatccttatttcaaccacttaaatttaagcctgctattttttttttgtcttgtgtctttacttctattcttttctttaattcttaagtccaaagtcaaagtcataatcacttacagagcgtgcagaaaaaaaaagaggaaaataaggtggcctatcatgacttttgttgggaaaaattgacaggtgaaagagctgtgataaagaagcaagccgctgcagattgaattgctgggtaggatatttctaggctggggccataagacagttctgcaatcttcagctcgtgctgggtgctcttgcatctcggatttgctatcagcaaccaacaccatgtcctccagtacgttagtgctcctgcagctcctataccttattagccttatcctaccagccttctctgccaacg

SEQ ID NO: 5581 - DNA, 2000 bp, Oryza sativa
ttttttataatttttagaagtctcgtcaaacgatgccactatactcatgtgcggcccgtccgccgcctactcttttattgtcattgtggttttaaaaatagaacataactatcgttggaattcattttttttattttctagaagtcctgtcaaaccgtcggctctgcaactgtactcctatacaccccgtctactgcttctattttttattgtcattgagattttaaaaatcgactatgattatcaatggggtttattttttttactttttagaagtcccgacaatcgccttgctcgtttgcttcacagcctgttgtcgtccctccttttaattgtcattaggattctatttggtgttttattaacattttttatatgtcgtatcaaccgccatcactctacttctttataggcatgttacttaatttatctcgtcatatgttttagatggtattttctttcaatagtctttatttttatcacaaattttagttatttataaattgtattcctaatttaaatcttatttttctttttctaatttcatattttctttttcaaatttcaattaatatcgtattgtgttcttttaatatttttattttttattttcagtttcagttgtttcaaaattgtattcctacttgaactctcttttaatttttctaattttggttattattttattttttattctgaattttaattaatctcgtattgtgttcttatatggattcttctttcaatattgcttatttttaattccgatttttagctaattttaaattgtattcttacttgaactattcttttttgttttgctatttcggattttatttttatttttattcccaattttaattaatctcgtactgggttcttatatggactcttcttttaatattccttatttcaattcagaatttcagctattttaaaattatattcctacttggactctccttttcttttctaattttggattttattttatttttatttagaattttgattgatctcgtattgggtttttatatggaaacttctatcaatattgcttatttttaattccgaatttcagctatttttagattgtatttctacttggactcttctcttcttctttttttctaatttaggattttattttatttttatttcgaattttgattaatcttgtattggattcttatatgtaaacttatttcaatatagattatttttaattccgaaatttcagctatttttagattgtatttctacttagactctcattttcttttttttctttttctctgattaatgtgggaatttttagcccccacagcgaatatggtgccttcttttcgagctaatataatagatagatacgaggggggcggtcaaatagggcggagagagaagatgggttgatgataataattgggcaactctcgtcgtcgtccggtagggagtaaattattaggggagagggagactggactgtttgcaataaagcaatgctagtagtagtagtagtatattaataccgaaaccaaaaccgcagtaggggggaggggagagagcagcttgccgtcatgccatgtgatacatgataggagtagaaggagaagaggagagagagtgtgtgtgaatcagtgaattaaggtggtataagtagcaagcgccaccggggagagttccttgcttggtttggttcctctctgcttctctctcttttcctccctccggcgaccaccagcataccataccatcgccggcttgcttgcttccttccttccttccttgggggagagagagagtgtgtgtgtgatggggacggggtggcggagggcactgtgcacgtcggtccggcgagatccggagcaacaagaggtgaagaggcgaggagaggccccaagcccccggtgtggaggaggcagcaggctgggtggcttcttctccgccatctccagcagccatagcagcagtaatccagcaacaacgacgcccaccctgcg

SEQ ID NO: 5582 - DNA, 2000 bp, Oryza sativa
aaaattttacatacttgttcttaaccatttaaagcaaacgctaaaaaataaacttctaaaagaaaacctcaaaatcgactttaaatttaaggtttagagaacctcaaaatcaccggacagtcggcgacgttgttcatgtcggtacgtagcgagcgttgaggcattaggacttggatatactatggctgtgtttagatggtagaaaagttaggaagttgggagaaagttagtagtttgaagaaaaagttgatagtttatatgtgtagaaaagttttcgatgcgatggaaatttggaaatttggaggaagtaaacacggcctagctcgatgtatccccgggcggtacacgtacgtagggacggctcctgatagcgatgcgagttcaccgcccatgtgaacccccggccacagcattcattcctgtccggtccggtcaccgacctgcctgcacactgcactgcactgaactggcctcactacacgcgcttccactgtagcactgctactgacctactgtacaccactacagcgtgtggttgtagctagctagctagctccattcatcgccgatatactaccagacaggaacattttggccagcgactgaccaaaaaagttttgcaacttaattaagctgccaccaatatatatactagtactccccgcgagcaaatcacttttcaattactgaaagattaaccaaccaaacaaacacactcatgcagtaatatatactactgcgctaatcacttgtaccacaaatttcatggagcattgatgctgatgcgttcgtgcgtgcttagaagcttcttgtgagttgtgacagcgcacacaacacgtacactacggtgtagttagtagtagtagtatatatatacacacactatcaagaaacatatatataagcactttttgttaataacttcatgttcgagacgcctacataaacatcctctgcaagaatgcccccaacttgtgtgctgatatatctaatataaaagtatgcaatgcatgattcagattaaattcaatataatcccatggcgtcagcttgatactgctcccatgcatcatgcatctcaccactaggccaacctgacacgacgcacaagacaaaaccttcgcctcacaggctcgtcagtgcacccatgtggtggtctggccgcagctggcgcagcagctgctatgaacttgctcgatcactctgtcactcactcactcacccgttattacatggttacaacttggtcatcagctagctaatcacgagtacttaattaacaacttttatttaacggatgtttcaccatggtctttactgtagtagttactaatctatgtatattaccagcaactattaatatgagaaaaaagctctcttatgtagtaactataaatcaatggttaagatttctttcagtcctcaagtgtccgttggaggatatttttcaaactgaaaacattgatttatttgaatttctaaacaacttctatttatatacttttttaaaacacaccgaaaaacgtgttgatgagaaataagaaagttaaaagaaattttatcccaaatcacacactcttcgtctaagagcatgtacaatagtagactataagctgactataaacatattttaagcatataaaagaaaagagataagagcagcgggctatagatttatagccagctacagcacggaccacaagatgcatgtgtgtatcatacgtgggaacagacattaattatgcataacatgtttattgataactattatataaattaactattaaattgactatagttgatttgtagcctacaattggcagtactattaaacttgctctagttagcttcacagttcactgtagcgtctagaagaggaacaggtggattattaattagcaaaagataatcagaaaacggaagccgagaagagcagagcccctataaatactcgcgagctcctctgctcggagcacacacaaccaccactcaccaccaac

SEQ ID NO: 5583 - DNA, 2000 bp, Oryza sativa
gtggagttgtcagcgaggcgacccgtgaggcagcacggggtggcggagtccggggtcggcgacggcgacggcgacggctggagggagagaggggavcgggaggagggcgaccgggcgctgacctcgccggcaagccgccgccgtcgctgctcgaggccagatccggcaagccccactcgccgccactccgacggcgacgaccctcgacggcgacggcgacgacccgcggcggagggaaggggatctggcaattgatgtcatcggccagcccgcgcgctcgtcgtcgtcggcacgcgcacgtcgtcgccgtcggcacgcgcgcgccgtcgcatcgtcactmrcgcttgcgyttgcaagcctagcacgcgcctcattcgactgagagagaggggragagatcggaagagaaggagacagtgggcggaggagaagagaaaatgcgagaaagagaaaaggaagaggttgctgggctagtggtctgatgaggggtatgggtggaatttttgtactgggctaccttgagccaggacacccattgtgagatgtagtacccttatcgggttgtttcagattttgagaagcccatccagggataccctccattgcgagacaagttccccctacgagtgtcctcagttagtgaggacactctaggagtggctcacattgtggatgccctaagctgagcaatatgcattatgatcgccacttactaccatttgccgactaggsgactacactctctgtttctcttctcaatttccttctcttttcttccccatataacgcatgcaagtatttttttctgaaagaaaaaaaaatcaatctttctttttaaacttcgcgggcggtagaacgtccaccgatccacgacgccctgcaaagcgtgtgctccgctgcctcgtgatacggatagcccatgctactaaacaacattcgtcctctccttaagagtgttgcaatacatacgacttacacgactagagatatgcaaccatagattaaaaaaaaacatgttaatatgcaaaatactccctccgtttcataaaaaacgaatctaataccggatgtgacatattatggtactacgaatatgtccagattcatagtattatgatgtgtcacatccggtaggttggttttttatgggacggagggagtagccatttacaaccgttattcagaccctgtttagatgggactaaaacttttaagtccctatcacatcggatgtttggaaattaattataaatattaaacgtagactattaataaaacccatccataatcttggactaattcgcgagacgaatctattgagcctaattaatccatgattagcctgtgtgatgttacagtaaacattctctaattatggattaattaggcttaaaaaaattgtctcgcgaattaactttcatttatgtaattagttttgtaagtagttatatttaatactctaaattagtatctaaatacagggactaaagttaagtccctggatccaaacaccacgtgagtcgacagttgggtcgtatgtatagccatttcctctccttaatgggctgggcttcctgcttaatgggccggccttgttagtcgatgggtcttctccctcccccgtgactcgacgacggcgaagggaaacccaaccccatccatccctctccttgccgccgccgtcgacccgatctccatcgctggcgacggcgagcatcgcatcgcatcgcatcgcggcggtgcccaagcgaggcaatctccccgtccgtcttccctcccggcctcggatcccggaggaggtctctcctcctcgctaggagcggcggcgggtgccgtcgtcctgctgcttcccttccgcctccggtgagcgcgccctcgaactcgccttaaccttgtcttatcctccactcgatctggaatggaagctaggttcaatctggggagtataatatctgggggttggttcaattcaactgttaggtccacccctgcaggcggcg

SEQ ID NO: 5584 - DNA, 449 bp, Oryza sativa
aagcaaccacgtcgatcgaccgtccgtcgtcacgtctgttgtaggcaaccgccaagcctcttccagaaatatcgtactagtagcaaaacatgtgtaaaaccgaaaaaaaaaacccaataacccccgttcacacggaaacgggaaccttgccaacggcamaccgcgtgcctcacgagtgacgtgttccgtcgccacctcgaagcccaaacagcgcagcgcaggcagggcatcgagataaaagcagcgaagtgatgaaggcgaccttcgagaaggtcgcgtcccccctcgatcgatcgcctatataaacgccacgcaccgttggctgactagttattagttggtgatcgcttggggcagcttccttccttccctcccaaaatccacctcacaaccacacgagacgagagccaaccgcgacgcatcgtcacatcacagaggaggcggtggcc

SEQ ID NO: 5585 - DNA, 2000 bp, Oryza sativa
caggcgtgcgcgcctcctcctccccggttactcccacgacgccgactacctcaccgcccttcccaatccctatctcatcgccgatgccgtccgccgggccccgccaccttcctccgccctgcagcctcgccaccctcactctgcccgacgcggtggagctggtctgcgtgctgaagcaggtggaggagaggcggctgcccgacacggtggagctggtctccctgagctcccatctgaacctgacaccgaaatggcatcaaagctgttggaattgtgaaggtgatcgacaggccgtcaggcccacgcatgtttcttctcgctgtaaacctcatcccaggaggtttgtttgtcaccaatctatcctgtaaaagagatcaccacaaaaacagaggaaagtcagatcctacatccattgttcagttccataatctcacccttatcaagcaaaaatgaaacaatatgattcaggttcagcaagagaaattctgatcccaaacagttcagcacaaaaaattcttatctcaaacaaaaaatatcacacagcaacacaaaaaaattgatacagtacgattcaagttcagcaagagaaattctgatctcgaacagttcagcatggcaattgctgatctaaaaaaaaacatgatacagcaacaaaaacttcccaaatgatcaatcacaaaaatgtaagctccctttcccctatatttctttagcaatcttctttgcatgccaaaagccttctttcttatccatcaccaaaacgaaacaaagcaatgcaatgatgatgcactgaaaagaaaaagctctcaacaacccggagcaggtgctgcgcaggatggagcaggagaggcggctcgtgcggatgggcaccgccgggagcgtgtccatccgcgtcctcaccagcggcggtggcggcgaggccgtctccttcctcttcaacggtgcctcgatggcctcctcgggagccgccgtcgccggccgcaccaccctccgggcgtgcgcgccgccgtgggggaagccgacgaatgcggcggcggaaggaggatgaggacgggagctattgtcactccttgctacgatgaggacggcctcgagtccgccgagagcggcggcaaggctcgagagtccacctctgcgcccggcccgccgccgcctcgtcgccataccaccctgccgctcgtcgccggctgcccagctcctctcccgcctcccgcgcgctgctcctcccctgtcgcccgccgccgcattcccaccttccgtcgtcatcttcaccaccggcggtgaagcaccatcagacgccgccacatctccggcgcccgtcgcctcctccatccctcccaactcgcttgagcggacacgagcagccgcaggagctcctccagctccggccaccggcgtggtgctcgtgctccgccgcggcactctcgccggaaaaagaacgaagagaagagagagagaggaggaaccgaggaagaggagagggaggggagagatgacatggcatatatgtgggggtcccacgctgactcaactgtcacataggacaaaaccaagatcaaaaccatagaggatctattgtgaacgggttttgattagttaagagaccccaaatattttttcagttgaggtacgattttgtaactcgatgacaagttgagggacctttggtgtactttttcctagccaaaaggcctcggcccatgtattaaggtgacggcccacttgtgccgtcctcgaagacggccgacagaccaacattcatttacagcccaaaaattacgaaaacctagctgcatcgcatcttcttctcctttccccaggcggagcaccgtccgatgagcatccaacggctacggtcagcaccctcggaaccttcgagaacaccctccccgctataaattcccgcctttccggtagcatctagtcttcctctcccactcttcctcctccccaaaccctagccgccgccgccggcgtactcgagagaaacatcagcatcc

SEQ ID NO: 5586 - DNA, 2000 bp, Oryza sativa
ctctataaactaaagtgagtggagtgaagtgacaagcagctagcccatgcgttggttcataaattaatattgcggccccgagggccacgagctgcggactccacacgaaaatgaaagtgatgcatgcatgatatctcactcagattcagaatgcatgcatggcagctaacctagctaagaaattaatctttctttaatttagacaacaaaagaaagagtgaaggagctgaacaaaacaaagaaaacgatcgaggagcaatatttgcagtgacaaagaaaatccaaggtggttgttaattaagaaagtggaaactacatataattgaagagagatcatatctagtggtaggaaggaattgaaggtcgccataagcaggcagttggttagttggggatacgtacaggtacacacacttccttccttgaatcatgcaagtatggcaactacagatgtacctctgcttccgggaaaaaacgagcaattgccaggtcaatcagcaattacaatcgcaaatatatgaaagcattgaattgatgtcaaatggattagcaagtcatcaggatcggagtacagtagcagtatgtaatgggtagttaatcatcatacatatgtgtcaacgttgtcatctcacattaacatcctgcaaatatggagggtttgcctctgtcctattttaagtgcagttgatcttatttaaatttttttattaatatttttattattattggatgataaaatatgactagtattctatgtgtggcttattttttaaaatttgtttataaattttttaaataagacgaacggtcaaatattaaaaaaaaacccacaatcatacttaaaattagactgatggaacagcatcttgttggctacgccctcctactcctgccggccttcaattatttgtccatgagttcctgagtagcattgctaaattactgttactcctctactgtaggtagatcctctgctcgtctattcattcccattcatgtcatgcccccataaatacttgtatacgtacgtacgtacgtggcacactcgtatacatacatatacgtacgcacgcatatatcatacgtgaaattatttggatttggaggtgagatatactagtccagtaggtttgtaagtttgtagttgtagtatataaatggcaggtggaggcagggatgagccggcgcccggccggccggagacctcttcttcttcatccatcctttctttctttctttctttcctaggcctaatcttacataaattattcacacggacaaatctagctaagcacaaggtatgccgccggcgccgtcgcaggagcaaactaagctggcgccggagaagcagcagcacatctccggccatggcgagcaagccgtccggtaccatggatggaaggtcatgccgtacgtcataggtatgtactactgtatcttctagctcctccatggttatatatatatatatatatatcctcccggcctccctagctcttaattagctcctcaccctcagctctgttcttctcctttaactctctccggtttggatcctactcttctcttctttgagcatgcatgtactgtatgtttttattttgaacacaaaaaaaagtaagatggaaatggacatccaacatggctgcagctagctatagcagatgatgacctcctgtagtttagtgaagtgcatagtctcctacatcactagctagatctcttccttttagttagttgctggctccaaatctcagctatcaattcatacgcaatttgtgcgcatatatgcttcagctcgctggatttgcattattgcttcatccatacaccaaagtacacacttcctcttttttttccatctcttttttcccaattaaacgtcaatgaaaaaataaaagcttagtagagaagttagatggtaaatgtggtaagttatacaatcaaggaagcaagttagtccaaaggcaaccgatgaagcaggcagatggagaggagcc

SEQ ID NO: 5587 - DNA, 2000 bp, Oryza sativa
gaacacgaacgacgcacggcgatggcgatgtagaggtagaatgcgtcggccatggtgatggctccgtagagcgagacgaacgtcatggtgaccacgtgacgcggttcatggcggtgccgacgctggcgccctgcccgcgctgccgcagcggcaggatctccgagctgtacacccacgccaacggcccgatcccgacggagaacgcgcacgcgaacgccaccaccacagcgacggcgacggcggccaccgccgcgtcgtccctcgcgccgccgaacgcggcgaacaccgagccgagcacgaggagagaggcggtcatgccgcccgtgctggcgagaagcagaggacggcgccgcacgcgggcggtgagcgccatggcgatgaggatggagctcgccttggcgacgccgaacaccacgttgaggcccaggaggagggtgttgggcgtcacgccggcggcggcgagcacgcccgggccgtacagtaccacggagtcgatgtcggaggcttgctggaagaactgcagcatcagcacgatggtgagcacccgctgcatgccgggcttggtcgccacctccttccgggcaccgccgccgttgccgccgacggagctggcggcgacgacgtcctcgatctcctgcagccgctgctcagcctcggccggcggtgtccgacgtccggtcgagcaccatcctcgcctcgctgcgccaccccttcatcgccagccaccgccacgacggcgtggatggtccgcatggcgtcgtggaagcgggaggtgcggtggaggccattgcggacgagctggaaggaggggatagaaagagaagagagataggagagatgacatgtgggcctaagggcatttttgacatttcacatgatttctctatcctcctcaaccagaaattattattttaatcggtgcagtgtctactgtcaaattaccacgtttatggagtgttttccccaaaagtgagtttaggcagtgtcgtaaggctaaaaccacacgtagcaaaatttgcctcatctatatgagaccctgcaggggaaaagtgactactccctccattaaaaagaaaaagaaccggtacggacactatttattttctcactttgatcactcgtcttaatttcctttttaaaaaattacacactaaaaaatgacgtcacgttcaaagtgtgtattatgtcctaaatataaacatattttttttcttaactttaggctaaccacttgaaagttgtaaaataaataaccaaaagagatacgaagcttgattaatcttgtgaaatcaactcaaagagtatacgtggtaaacctgggcatgtgtctgagccttgttgttagttcataatccggtatttcagaatggaatttttttggggtacgatttatgaaatagtgttggagtttgattaccaatttagacactatccagaaatgggaatatcttcttattaagaattaagatagaatgattgttctgtagcatgatacaaccttttcttttttctggagaggaatgatataactgttcacatcatacaagttgatcggcatttgagaaagagggacttttactgcatcatccaccttttatccacggttagtcgtcgctgacgacaggctaggcacactagatgagaaaattgcaagggctcttttcacaagaagatggaagatggtgtacaattggagagcttgaagcaggtatatcagtcaggatcagagacttgatctttgtctgttgattgggtggttggtgacactgccttccacatctatgatatatatcgctttaaacatagatgtgttcctcttatgctaaaatttagctagtgtaaagtgtaaacacctggaaagataaacactaaaccgtacagtcaaagtgtgttcttctgaaggtctatatatgtggatatccatgcaatatgcaacctacaacaactgctagcccaaaaaaaggaaagaaaacacttgctgcagaaacttgggaatttca

SEQ ID NO: 5588 - DNA, 850 bp, Oryza sativa
gcctattgatctaaactgatgacaacaccatgcaaatctattatattatcaagacaggtttgaaaggaggcaccacgtttggtttagagccmagaaattctcacattaatcgktgaaattaggaaatttccaattatatctatataaatwgaagttaagacttaagagttgtatctgaaatctgagcctatagaaatataatctaatagttgtatatgaagtcgagagcytatataaacagaagctaagaattatatatgaaacccaaatatacttctacatataatggaactgagttgtattaaatctaactgtacgtgaattacctagctccgtgcaaaactgtgtgggggcaaccccctagttatttatatgatggttttcttttccttcatggtttcatatgcaatgttctagtatttattgttgtactgttcttagagcatcttagggcctgcttgggatctctggaagttttttcccctgtaatagaaatacatttgtaatctttgggtactgaaattacaagtgaaataaaaacccctgcaactaatgctgtttgggagaagattgccgggattttcatcagaaattgaacattctgtaaaatgagcactgttaaaaaacagggatgataatgaacatcactcaatccttgatttgaggagctaaatgaaaatcaacaagattaccgatgtaaatttttgaggtagaggacaagatgttccaaatcctgcgacgacacagaaattagagaaaaagtattcaccacaagatagaaaaaattgaggcaacaagttccaaatcctaaagcatcaaaactcgtatcaaacccactgatgatacaggg

SEQ ID NO: 5589 - DNA, 2000 bp, Oryza sativa
cgacactgtcgaaagaaaaggtgctacactaaaagcaactgaagaaatgcactgcaagttcgcaacgtgcagatcatgaatatactcccaagcaaaccggtggaagagcgcaccaatagtcccattccttgagccactaaccaacatttcctgcaggccgatccttacaggaggcacgaggttacatcgataaaatcaggatcagagtaggtttggagcgagtcagcgagagacgtgttattgcagccacctgtcactctgccacatgtcacaggaaaaagaacagtactatatgcagaggagatgaacgaagaatgcccattcaggtttgtcagagcaaaaaacgtgaacttggacaaacatgcctgcagtttgtctgaagatttcgatttttatacacctttttttgatcgcctacgtacgtggccatgtttatgccatattgccatgtgaaggtgtgaacccttgcaagcacccatgggcgtcaggctatatcctagtcctaaatcctaatagtatctgagcttatcattgggagttcgcactggtaattttggcatcaagcatgtatgcactagattaattgctgcactaatctatattacctagtcctaccaagtaaagttactcgcggctagtcctactattgattcttgtatactcctagtcctacatgatttacatagccgacagaaaaatctggggatagtcactttgcctgatggtgcaatagtggcttcaatcttcagcctactctgctggcgcattacaatttacaattgtgagaacggttatgccttttagagcaagtttaatagtatagtccactgctaactccaaatcatctatagctaacgtaatagctaattcatataatagttgcttactatactattaatacatggtcccacctgtcatacacacattacatcttggagtccgtgctgcagctggctacagatctgtattatagttagtttatagcctgctattgtacctgctcttacaacatcgaccggctccgatttttcggagattatccaatgaacgagaggttcttaaccgaagaatgcaaccttcgaatcttgcgctacgtcggaaaggtgcgagaggcatccacgaacatggttcacactttagaacgattggttgtcattcggtctctttttcgtttctcgcattaatctaccatgcatgcaacttgatcaacagttcaagaacataaacaaagtggtttactttagagcatttgagcaaactgtatcgcgtagtccgtgcatttgaccatgtctatcctggcacgtaaaaaaaacataaacctgcacgccaagtcatgtcatgcatgtacacttcgtgcatgaatcacacgagagacagcccacgacgcgcagccacgaagcatggccatccacgataacgtaccggcgtgtaatcgaattcgtgaagcatatgtctacatgatcacatggtcggtatggtcccttcacacctgcgaaattcgtggcccatatagcttctgcgagccatgtggcaagtatcaaagttcgccgatttctcgtttaaaaaaatgctcggtgatttttattgtttttttttcttttgctgcgattaactggacttgttcctgcagacacacgggcagttggtgtctccttgtgcgtgacgcgcgggtccgacgaggcgatgcgacgagcacttgcatgtgcggggctgatcgccctgatttgtatgtgttaaccgccgtcgtggctcgtggccggttatggtgggctcaccttcctctcgccgccttttgtctccttttccggttctctcctctgtcgttgggcaaaagctatcaacgattctaactgccaaggaggagtcgcctataagtacctgagcccgggagcaccgctctcttcacaaccaagcaaccatcgattcgatcctagcttaagccgagtgaagtagctagcaggacattgttggtagtgtgatcttctccctgttttgcaaca

SEQ ID NO: 5590 - DNA, 2000 bp, Oryza sativa
ctttctttacgagtacggagggagtactcaataattcccgtttatactatccaccctctaatttaatttaacgaacttgcatatactacttactacatactccctccgtacttgtaaaggaagtcgtttagtacaatgttcaagtcaaacattaggaatataaatcataaataactctcaagttgttgagtttgaaaatgtaaaacttatatgaatagatttatcttgaaaactactttcataaaagtatacatatatcacttttcaataaatatttttatagaaatataaagtcaaagttgtgttttggagaccgtgtcgctgtcctaaacgacttcctttacgagtacggagggagtactactcccttcatatacttttgatagtcatatttcatcttagcacacagaccaaggataaataattctacttatcatccatttaaatatgctagtactagttattcctcgtaaacaagcatgctagtactagttattcctcgtaaacaaacgattcattaatatttacatttctcgatgtccatgtagtcaattttgtgtgaaagaatggagagttgcccgttaaatctaagaaagtcattaagataatagtttgttggattgaaatatgcctatcaaaaataaatttttcagatttagaaatatacttatcaaaagtagatggagggagtattattgcttccaaaataaagtactcctacctaaaaaattgacagctaagctaatggttaatgtgagtaaaaagagaagcgcagatgtgatgggattgaatcccatgaatccaaccaacggccaggatggcagcagtggatagcggagcggaggagcaaacgccaaatcgaaacggtataaaccgcttcccgccgctgctctgcgggcccacctgtcagctataaataagaaaaagaaaaccaaccgacaatccgccgcgatgcgctggcgttgccttgcccattctttcttccttccccataacatactagtaattccttttcgcgagatctcgtcaatttctcgtcccccaaccccgctgagccatcatttctctcaaatttctcctcctccaatccaaggccccaaggaattgaaggatgatgctgctcgccaaggagttgggcctgtcgccgccggcagcggtcactcctcgccggaggccgccgcctgccagggtccccgcctctccctccggtggctcgcccgtggccgtcggagacctctggctccggaccaaaggagccggaggaggaggagacgggttcgggagccacagccacgagagcgagatggatttggccatgctcgtcaccgacttccttgagaacggcggcaccggaggcgccgattcccgcgccagcagcgacttcgaattcggccttttcgaacaacttcgccgataacatttctgtatgcaatacatacccctctctcctctgccttgaacaactcgacaggtttcccctctcctctcctgtaatttgcatatcttttccccctcaattgcgcatcaaaattctcacaagggaacccttctaattccaattgggtattactctactttcaatttctcattacaacttaccactgcctagctcgtttcttatcattttatcatcccatgatcctactagtttttggcgcttctgtcccgtgaaattgcaacgacgattaaatctgcccctatgatgcctacgctagctgctactcgagggtttcattatgcatccttcatttcctgccctgccattaactagcgctaccaatttctacctctcaatttattattagcaagccgtatttgtgtaactgctactcctcctatctaaattcataattggatactggatagcttactgttggatacaactttaaatattactattactattatgcttcatctgtcataactcaccgttttatctawgtgttccatttcagatctacaagcaaggcggcgatgagaaagaaaacgagctactctcc

SEQ ID NO: 5591 - DNA, 2000 bp, Oryza sativa
cacgatcatgtctattagagttcacaattttattccgaggttaaaatgtgaggcctaacaagatgataagtttgcaaaatgcctagcttaaagtttgaaaagggtacacgtagaaaataaaaaggtagaatttttttcgagaaaaaaaataaaaagtagatgttagaaaagtgtcctaacaaacacaacaaccatggtcactctttaaccctcagtccctcacctactcagcagtcagcaccacgtttgactctgcttaatagatttagtgaacgtgcttaaaactaaaaagtcattaacatataattaattaagttttaattatatacaaaattagaaattaaaattatttaatatgttaaaacaacttctacataaaaagtttttcatacaaaatactctctccatcccaatttaatcatcctataaggtggtgtttagatccagggacttaactttagtccctgtctttagacactaatttagaatattaaatatagactacttacaaaactaattacataaataaaagctaattcacgagacaaattttttaagcctaattaatctataattagagaatgtttactgtagcatcacatatgctaatcatggattaattaggctcattagattcgtctcgcaaattagtccaagattatggatgggttttattaatagtctacgtttaatatttataattaattttcaaacatccgatgtgatagggacttaaaagttttagtcccatctaaacagggcctaaggctatcctcaaccctccatgtcatctagtttacatagcatttaatatattgtcacataagaaaaatgtgatatggtaagagagttaataaggagagagataaaaagataaagaaaccatttctcatgcaagaaatcatcaatacacaagaaccaataatgaaaacaaggggataggtaaagaaaaggagagagatataaggcgattagatgagaatttaattcgaagacaccatccattggatatatagtttatatacatagtgtctatatgacatagcaagtatgaaaactatttaatagtttttctgggtttgatggcctaagcaaatgataccaagaccaaaaacaacaagatatctatcattctgaaattattcatcatcgatcaaggtgctccatcacttcttgttcaacaaaaattaattcacactttaaatgttacatggatttgaactaatagggattaattgattagtcgcatgtttgcatacatgacattccagataaacaaagagacactttgttcgatgatgatcattttgagaaaacctcaaaaatcatagggacgattaaactgggatgaaggaaatatacttagtattgtttagcaattttaaaaatatgctaataaaaattgaaataaaatctgtagcgtagcatcaggcggccgtttacccctaaactctcctccctcccccctgccttcttttatagcgcacacagttctcgcaaggaaccgaaaacagagaggcaagaaaaagaaaacggaaaaccccccgcccagcccaaccacttcactcctcccactccagtactcgactccaccacactccagtccagtccagtacactccgcacacgcgtgccacagggatcatgcgaagcctcaagaacgtcgcctcctcctcctctagcggcgtctctcggttgtaggagacgctcgtcgtctttggacggatcggagcttgggggaggaaggcgacaaccatggtgccgatggtcctgggtcacaagacgggcggccacaccgacgacgccaagtgccatcaccggaggcacagcaccgagcaaccccacctctccccattacccttcccccggccacccctctcctcctgatcatcacgcctttctctgcttcttccatttgatctttgtgacaacgtcgtcctcctcccgctactcttcgaatcttttgtgaatttcacgtcgtgagacagtagggattgaagc

SEQ ID NO: 5592 - DNA, 2000 bp, Oryza sativa
tcacgggctagtttcggtcggtactagttcggggcgtgacaagttttcaactgtatgtgttcaggtgttcgattacatcagtgtttttgtcaaagctaattcaccttgctgttcatatctatccatccattataaaagatttgaaaatatttaacaagatataaatatgcgatatatcgcttcacaaacatgtaagtcaaaccaaaatacccaataagcataagcattagctctccctgaaaaggaggtgatctagccgcaccttccagtatggctaccttgttacgacttcactccagtcccaagcctagccttaggcatcccctccttacggcagtttattggctcgttcattcactcgctgggtaaggaggcagtgacttacaagatgtcgaagggaaagtagaacttcttcggtgcttgccgctactgccgcaaatcaactcaagctcctcgttccatcatgaaagagtaaagccccaaaataggtacacagcgtttgctattgcaataagggctgctcgcctttccttttgacggcttggcttcctatcgctcctatgtagtggtcggccttaaaagtatctttggacgaggtcctacggtaggtaagagcacgcacaagcacttgaccgaaggggaccaacgcttctactcctccaccgaggagctttttttaagaataccgagtcgggttcttctcctaccagtatcgaatagaacatgttgaacaagatcttcttcatggaaacctgctcaatttagattggtaaaatcgtacagattttgaaaagaacccctagggggtagtgaaatagaacgtgaaacagtgctgagctcccaagcagtgggaggggaaagtgatctctgaccgcgtgcctgttgaagaatgagccgtttcattcttgcgaacgtactccccaagcgagatacttaacgcgttagctacaacactgcacgggtcgagtcgcacaacacctagtatccatcgtttacggctaggactactggggtcctgtccaagccaaagaacttacccccgaaaagtcctgacaaatgatgattgagacgagattccgcgtttttgaaccacgaaaggccaactttcataattaaacgctgtcactgtatggataactcttattgtgaaaagagctatttactctataatagataggtagagccaaagaatgtgaaccctttggaaggctgtgggcgatgagggattcgaacccccgacaccgtggttcgtagccacgtttcgactgtatataaattgcaattaaatttatagaattaaaagttaagagttgacaagatagattaaatataattatatttatggaatcaaaagttaaatagtgttgtacaataagtccaattagcatttccagcaacagcccctagccccctattgtaaagcctctaaaggtctaatgggggttgcccccatcttcagctacaaaccccatttcttaggctccatctctgtgtgtgtgtgttttagtacgcacattatatttatgtctagtttaacaccagaataattcaaacacgtagaattcaaccgtattcaaatttataattttgaataccataattcaaatttaaattcaaaattttcaacattgcaaaatgcataataaaattcaattttcacaatcacacacgtatgcaagttcacaagaattatatgatttttttaaaataacatatactacaaacatgaatggttcaatccggacaaccgactactagcgcgagacattgctagagttgctacgcatgaggtcaacgacctgcgacgtgtcagtgtggagatcacgtaggttgacgaacgacatcggacagggcaacgttggactatcctagcaagatggtgatcagataatagccggcggcacgacaaaagaaaagagggtagcaacacagtgagagcgcgagaacaacgggagaagcgcgcgctagggaattttcacacgcaccaaaaagaaaaagag

SEQ ID NO: 5593 - DNA, 648 bp, Oryza sativa
tttccccccccccccccccatcattttcatttccattttcctcgggcaagaactgctttgtccactccgctgccatttgtgctgctccctcctcctctcctcctcgctggattcgtggcgaccaggccgagaaaaagaagcagagatagagagagatagaagagagagagagaatcaaagcaaagcagccatagtgagagagagaagaagaggagaaaagagagggataaaaggagcttgagctcacaaacaacaagcctctctccttctcctccttcttcttcttctcaacgatgtcctagctaggaatagcttctcttgtttgtagcagtaggctgctacgcgagccaatcgcccaatctgagctccctaaggttggcagtgggctgcattggcggcagagagagagagagagagagatcccttggttggactcccaccgtcgaaaacccaatcttgggtggcaactgatttggctggttctttttgttccaagatttgtggtcagcggatcaaaaaaatccttccactttttttgaggcgatttggttccggatttgaaggtttcttgccgcgaagatcgcgggttggtactgttttgcctggtagatccctttcgtttggctgcagaggaggagctatgagaca

SEQ ID NO: 5594 - DNA, 2000 bp, Oryza sativa
atgtgaggtgattcctagcgtagttttgtttgactactgccttgtgaaattgctgttgtggaaatgggatcgatgtttggaaaatctgcagctgatgggatcagctaggcccgggtggccgtttgaaagttgttggcccgggtggccgtttgaaagttgttggccgggtgccaaccttgaatcaattcaaaagactgatactttgcacatactccgaccggacgagacgcactgtctcatccgtgtcgtttgagaagcactcacttagttgatttcagaaaagagttcaaataaaatcaattgcaaaaacaacagcctttccttgaagcctgcattaaacacttatttcccatggcttgctgagtactcctgtactcacccttgctctatataaatatctcccccccagttgctgaagaagatgaagcggatcccgctgacgaggagttcttccaggagcaagccggctacgatgagttttagagtttcggcctagttcccaagtcacgcctgtgatgtttggtccaagtcttggcttccacttcccttttgcaatgcagttgtgagctcgggatctgtccgcagcccaacatgactgtactcctactctataataaagagacctctgttgctgtgatattctgtcttcctgtgataccagcactgtttcctgggactggtatcgattaacaggttaatttggagcgtcacgggctagttccggtcgggactagttcgggcgtgacaattattgattaatgakagactaatttggtgttgtaaatattactatatttatctataaacttaatcatcttaaagtagtttgaccttgaccaaattcaaaatgagtaattataatatgaaacagaggaagtagtaagtaagacctgatacataaaggccaagctgagcataagtgtatggttaaaccaaaatttgtggcttaaattatcatgaatatattgtccattctccttgtaatgttacacggttacaccatatayatatatatrtatmtatgctttatattacactgtcgcacatctcccagaagtgatagcatagtgtaactctttatataaacgaaatgaagataacaattatatatggtttttctgagaatcttcagttaattaattagcactccaagttaaactgaagataagagtagctagcagcaaccaactagctagtcagcattgatgccacatcttatcagtcgaataacccattgacagtattctccctactggtctctagtctctacacatccatgtacaatgcatgcatgcatgcacatcgattgttgtcggtacacaagcactagctctgctagacaggggttaacacaagtagtaaaagcctaggagctgcagatcagagaagttccagctgactcccacaaaccttgacttggacggctctgatcatgcatcctcttctcctcaggtagccaaaaagagacatgacaaagttgcaaaacccatcggcagtatgtgctcactgcattttcccggcaaagcagagagaaaattaaaaagacgacgcagacatatagccctttctttctctctctcctttagccggaagtggaatattaaacaagctggaaacatacaagccagcactgctcgcaacaacaacattcagaagagagagaagtatagagagagagaggggagcatgagtcagatccatgatccatcaatggcaccacacagtccacacttgggcatctgggcgagacgagacgactaatccaacttcgatagcaacggttgctgctagctgctgtgctgacagtgcagcgtcgtgcagcttcgtgaagctatatgcctatatatatccctcaaaactcattgcctctcctcatcacagccacaacacctagctagctgcagcttgtgtgcgagctactcctgcagctagctactagctacagccaaagattaccagcacagatactgtgtgagacgtcgatcagatcgttcgagaga

SEQ ID NO: 5595 - DNA, 2000 bp, Oryza sativa
atgtttgtctagttttaaaaaaatcaatatttggaatttcagaataaatatttagcaattagtgatggtacctttatctagccacgcggttgctcgtaattagaatttgagtattaatttgttcttaggtttagagagttccggtcgctagtgtaatgccgggttgacaacgatgttaagaccattacaagacaaactcgcttaattcatgtgtggtgattactcatatgatttatgccttaagttgttaattataatattatactattttatataattacaatataaatatattatgtgttgcgttcatttgttcttatcggagcaagtaatagtacagtccactactagctccaaatcatctatagtctatttgatagcaaattcatataatagttacctataaacatatactacactattaatgtccggtcccacaaatatgtagcacactgttcttatctcttctctttwattttttttaaaatttatttatagttagcttatagtctgctattatagctgctttcaaatgagtacgtattcttcgtcactatatccaacctagttaaaagtcatagcctagttgtccgtcacatctccatacttttgagacaaaaacataatatcattgcttagccgccactatagttatcctactatgtatgacggcgccacgtatcgattaaacaaccacagcaaccgcgcttgtctggttgtcccttgatgccgatcagtgatcagagaagatgagctgctatcatcgttttcatacttataagctataaaatttaaaatgtaaaacttaattttaaacataatttgtgatttgttatcataatttattttacaatatttatttttaatcactaagaccacgtacttatatagaagatatacctatgtattactccatccgttttatattattagtcgtttgactttttttcttagtcaaactttttgaacaaaattataaaataaatataatagtatttctaacacaaaataaatgtattataaaaatatatttaacgttaaatttaataaaataattttatattttagatgttgctaatatttttcataaacttgattaaacttaataaaatttaaacaaaaggtccaacaacttataatataaaactgaggaagtaattttttgttactaacaaataacggattaaaacagggaagcgccgggggctaagaacctggactcctggagaagttggtcaaaagaagaagtcaccactcaccactcaccgagacagtgagggcaggtgggaaaaaaactattttcctttccataatagcagtaaaattcaacccaagcccagtgtcaccgcgtacgtcacatttacagcttttggtcgtctataaaaaagacccttgcccatattgatcatattgaaaaaataaatcatattgatcattttttttaaaaaaaaagtagctaatacttaattaatcacgtgctaatgcattgctccgtttttcgtgtgcaggagatcggtttcatctcctctaaacgaactcagccaagtcatcgtgacagtgagggctattttccttaccataagagcaagattaatagtgtagtcggctgctggctatattatgtccacatcattttacagctattgctgaagccaactagtacaatagtctatctgttatgttaattttatcatactaattaaataattacttttgcatgaacatagcaattcatatgatcacaagtaaactacatccctgtggccctttgtggctgcatcatgaacatgataattcacaacacatctataacaatagcagtaaaaatcaacccagcccagtgtcaccgcgtacgtcacatttacagcttttggtcgtctataaaaaggaccctagcttgcccatcgtgcacctcctcaacacaccaaaaaatcctactcgcgcgcccaaacaaacacgcgaagcagcaacaccccgagcgagtgagtgcgtgtgaagcc

SEQ ID NO: 5596 - DNA, 132 bp, Oryza sativa
garacccccaaawagggtgttttscctwttttwgrmgcckcaragtwaaamcccccccccgsccccccaaaatccggattccccacccaatccccttcgcccaacaactcggctttcggcgccggcggcgcc

SEQ ID NO: 5597 - DNA, 653 bp, Oryza sativa
accccccccccccccaagcgagtcatctgccgtccatcctcaccaacggacggcccacgacgcgtccaaaccacggaataattagggcaaacccaacaagagccctgtccgcccacgcgccgtcatactcgcccccccttccccttttctcatcctcctctccgcgtcaagtccaagcgaccaccagagatctctctcgcggggcggccaggtcctccccatcccgcggccaccacccacctccgaatctgccttccccagaaccaccgcgacccctctttctttccttcttcctcctcctcctcgtgccgtctccaagctccctccagcttgcgaggcgaactataaatagcggcttgggagcctcttcctctgccaagacgcagcaaacaaacagcacatcggaagccaagccccaggaaagaggaacgcacgagcagcatatgtcacagagggccagcgtcccacactcctcctccatagccttcgccctccattcccatctcctcgtctccagtgagatgtgccccagctcctattggcagcaataggaatagaaaagattgctcctttcttttgagctttcttgcaattttggtcttctttccttttgatttggtttctttccgtccgatttgtgaagaggaggagca

SEQ ID NO: 5598 - DNA, 887 bp, Oryza sativa
atggkttttggggtwtttccggkaaaactattcyaattcycargggcataccttctkggtattkgcatattaattaaataactwtwaaaaattttaaaagrtgccttaatatactacttcagtcccataatrgatgttgctttgactttckgcttacaatatttgaccattcgttttatttgaaaaattaatgtaaatttaaaaaggataagtcacacttaaagtacttttgataataaagcaaatcacaaacaaaataaataataatttcaaatttttttaataaaacgaatgataaaaaaattacaaacaaaaagtctaagcaagttaaaattcaacttatacatatcgcaaaaaaaaaaacaaacacattaaactacagctagttaacgtatactcacagttaaatttatttttttcgttctaacatgtagaagttgaatttttaacttgtatacttatggagtgatatatcacatgttagtacatcttcttattttttttataactatttaggtgacatgatgagtaatgacatccgacatccctccagagtctaaaattctctatcgatatttactactatttgagagacagagtaggttagctgctgcctctgtcaggtagtaaaccggaggtagcacaagagcagcgtctccctgactgctcagatgcagacgtgttcttgtctcacccttcacctgcatgatcctctctttttcaatccctcgatccactcatctctcctggctaagaatcaatctcttcttcacatcaatatcggagtgatcgatcagtctcgtcgcggttcgatcgattggcctctgatccgtacatcttcttgtgtgatcgatcaagaatcattcaagattgcaaggtgagtaagt

SEQ ID NO: 5599 - DNA, 2000 bp, Oryza sativa
aggggaaaagaacatagccttactctttcaaccgagagaaaacaaagagcaaaaaaagattattatcagttaaatggctaaaatgtgaaggaaaacataaaatggtattaaaaagatctaatggaccataaaaactataatcttttagagacaaatatgctacaacttcactctttcaggaattatggagtatatgcttgaattagggcattttttttgcagtaattgaacttttcctttgcaaattcgtataaaatgcaggaaattttataggattttcgcacaaattagttaatttattgcaaaaaaagaacttttcaaaaggaatgcctttgcttgaaaccccccattttttatctcaagatatattcatgctttaaacttgaagatcacaaaatttcagtcaaatgtacctagttgaaatctgaggagtatttgacatgtatctcaatccatcactgaagttccaaccaaaacaatgtggacaaaactatttagaccgaccacgagtagggagattgagaaggcgattaggttttagggattgagagtagaaagggtgaactgaaaaaaataaaatcatttccgaattgggccgtggcctttgtacgtggctaggagggctacggccacagtgtctggtgaacttcaattactcactgggccgctagcccgcaacatcttgattcggcctatctaagtcactattgggcccaacaggtaccaactgcattttcgtgcgtattaatgtgacaagcgaaagaacaacagtcagtaatctcttttggcttacacgaatatggagtagacagaaagggaaacaaccgagcaattccttcactaatcaacccagcatggtttgtgtgggcttgtccttgctctgaccaaaatcagcatcttccgaccagcccagctgtgttcacacctaatcaaccctttaatacaaatatataatgccactctcacaaaacagcaagcgaaatcacccaagtaattaagcaggagttcatcatcattatataatgtttttcaaggcaaaaacataggacagcagagcagagcagagcagctaagtaaaacaaacagcgcacgttcgttaaaagtttcttggtaaacaagctcagaaagaaaaatgcagggactcgactctgcgcattgaccccaaactcgatcgaatctgccagctcactcatgagcttaagagcgttcacacgcagtcgaacacgaacattcccacatttccgcgccaggtgcactccatcatccatgagctgcatgcatgcaattatgcaaattaagcgtggtactcctagattgtttagtagtagaacatcatttgccttgatcagctagccaacacataaaaaacaccatctttaagcccggtcagtgacaggtaggcagggtagtcactttttgccgtgcgaagcaagcactagagttaattaacccctggattaggataacgacaatgaacttttctttccaagatcatccagatggcttcctgatagaaatcgcagatgacactgtgcccaaacgtgatcgatccgtgcacgcacatgcaccacagattccgttcgtcacgcgcccgttcacaccgatggtgtcgagtggagtgacccagcaaccactcaaaaagtcgagtaccatccgaggaattttaactcgttttctaaactctttaaattttgatttaaaaaagacttttaaaattattttgaaatatttattcctttttatcacgttattcgtttgacgtggcaaaacaatactgtcggtctggccaacaaattcgaatttgaatataattttgggatgatatatttttaaattaaaaataaaagttgttaaaaaaaattgccgagtagataaagctcgggcttgggccccacctgacagcgaccggtccaaccgctaacctacaaatacccgcctcgcttcggacaaacacctcactcacctcacaggctcacacacaggcacacacacacttcccg

SEQ ID NO: 5600 - DNA, 2000 bp, Oryza sativa
cttaggtccacgaatttgcaaagcgcgcatcgaggtctctaaacttggtttattgtatcatcccgatccaaagcgtctattgaccgtggtcttgcgtacgtggcacaccacgtggacgataatatggtgttttttcctttccccttttctttttcctcctattcttttatcttcttcctccactaaagccacctcgagctcccccgcgtcgaacaggccgaagaagagagaaatgaaagaggaagaagggagaaaaaataaataaataaataaataaataataataataataataataataataataataataataataataatgtgccatgttgtcgtttacatgtcatgccacgtaggcaagaccacggttaaacaacgctttggatcaggatgatacaataaatcaagtttagagacctcaatgcacactttgcaagttcgtggacgtagataaaacctgcttgtatatttaaggaccgctagtgcaatttactcttataaattttgaatccatgtttgataattaaatagttcaaataatctataaatgtgattatttgtattaaaaaggtaagcatgaaccactacaaagatagcaaagataatatttgtgtttaataatattgacgctgtttttgaaatgaacatcaaatgtttcatattgttatagcaaataaaaagttataacattatagtttagtttggaaggctatatatgatctagaaaaggtaaaacaaaaccgccaccaatataacgctgtaacatctagtcattgtgacttgttggagtgcgaggaaacaattctagactgcattgccatcaggcaacaggtaatccaactgtccagacatggcattttcagactagtacttttctacattgaacgggactagtgcattagaaaattttactagcgacgaagacatgatgtggttgatttaaagccgcgtcctaatattccatctggcatttttttctaccgcaacccaagtcatgttgactcagcaggatgcgaatctagcaatatacaagtgagaaacagctgaagaggagaccaaactaccaaaacggacaaagtaattctacagatggatagaatcaaatttatttgatgggtacttcttgcaatttttgactatttagttgtggtgtttaaaaatcaaatgtcattaattaatgacatgaaagctcaacattgatttgacacgattttgtttgtcatcctaataatttaataattcttaattcctaagttgtaaccgatatagtttgttactatttggataattacatgatggcaaaaaatgttgttttactttctccagttcacttgagtttgttggggaactatctaatagcgagttgatgtagtatatacacaccagttatactagtatttcattatgcaaaaaataaaattccataaaagaacatttttatggaattttaatttttttaattcaccataaaattttaaaaaataaatttaaggacgaaataatttggaaaatttcagacaacgctgtgtgtacataactgttcgtcctttttacttacagttgtcaatcacctgttgtactttacgagatttttagcacggtatcattccaaagtaagattaatatcatgttcttgaaaataattattgagtgattttacaatacttgaggacgtatcgagcaagataccacaatttttaggtaaatttacactagaatatctctaaattgtaatgcgaagtagaaaaaaaaaatcccctaactgttactttcagaaagggaagcttgtggaaaaccggggtagctagacacctgacttggggtttagggtatatagtccagcgtggttgtggtctcaggagatccaccgtgcaaaatatttataagatgcttacctagctaccgtgtaagcacgattaaccggtgttcgaactacaaaatatacgctacatatgctcttccaacttccttgaaggctgaagttctatacctgtgac

SEQ ID NO: 5601 - DNA, 2000 bp, Oryza sativa
tttcggaagatcgggaaccctagtgcacatcaccagctaaagtatcatgggactggtactatctcacaagtaatacataacaccccagtatgagttggcttatgtttagggataaggaatgtcagggtgttacaggctaccatgtgggctctaaaaatggtgcacggtggattaggtaaaattaagtcggtttgagctgacatgtgggcccttcaatccttttgctcgcatatgattggctagaggtacattttgtcatatgagaggtgtattttcatctaaaattacctgcacacaaatgtctaccaatactcatgaaaatggttaataataaacccgtaccactaagtttcatattttatttgtattctgttatgcatgagtgacggttaaaattggtactagtaccgtcaacactgccacaattgtcgaccacagccacacttccatgttctctagaatatagggggcttagtaggcggcagagatgtctacagcctcccgaggcctaagaaggaatggatcaaccatcagtagggcttagcagcggtggcaatgtccgtggcctcccgcgtcttgggagagatggatctgacaccagcaacctcgggagccttgcctcctcctccttcctccaccatcacataccacatcaccaccaccgcgttgtgccaagatggaaagttcaaggccaacaccgagctcaatggcggcggcgagctattgcaggcaagctcttttsttgctgtgtatttgaccaatgtgttttccctttttgttgtgacatatatgggaatttgtgatgggaatgtgtatattatgtagcattggatggagacatggaatttcwtggtctcatckmtckgtttcttatgcactttggaccgacaaggtggtgatatttgaawattgttcttccccatttatgtggggatatmtattgatttgatttgtggggtgtttgatccgtggaaatgggacaacctggggacggtatgtagaggcagctgtatgtgtgtatttacaattgtagttttyyyttcttttgccaaaaagaaaaacatctcctagtcggtcaggttaacctggttgcctgtggaaatcaatggcgatttattagatgcggatggctctatggcattaattaagagaatacctttgtacagtagtgaacggcaacgacagtgacggtaacaatgagaaacacttgggggtttttcgactagctccataaaatagcgggctagccggtctgaatttgaagcttcaccccttctatttatttgatattaggtcagtcattcatttttttaacaatggaagatagcagcattacaaatttataaatgtgaaatttggctagcctagctgacaactaactggggaggcagcagtagcacacagagctgtggagggaacgccttgcagaggtagctggtcatcaaagaaagtgaaagaaaaaaaaatagtcaactgtcatctagataataatccatgatgctatagatgcgttgcacaagcaaagtaggtttgacagtcaatgatttgctcaccaaatggaatattttaaaaagaattgagtacatctttcaaaagaaaaagataattaagtagggtcccgtctaaataagtagggtcccgtcagattctatcacacaagttacagaacacgcttaattatcagctcaagagacgtacaaagcgacgttaactttttatgtttaactattggacttgtttaaaaattttatataaatgtataagatatwaatcatatttaaagtaatttaagtaataaaacaactcataataaaataaattataattacataattttattaataagatgaatgattaaacatacgataaaaaattaacggcatcatctaatagaaaacggagctagtagcctagtactacgtactatgcagtatgcacttctgcaaaaaccccacatacacacagagagattaccagtggcaacaagcttccggttccgg

SEQ ID NO: 5602 - DNA, 2000 bp, Oryza sativa
ccaaaacctagtgggaaaggtgctgcgaagaaaggaaaacaacaagcatcaactagttctgaagtagttcaagatgaggctctggatgatcctgctctagagaaacttcgtcaacaaaggtatatgctatttttttaggtctgctgaagaactttgtaggtgctgtttgcccgtttgcttgccgctaccatgtttcccgattttagtctatatcactgtccaattttgagctttgtgcagcatcctgcccttcaaatctccgtgcatgtattttgctcacctgatgaatacatattgtaggcttgtggaagaagctgactttaagtcaactacggaactttttggaaagaaggacggcagtgaaaagtccctagataccttcatcccaaagtctgagagtgactttgcggaatatgcagagcttattgcaaacaaactgcgtccctatgaggttttttgaacattttgaaatctgcgtttattggggaattgtctctgcaggatctgaccttcatccctgtcttcatgtatacagaaaagcttccactatatgggtctactcaagaatgtcatgagactttccatggcatcattgaaaggtgcggatgcgaaagatatatcgtcctccattgcagcaattgctaatgaaaagatcaaggctgagaaagaagctgcagcaggcaaaaagaaacaaggtgaggtcaaaggcgctttatgtcctacatgcggtgctgatgtcaaactgtaagctgttttttctatcacattcttttggtactgatgtttgcaacgaaatctgtaggggcaaaaaagaagcagctacacattgagaataaagacgatgatttcatccctggaaagggtaattttgatgatccggatgagtacgatttcatgtgatcggctgtgagggaaccgtcatcttctatgtataccttggcaagcagagattagagtttgcggcatagttggtattttcattcagaggcacctgaacacttgaaacgattgcatgggaacaatgcccatttgttcgacgttgattttgactctcacagaatagggaagagcacctgtgtgctcgagctcgacacataggcgttttttcttattcttaatccacattgtgtttttggtctgttcatgggttgggatctatatttttttgccaactgtagtataatgtgtatctggtttatattggagtcctgcaagtgaatcttggtgctgcctcgtttgttttcctggttattcctgatcgtaatatgttggtcactgatatgatatcccaagcttgcttctccgacgcgcggagaatttcaraagttgcctttaatcaaataaaggaagctactactcacaacttgatgaatgttggatggtttactatgtgtaggaaaattttgcgcgacctcttgctgccaaaaggctaaaactatttcatctgcaattcctgtcggaaattcacaggaattttgttggaaatgaggtgattcgtgtgaagtgaaatggagagcctggaataccggagacgtatatacgcaggctctaccagcagcagcatatcgagaaccacacatgcccttttgcctgtcactgctaacgtcttttcggcacgcgcctgcctaccttcgtcgtcgttccgtccgctcccgctacaactagcgcggcgccatgtccgccmacctcsgcmaaatctctcgccgcgccgctcccggcgctcttcccacgcgcttcccgccgtgccaattcccgctctcgccgcccgcgcggcacgcctcgtcctcagccgcccgcttaccgagccacagccgccgcgctcccccgtggcgccgccgcccgctgccgcgggtgccgtggcgggagcggatggggatgagccggcggcggcggcggctggaacggcggggttgtgggagcaggtgcgggacatcgtcgtgttcgctgggccggcgctggggctctggatctgcgggcccctcatgagcctcatcgacacc

SEQ ID NO: 5603 - DNA, 2000 bp, Oryza sativa
ctatcctcgagatcacattcaagcctaaccactccgctagaaagacaacctaaaagcaagctaggtaactactactgtctgcacaaatgagaaagatagctgaaccatcaggacagaacacacacacacagagacatacatgtggtgtttggatcagggactaaattttagtccctattacatcggatgtttggacactaattagaagtattaaacgtagactaataataaaactaattgcataaatgagagataattcacgaaacaaatttttaagtctaattaatccataattagtacatgtttactgtagcatcacataggctaatcatggattgattaggctcaatagatccatctcgcaaattagtccagagttatgaatgggttttatcattagtctacgtttaatacttctaattagtgttcaaacattcgatgtgagagggtcatatctacactacaacttattccattcttcaattttgtattttctcggctgtgtttcagaatattctccagtcaccatcttgtatacatgaggccggggactctgttccaatatagtttttttttgtcaattccgaaccttatttcttagcatacatgtagtggtcaccgagtgagatggatggataccagaaccgacatgcatcactatactactcaagtatgtaacttaccatgttttatctctcatgatacataactgggtaaaacacaacgtatgctacactagacctataagatgaatcaggagggaacattgttcatttgtgttggcgtctttttcagccaacaaaaagtcacctaaagatttaaggtgatctagatgatagggaatcaccaaaactggctagcggagccgatttattgattaaaaccggactctaagttgatttagatcgatttgagggtatacacctacaaaatgaacgaattacacccgcaaaatgaacgaattaaaaagtttacgagataaacatataaaggatgtcacactctcgtaaaaaagatgaacgatctaggcgcaaattaacaaagataaactaggattaaaaaactaggtaaaaggtaaagaaagaacggaattggtgttcaccttttaccaaataatttttaatattacagagtcatcttgtttcagccagcaacataagctgcagaggagcaggtggggcatgtgcagtgtgctgcctaattaaaatcacatcttaaagcattgtactaccaagtgtcaaacacaaacatgccgtttatcctaagcgaagcactactgttcactttcaggcctcataactgtgccagtgacgacaacagatgaatttgagcagtgctggttgcaccagatctgaccaccagcgccatttgagccatggaaacaacctcattcctttcaatttggtacacacacgcatacgcgttcagcgttaggggcataagcgtaataagccgatgcgcgtcatcgggccgagcctgacgcctctgggaagataactattgtcagtgacagctggatcattgctcactacacaaagctagcccagatgaaagcagcagcagcagcagcagcagcaggtagcatatctgcagtgtaaagggggagacttgacctgagatcagatgagatgagatgagatgatcttttctctgtgcttaatttatccccccctttggtttgctcttctgtccttccctctcaaagtaagcagcatcagatgcaaggggtgacaccaaaggctggcacacattctcttctctcccctttttttttcctctctgctttcyttcttctagcttccttctccaacattcccaaatggtgatgctctgatgacctcctggctagcttctacacacactccaagaatcctctccagtgatgtagtatataaacctcatgaggggctaatcccttgtttgcatcaggggatccatctgaataattgatactggctattaagtcagtgattatttctgtactgtgctattactgatcg

SEQ ID NO: 5604 - DNA, 2000 bp, Oryza sativa
ccctcataacargagtagagtacaaagagttagccgaggtaattgaataaatggaccagccatcaaatayatctatttctctcgtgtactggtcgtaccttctctttctytggctcctatttcttcgttattttgttggagacggcagatggaaactgtacgtgctgtgattgctttgtagtatctttttttttggtagctagccaccatagcaatcggacataaaatcatacacggacatagcttttttccctagattcctattacaatttttgtttcctagtcctagtttggtaagaaaagtgtatctgctgctggccaatttctataatamacgtatctgtatctgattaccatattaaaacttctatgctattaaatctcagcccttaaaatttagacaactaagatctaatggtgtaaagttttctctttttcttctattaatgtgagaatttctagccgccacaacgaacgtggtgtcttctttcaaagctgttttaataatataatagatagatagatagatacctggcccacattttcaagtacccacccacacataccttctgctatagatcgttggattgcatccaatcaacggatgccatcattcccaagcaccatagcaggtctctttttaataaaaaaataaagaaagatacacacagatcatcattccctctgtaaatctgtaactccatcattccatcaggaccgaaataaagctggaattcgcttgccttagaatcaaatcaagcctgaacctccggtcatcccggctgctgacagtaactagtggatgtgagtaaaaaaaatcaggacactggccgtcgagtgaacggaatttacccttgagattctccggccgaagatagtgtgggccttgcacgcgatagccactgtaaaacatcgggacaaacctgtcacctgctcgaacaagctaagatcgcgccatcgtgtggctccagcttctgcaaacaacaagggaccgtatattcctggagctagatttttggctgtgtatgtatgtagccaagcaacccttgttcaagtacaaaacgtggtacatatataaatgcaatcttggtcgaaaagaccggcgatttggcgtgtatatagccatcgcggtaatgacatttagccaagctattagtaaaagtgaacatccttttcagagggaacagcaagtgatgagcaagatggtcagtattgtaccaagtgattaaaaaaatgaagaaatgtttgttaactaaaaacgagatttacagggaaagtcatccctccaaatatattttttaaagaagacattatgaagttgttttactaaattggtatatattatgagcttgttttttttttgcggggatattatgagcttgttgatgattgaacatgaaactttagacttaaaatcacacattatttaccactgtgttaagtgtatctaatcgttaattaggctagcgatccggtcgcttttggttwatttttccaccctccgatttcttccggtgcctgccagctacctgcggcaaaggccaccacacgacacgcaccaacagacccctttccggcgcgggcccactcggtcaggctcagaaagaggccagccaagttgccccacctaacgcccgcctccctgagccgtccgttccccatccgatgtcccaccacccgcccacgtgtccccccttaccttgcctgctcgagaaggcaaaggctcgcgatgctacgtgagccgtggatcttgtatcgacggcgaaatctccccccgcgcgcagcagcaggcggtgcacacgacgtcgtcgcaacggctataactggagacgacatccgcgcatgttacccgccatatctgtctccctctccccttctcatctcccgagaagtagtagtagtagtcgtctagtagtagtagcctaccaccacctccctcggcgagcgggtcccaccggccaccgtccgtactccggtgagccggcattgcgtgttccggg

SEQ ID NO: 5605 - DNA, 2000 bp, Oryza sativa
actggcgaacaccttcgccagtgctgttcttgatgcaggttggacatggcgctagaggggatgtgaccatcttgccgacgctggtgatcaacaatatgcagtaccggggtaagaacaatcaagattcagatcaagatcacactgaattgtggctaagatcattgttcgatcaagatttggagtttgcttttgtctgaaacagatttgttttgctacgactacaatggcgagccgagtgagtgcggcggcgtggaggacgagtgcttccgcgacggcgcaatggacgagcagctcctcgagctgtccatgccgacgcccgcatccgcccggcgctccgcacgctgaagcagaacctttcactgctcctctccgtgctcgtcgaccgcgcgcagccggcggcggaaagcatcgtggcgctcatggggcaaacggcggagtagctcgtggaggagctgagcatcgcgtgcgagttgaacggagcggcgagctccgccggccagaggatgccggtgccggtgacgcggcggatgcggcggcggaggaggaggaggacgccgacgaccaccgggagaagcagggcacacaccgtcgatgcggcggtggaggaggaggacaccggscaccgtgctcacccgcctgccgccaacgggcgctccgcgcctctgctccactctgcttcgccggccgctgctcagcaccgctcgccgccgcctgttccgttctaccccccacgctgacccagccgccacttagaacaaaaccggtgtcaaaaccatcaaagacctcgggtgaccggtcttgtatagttaaggaatctgcatatctgattttgcggtttgaggccgttttttatcccgctaacaagttgagggaccttcggtacactttttccgctgcaagcccactaccaaagtcccaactacgcgcaggcctgacacaaaggaggcccactgggcttcacttccagtcacaatgacgtggccagccgcgccaccaccgacaccgcctaaaaatctgcccgcgtccaggtggcacctgccacgtttcaacccccacccacagaggcgaagcgccacgtcaggatacgagaagcgccacgccgccacgcacccaaaaatataatactacgagaagtacaatataataatttagccctgtttagatcttatcttaaagctttacatcctatcacatcgaacgtttaaacccctatactccctctgttccaaaataaatcaacttctagattttaaatttatctcaaaataaatcaactcttaacttcctacctaccatcggtccgtagatcgagaaattttattccttcaatacccattacttaaccatagaccaatataacttatctactaattagggatattttggtccattatccttctccctaattctacctggggaagctagggtttgatttattgggggacggagggagtataaagtattaaatataaactaaaaaataactaattgcacatattgcgactaatttgcgagacgaatcttttaaacctaattgctctataatttgataatgtggcagtaaatatttgctaatgataggttaattaggcttaataaatttgtctctatgtctctattaacgtattttgtaattagtttttttattaatgtccgaatatacgacgccctttataatatccaaccgccgaggaaatwaaatcggcaccatttccttctcgtcctcttccgagtttccgacccggcgcctgccgcgtcgctcaccctccaccagaaataaaggcaggaggcggaagcaaaagcacgcatgcgcgcgcgccgcctccacctgctctctgctcgatcgccccgctccgctgcgacgtccgcaccaagcaacaaccgcgcgacgcctgcgcttccccttccccctcctcgtcgtcttcctacttagcccaatccccaagccggaattcctcgggggtttggttcacgcggcgcggscggggattgggaggggc

SEQ ID NO: 5606 - DNA, 2000 bp, Oryza sativa
ataaaaatagtgcaagtataatactcaagctatagtaagctagttagattaaggcccaagactatttctctccccagttgcttggagttgcatgcaaaatgtcacaaaaatgttggatgtactgtggggtctagacatggtagctagctagccggccaacatgagattgaggctctgaagttggtagttgcatgtgtcctgtctcttggacatcctgtagaacttgaagagagttagtaaaattccccccttttttttcctttacttgagagggggaagagagggaggaaagaggaaaaagttatctagagagaggatgaggggttgtatgtattagttactatgtatattttcttttatgactcatatagttatattttgtaattaaccatctccatatgcacttgcttgcgaggtactccttccatttcaggttataagacgttttgactttaatcaaagtcaaactgctttaaatttgactaagtttgtagaaaaaagtagtagcattttcaaccaagacaaatttattatgaaaatatattcaattattgatatgacgaaactaatttagtattataaatattgctgtatttgtctataaacttagtcaaatttaaaatagtttgactttgaccaaagacaaaacatcttataacctgaaacggagaaagtactaattaatatctagtaaatggaggattgcatgttggtatatatgtatttgatttgagatttgtgtcgccaattaaatgacaataattattgaggaagtttgaacatgatatgtcatgtataagacaaaaccaatcaattaagatgtagtcctccggtgctctccggcagtccccctccaaactatcaaaagtacatgattataaaaaaaaaagtctcaaacatttttaaggaacgatcgatggaaataaaggaaaaatctctatgtaaacatcgagctatgattttgtctcytttactagccaaaatttgacatatttcttgttaagttctcccatatttagatatgcatcmcaataatttgtaaaatgtttgaggacataatttactacactataaactactttacttgaaaagcctttatggctatttgtgtacttcctaaatatagtttagagcatttttamcaagggccctacatatctcgatctactccttgaaaatagaaggaattaatggcgactgtgttagcgtgctctacgtattcgcgatagacttatataagaattacagtggcttgtatttgcatatatgtgtgtgtacactagctgtttttaatttggtcaatacatgattgagtttgaattaataacttttaaatttaaattcagtttaaatttattgacaatgaggtgggcatattcctagatctctaaaagctcacataagtcatcgccggccttccatccacttggagtcggatctctacgggtagctgtcatcacttgcacggtggtgtccctcttcctgagaaaaccgagagagagagagagagcagcagtcagcatagcaaagaagaaagcccacaagatcacaaaaaataaggatggatacatggaaggaaggatggtggtacatgacatgttywcmyyttttttttyycctctctctctctctctctctctttcctttctttccctgctaattgctacctcatctatcccttccacctcactctcactggatcttgtctctctttctctttctctctctctcacctgttattagtcttggctagctttcttctcttctgattccctccactatctctccaactttggccacatacaccacaaacaaaatacaaggtagctagctatagctgcagaagagaagggaaagcaatcaggcatcagcagctagggagagagagaaaagaaaaacacaaggccttgccaaaccctagcactttaattctctatcttctctccagagtcaccagacctcagctcagctcagctcagcatcacttgctacccaccacc

SEQ ID NO: 5607 - DNA, 2000 bp, Oryza sativa
gtacccatttcttgtggtttaaaagtcactgtagttcaactgctactccccataggattgcttatgttatgtaaaaagagaccatactatgtttaagtgagaaagctgtaagctaagtcgggttacattgctaattcttatttcactggccttaatatataataatctagcattagataaaacacgaaaatctattcaaattcatcgtactaaaatatgtacggatgtgtcctatttagttctagctctaagctatatctaaattattttatgacggagaaagtactaatataaggtgagttctaaatggtagacatccttttcttgctatctctctcaacaatttcttaaggaccaatacattctctgctcgaaattgattcttggataatgatggaccgacatgcaaggccctccaaaacagcgaaaatgacggataaatatgaaagctaaamccaaattggctctaaaaaattatctmactttcccctctaatcctgctgggattaggagtttggaaggattaaaaaaaaatgcagaaagctccttctagctcctgctgctttgttgtcttcagatggaaacccgcggcgtgagaaagcggcagctgcgccgaaccttccacggcggcggggggcgtttaacacgtggcgccgacgtggacgagtcccacgccgcgcacgaatctcgacgcggcgccaacggccggatctgccttcgtgggggtggacacgtgcgggggatcagcgcgccacgtgtgaagacggggctccgttacgtggtaaacgggtcgggtcacggtgggtagggacccgttaacggcacggaggctgaaataaatcacttgggatctgaccaaatcgtcgtctccattttcgcctcgcgaggaagaagagagagagagagggcaaargtcgtcgccgccgccgccgccgccttygccgccgtttggtctcgtcgccttccggaccacccgcactagcccttctccctccttgcgcgcgcacgcgccacacggccgacgacgacgagcaggtttggagggccgacgccgacgcggccggcctccttacgggtcccgtcgtctctgcggcggctgcgccgatatccatctcacgagcagagcaggagtagggagcaggagcaggggaggggggcgccgtcgtcgggctgagtcccggtgagcatccgcatcctctctttctctcattcatctctccgtgactctgtcccaccacccacttttgtcttgaatttttgcttgcgtgcgttaaccctagctgcttcgcttctagatctgggagaagtttttttctcttaatttcagagccttaaccttaatacaagtaacagtttgtttcccccaaaaaaatttttggggttcaactgaattgaacctccattttatggtgttatgatcagctaaattccgagtcataatatggcaatcgatgctgctatacaatttttggtcagtataactgtgtcattctgtgataattttaattggctggatgatataagtcgcaaggcaattggcactttttttcactgttcctcattgtgggaaacaaaaataatattattataacaagtatacgcgtcacttttttttccctttttgataagctaaaaaagaaagaaagaaatgaaattgtggagacagaccttgtagcaatagcaatgcaatgcaattttagaaattcagaagagggaatgtaactatggctctcatgcatggagtggagtaaaatgttgacaataactaacagtaggtgtgaaggtgatataaccttcttcacattttctcacctcaactgtatcacttctagatacgctgctttcatgtatgtctaggtttccattcttattattttgcggaaacattagttctgtggtgttgttggtttcctaacctttaaaaacttgtggttgcagaactttagcacaagttgtactagagaagatatacatctccttgtgctgtactctgttttggt

SEQ ID NO: 5608 - DNA, 2000 bp, Oryza sativa
gattgagaagattgggaagatacgcaaaacgaggtgagctattagctcatgattaattgggtattaactattttaaatttaaaaaatggattaatatgattttttaaagcaactttcctatagaaaatttttgcmaaaaatgcaccgtttagtagtttgagaaacgtacgtgcggaaaacgaaacaaacaaattcactctctcaccctctcgaacgctgccttaatagccaattcatataatagatacttataaggccagtcccaacccaaaacactaaatatagtttccataaactctacatcatcaagaaactagtaccagacactaccctttcaatgcaaacaccactattccatacttaaatttaatgatacttatctcacatgatgtcttggatgttgtgtacaaactcttggtttccttctctttccttctttattcacttgttacattattttttaattctaggtggcagcttatttaatgctatggacatcatcctaatcattgagctgggaatagcctaacatagtacacaattaatacctagtcccacttgtcatacgcacatgtatcttgaagtccgtgcttcagctggctacaaatctatagcccgctggctcttctctcttatcttttagagcaggtacaatggcagactattagccaactataaacatattttaataagataaaagatgagagagaaaagtagcaggctacagatctgtagccagctgcagcacggatttcaaaacgcaatatatgtatgacatgtgagaacatatattaatagtatagtaagcaactattgtataaattggctattagatcggctatagataaattagagctagtagtggattatactattaaatttgctcttatctttttaaaatatgtttatagcttatagtctattgctgtacctgctctaaagtgaccttaggacagtcccaaccctccacctaggatggtgtttatggcattaactacattgctatgtaggacttttagcttatgtggcactatattaattaagagagagagagagtgaagagaggaagaaactgagtctcatacaagacacagtttcaacacgagaacttatgcactagacactatcaagtttttaattgggagataatagtgtcttcataatagatgaagaataaatataatcggtagagaagagagatgatgaatttattaatggaccactttaaaaaaccatgggttatagagtgtagtttctatcgtaaagttttattgacatggcaccattaaatactacttatagatactgtgggttggtattgtccttgttcaaagcaggcagaccacgggcccacgaagccacgccgaccaaacctctgcagaaacagaggaagaggcgaaagagcggctcgccgcccgacaaatcccctccaggcctccatccacctccgcctcgcgccacctgtgaccccctgcacgccccgtcacccgtcaccttgtccacgcgcggcgcggctacactgcacctgcacctgcacctgcacgcagcacgcgcgcctctgcgcccacccatggctatagccaagctagcccacccgcgcccgcacggccgcactcgcacccacgggagaattcccggccgcgcggcgcgcgagcaccaatctaaaattggcacggcctctccctccccttccccccggcatcccgcggcgtgtcctctsgccttctgcctttcctcccttagccagtagcccaaatttacacsgcgccatttcttcattggcctggaacgacgacgaccacgtacgccatggcgcccggggccaggctcctcctgcggtaagggcacccaccaccaccaccagcagcagcagcgggctacctagttcggatcaggatgccggggaactacgttgaacttccgctgggcggccgcgggcaaaccagttgctgccgccggtggcgccgctgaagaagcagccgtcgcggctggcgtccggg

SEQ ID NO: 5609 - DNA, 2000 bp, Oryza sativa
gcttgctgacgctcacgtctagtagtactggtcggctgctggccgagaggggcactgctgccgacgtgacatacgaagcttcttttatcgatgatatatataggtagaccgtccctcttatttaataaattaataaaaaaataaaaaaattagtcacatgaaatattattcatattttatcatctaataacaacaaaaatactaatcataaaaaaattttctaataagacgaacggtcaaacattgaacataaacaatacaaaactacacttattttagaacgatagtactgctactcctcgtcctgaaataaataaactgatataaaataagatactccctccatttcaaaatgtttgacaccgttgactttttagcacatgtttgaccgttcgtcttattcaaaaatttttatgaaatatgtaaaattatatgcctacataaaaatatatttaacaatgaatcaaatgataggaaaagaattaataattacttaaattttttgaataagacgagcggtcaaacatatgctaaaagtaaacggcgtcaaacatttcgaaacggagagagtatattttactagtagtattataaatctgaataatttgatttattttgggttaaaaggaatacatgtttaggttcgtgcacccatgtttagtcgtaaactagctgcactagtattttccagacactgttgtgttgggagtattccgtacaaaagtaggtgtttaatgaaatwtaactagaattgtaactggtgaagagttgattagagttgatgcctttggtgttgtgtcagcgtgcgcgtctcactctcacccctgtcggcatttggagtggccaatcatgcaagcgtccatgtacacaaacaatctcgacgacccaggtgaagacttggaccgggcagcggccttcacaacttggatcattcggcgacacggcgcatcaaaatcattcgtcgactgacagctatatgctcggacatactatatgcgcacacacaacaaacggaatttaccacaagtcgctcgagtggtgagtttggaattcttgctagatatagctagcttcagccggtaacgaaaataagtaatcgtttcttccattgctacttttccacgtgcagttgccaggttgtgaacttatcatgttgctctctcgagtcgccgtcgtagactgagtaagagtaacatatacactcgtgtgctagacattttgaacgattttcttagaacaggtggagcaaattactctttaaagaagatatataaagtgtcaagtaaaatgacagctatctataaaaccatacgaaataagtggagcaaattacataagtgtaaatgtttataacatttcgaagaaaataacctcgagcgaacacgatgacacgacgagcggcacgcttcctcttatcgtgtgtgtaaaactgatcgagacgccaccttcgtgagctttcctttccgaaaacgacacgagcctaaaaaaaggcgaagtgggatgcgagagaacattccgtatcgcgcactagtaaagagtgggtcccacagacaaggcgacctaaacgtgggccccacagaccccatggcccacgtgccagtgacgcagcggcacacgcggggggtgggaatccagtccggtcagactccaccatctgtcgtttagaacctcccagtggggcccacttggcagtgaagtgggagggcctcgcagtggggtccacttggcagtgaggaggagtggggggatggtggtctccacccgcgtccccccgcgggctccgcgtggtcaactcgccggaagccgaaataggcaggcaggaggccgcccaaaaaggcgaacaccttgcgcgcaccacgccaccacctccacctccacttcgctcgctcccgctctcgccatggccgccgcgcccgcgccatgaggtggccgccaccgccaccgccasgccaytcctctcctctaccctgccgcgcggtgctgtttcctcgtccgtcccc

SEQ ID NO: 5610 - DNA, 1106 bp, Oryza sativa
aatttacagtgcatttccttgtaagtttacagtgtaatttatgaaacttacactgtaacttttgtaagttacactgtaatttttgaatcttcacatgtaaattttaaattttgtattggatttggtccttttcytgaggatatggtaatttaatgttcattatggtgtttcytaattgccttttgccttttattatatctatcggattttaatataaagattaaaaatctgtgtgatacgattataaaaatctttcgaaagatgtataggtactcccaggacttatggcctagtatggatgggcctccacgtatattagctgggtttaggcccatctaatcaaggcatgtgggagaatgtggcctgttgactggaataagtccacaaactgtcccataatttttacgtcgaatttaattagtgctcccttcgttcctaaatatttgacgacgttaacctttttacacatgtttgaccgttcgtcttattcaaaaaattttatgaaatatgtaaaactatatgtatacataaaaatatatttaacaataaatcaaatgataggaaaaaaataataattacttaacttttttaataagacgaatggtcaaacatgtttaaaaagtcaacggcgtcaaatatttagaaacggatggagtattatgatttagagatatgatttaaactcgacggaaagataagagatggcaagtgaacttattgtcttagtagtattgtcttattattccctgtggacaacaggtgtgatgtggcccattaatttttaagtaagactcagatatactccataaactttaaaacattaattgtaactaaaacagaaatttcttaacatttattatcaagatatctccaagatgaccaatgttcaccgaatagtatctccaagatagagcattatatccaagggatacagaggccgggttttatttaaatctattatctctcagcaaggtcagccactacgtcggcacgtagaaatgcaactcatctcacactctcacctctacatatacgcttgcaaggcctaggcttttgcaattctatcttgcactcacagatccatctaaacgcgcagcttggtcgcc

SEQ ID NO: 5611 - DNA, 380 bp, Oryza sativa
  misc_feature (1)...(380): n = A,T,C or G
gagcattaaatatgaataaaaaaccaattgcacaatttacatgtaaatcatgagacgaatattttaagcttaattacgctatgatttgacaatgtggtgttacagtaaatatttactaatgatggattagttaggcttaatagattcgtctcgcagtttatatgcggaatctgtaatttgttttattattagtttacgtttaatgctttaaatgtgtgtccgtatacgtcaaacttttttttttttggccaaaacatctagamacggcctaaggtgaacttggttkgtttataaaacngtgaccccccagttaagcctgcaccatytactagctagtagaatggcatcaactatattgcaacgaaagagagccggagagg

SEQ ID NO: 5612 - DNA, 2000 bp, Oryza sativa
tacctgaaaatcattggtccacccagaacgaatcttggctgcaaagttggaaaaaagacgtttgaggctcgttagctactcgagcttggtcgttacatgctttgattcgctcgagcctgctctgaagcttgcgagctctgaccagccaagctcgagctgttcgccaatagcccctctcatctaggctcttttattgtccgttggctttgattcttcatgttaggtttagtcccatatcaataattgataatgataaaatataacttaaaagatgaaaataattgtcacctatcaaattagtattttagcctgtctaaagttatgaattccggttaattctacaataaaaaatatccaatatgttctgagtggtccatggtacactccactttcctcatgttcacatgttgttggatggtctgatagctaggactagctcctccaaacccactcggtgcaccatttcttgttatttttgtaaaaagaaaaaaaaacactagttacactagttgttaacaaaatagaccttcggtagcatatttatggcttattcgtatggccacttcatccggctcaaagcggttcgaataaatgtatggtctttgaagaaaatcgattagggtatattttaaaatttcattctacttttgagctttggtgcttcacgcttcacggtgctgatcgattagggtaaatccaattcatgcccgaaaaggraaagaaatgtctaggctcggctcgatgctgtgtcaagctcgagctcaggcatgtggtcttagggctggacaaaaaactcgttactcgttacctcgctcgctcggtttggctcgactatgctcgttgtattttttaaaagagccaagccacgtataacgagctagctcgatcgagcttgcgagctgctcatgagcttaatgagctagataggagagacattaacaaaacatggcccataagtataactcaacttgctggcccagaaagagaaaaatcagtccatcccgtgctaggcccaaagaaaatgtgcaataggaatgtccaaaaccctagtagacttggtcaatcagtccccttcccctcattctcgatagatccagattcggcatcggcaacagccgcccgtgcgccgcctgagccgtctgcgccgcctccgcacatcccacgccgctccctccatcctgagccgcctgcgcactccctccatcctgcttcgccgtcgcccgtccagcgtccagtggccgacgctcgctgcttgccggttcatgcccaggaaccagatggccggtccccaactgcggagctacccacgccgtgatgctcactggtcgctgtcggcctctcgatgagcaacccatgccgagtgtccctgtgcatcacggaggaggaagacgaggtgcagccgtgtaggtgtaacgtactaacatcctcctgtgatttgttcaactgatgattcatttgttgaacacttgactctgtgattcgttgcctcattactttgatacttagatacagttgcatacttggatttgaacgctggtttgataatctgaatttttattgcaaactttttggttttgttgtattggctcgcgagctgaacgagctagctcaagctagccgagctgatccagtcttctagctcgttagaataacgagctggcttggcttgttatcctagcaagccagaccgagccgagccggctcgatatccacccctatgtgggcttggtcgagatcggctcgttttagcccctgacgatagtaaaacaagggatcggtcggcggctcgcgaagcgaaagaaggaggaggcagttttcaattttcacacgactgcagcgccccaccctttcctactctttttatttccccacttgtcttcccccgtgcggcgccacacctcttctcatcttctcctcctatcaactccctctctctccaccgctccgcttgcctcggatcgcgctcgcgctcgcgcggagcagcgcccccaacgacgggc

SEQ ID NO: 5613 - DNA, 2000 bp, Oryza sativa
taaagcacagcggccactgtgaagaaccctggacgtcaatccgcgcactgttaactgttccctgaaaccggcgagagccagccggcggcaggcggcagcccgaaacaacggctttccgatcgatcgatcgatcgctgctgcgcaaacccgcgaaaatgacaaatgcatgcacgagataagggagtgtggcaactggtggcgcattggcagccactggcgccagtccactggtgtcgacgcaacctccgacaccgagcggcggagcatgcagcgacgatagctcgcgctagctagctcgatccattccgcgcagcttaaactcatggatggcagtaaatatgctatccctatctctaagggactaacacagtagtaacactcacctgccacttgtgcaagcctatctaggctcgtgcattgtactccctccgttgtaggtaacgctgtaactattttatatatatgtttaactatttatcttatttgacaattttgtgtaaatagataagatacagattatgcttaaaacaacttacaacaaaataaataatactatatattatgtaaatcttttaataagacaaatcgttaaacatatatatatatccacaaatcaatgacgtcatctagtttatatttttattcccgttcaatctacggatatccaatacataaggtcagtaggctgccgctgcatgtaacctaaatcaataccagttcttacatgtgactattttaggttatgaccagaatatgtgactatttttaagagacagaagaattagcggaaatgagaacaatttttttggcatcactttcccctctttgaggacatgtttaacttatcaattaaacatcacaagataatagtagcaaacatcatataacgtatcaattcatcgagatagcattaattatagcaattacaaccttcaacttaaaattttggctagtgaaaaaacatgacaataatctgatcttagttcggttcagtttttttttggggcctcggtcttttttgccatttctacctgacgaagtgacgatgcactagccagctactagtagagacgaggctcgtgttccgtacagcctcgtagaataatcatcgtgcggttgtgttcacacaggcaagtggcaacatattcaggggcaaacaatccagagttccagtctcggccttcatttactcaagcagatgtgattatatgaaggaatggttggttgaccacgactaagcgtagcagtctaatgtagaatgccactccatttctggatttccaagagaaagcgtgaggggcatctttggcgtgcacccatttccagggtcgactagcagcttgcaattaccctgcataaatagactggcgagtgaaaaagatgcggcgggctatatatgctgtcatgtagtattcctgtgcagataaaccctgattaaaaccagacaaattgctggactcggcactaagtttttcgtcgtttgccaattatctaaccaggtaaagtcacataagttactgaaacagaacacgagcagccacaccaaccgaccacaaataagagtaaaaggcacacttgagattgccaggaacgatctgaatttttcttgggaaaaggctgctcttgcgtgctacgatggccgggctatgagaacgggataaaaaaaaaaaaagaraggtggaaaaacggcgacagtcatcgtcrascccracttcycggtttaatccccatmcctaagaatccctgtttktgacatcatgcgagcaagacacgcacgctcctccacctcccttttgtgatctgcacatcctactcacagtcgcagagccagctagccagctgcagctgagctctataaatcccagacctctctgctcagacacaaccacttccatagatcccctcctcttcttcctcctgctcggcttcctcacacagagcttctcgttgcattagccgacggaggccaccggtgaggagagcccgaggaggagcaagaa

SEQ ID NO: 5614 - DNA, 2000 bp, Oryza sativa
ttaatttgatcaaagtcaaaatactttaaatttaattaaatttatagaaataataataatattttcaagccaagacaaatttattatgaaaatatattaaattattgacttaaatcagtttgattttggctaaagtcaaaatgccttataacatgaaacacagagggagtaacttacactagtacaacaatttcatgcgagttgttccttggctccttgcgatgcagcatctgttgacatcttccatactgcttatgtaaacacacagtttggactgtcatgatccggtagaggatactagatctcatcagcaggattctgtcagccgtaagctacatctaagtagcaatatagagattattaacaactctggcctggataagcgtctggccaatctactggccatccaagatcagcgctaccgacctggcgacctgtactctagtcacgcctcctgatccaatgcatgtgctcaactgctcatcgctcgccgctcgatcgacctgaccagtttttaatcaccataattaacacgcgtaacagcgaccacaaacttgggattactactagtataaacacgttcgttgccgccctgacaagagagagaaaagagagaaaaaaaaaaggtgactcgctgccgagtcggacacgtgacaacacgttggtgccgcgtccggctcaaccgcttgctcgcgcggaccttatcgctccggtccgacgcgcgggtgacgtgtaccgagcgaccataccgtgccagccttatccccaatccgggcccacacttttgtcgtcgctcggtgtgggccccaccctgtcagtgtacggctcggcgctcaccggcgtttacctccccagcccacgggaaggaggcggcgcgcacgtggcagttgcggtgggtgaggctgtgagggcggtgcgcgagcctacgtggcacgccgcgtccacggaggccgtagagaggtggcccccgtgagcacgcagttcgagtaggcgatgacgtgtccgacaggtggttcagcgagcaataattacggggtaatataataaaccgctcccgccaaactaacggcggcagcccacggaaaaggcgtccctcgctgctgtttcctccgtttttcgctcacctccggtcatcctactcggctaccccggcggcaaaaacatgaagttctacagatctacgacatcagtttactagtttgtcttttgttctactttgctctttctttcttgcgaatttctttttaatcacgttttgtgtagaccatgtacagcatcctcacttgtgcagggtaggaatttcacaagaaaacagtgctcgtgcagcgactcgatagaaacggaagaaaaccgtatcaacaaccaacacgaggaggtgtgtaatactcctttcgccttgtaatataaaagatttatatagatggataaattttaatactataaatttaaacaaattttctatgtagattagtagtatgtgttatatctatttaattttttttatattttaaaacggaagtagtaaacaattacttatgtaggctttgggtgcagggtaccgtagggggtgagggcaccgcacgtcacggttaaggtggccggttactactactggtgtcacatcggcagcggcaactggtattacgtgatgatcttatcctcgtcgtctcgccgtctttatcccgttcgctgcttgctttggcttctcacatcagcactgactccaataacacgctcatcaaacagcgcgcgcgagcgagggatggataggatattttcgttcgcgttcgtgccatcctaaatcccgtctataaagccgtgcacatctctatcctcacctccattccattccactcgccaacccgacacgtctctcatcttcacgcaacgaacagcagcagcagctcaagctaagctaagctaaagtactacgtgttctttcgtcttcgtcggcgccggagtttgattcgtcggagctagctagcaagaggaagaagaaa

SEQ ID NO: 5615 - DNA, 380 bp, Oryza sativa
agccgctttmcaycrmcgamtcccggtatattttgcgccggacacaagcaaacaagtgagtgggcatacggccggagaaattaactgctgacaaaatttccaccgtttgttatcatgggcgaactgcataaagtgcacacacctgagacctgacaatgctgaacttacgttaggtttgttctctgttaccacacttaacgcaataacgcatattcacaaagttcctgatgtcttcctgtccgttatatatacagccattcacatytsggstagctaccccccccccccccaccccaamaaatgatcgcgttgccccgtggccactggccagtataaatttttaccagatctgagtcacccagtgcccaccatgaggccac

SEQ ID NO: 5616 - DNA, 2000 bp, Oryza sativa
gctgataggcaaggttagccaatttaaccttaaaatatcatcaaaccataataacttgctaactactatatatagaaccatttaaaataacctctttaattacgtggttctggacaatcttattggcacttagtcactagcttttttctcatttcctcgttgttgtcaagagtttggtttcttccttagttcatctagtgtgccctccctcttccctctaaccctctatgatctgcgttagtaggttgtagctgtaaaatctcctttttcctgctaatatatcgatgcgcaaggcttttacacgttaaaaaaatatatgttatgtggtttcggacggtggttaaacagaaggtcatcctcttctcctctattttcattattctctctctcatcccctctttagaaaacgatcgttaatagctactggcccgtatcgataaaatttaagaaattacaatcaacaggaatagaaagcatatggccatagttttttttgttcttgttgcaaccagctgttctcgatgaatgtaatacacatgtggtggttaccatctcttagctagcctcccttgtgtgtcatgcatcaaagaaatgaaagttgttgcctgtcctagccatttctagcatccccaataacctagctttcccttgtgtccaattcatctctctctctctctctgaatggtcatgggagagatggaaaggcagctaatggagcaaatcatttgacatggtcgtgtaactgactgaattgaaaggtggcaatatatgtagagctagtgctccttgcattgttcacgtgggaactactcatgcatcgatgtgctaaaaagcaagtaattaagcttagaaggtgttcgaaacagaagtgtgatgtgagagagatgaaagtgattatgtttttgttacatggcaatcgttaagcatagcatgtgcaaaaggatgagattgcaatagagagagagagagagagagaagggagaagtggatgtggcttgtgcttggttgctaacatgcatgggcaatggttaattgactcatagcaagcctactttttgagtggttgcaacatcttaaccaaaatggtttgggcagtgctcacatgcaacatggattattattagccttttattttatattgctattatggaagctatatcaccccaacgtttagccttcagcttataagcagaagcaaaaaattggattttaaaactttattttagaggtaattttggggttttttaatcatagtttattctttaacatttaattttaaatcattaataaaacatatataattgttttactgacaattattttcaatcgtaaataaaccattttgcttataatatgtagatcggtgcacaataagttaactacaatagtactataataagatatgacatgtggcaagtagaatttcacgaaaggaatgagcccattttatttcgagatctttaagaaaagaacaaaaaaaacaaacctttagatatgaattaattaattgggtctcggaaatttatagcgttaagtaatcgctcctatatataaattgggggtctaaatcaaatgtaacagtaatatgtaaaatgagtttgttcctttttggccaaaattttgttttgtaatcacacagatcgatcaaaggcctcaaggatactgataattaagtgatatgtcatcctctttctgtctctctctctctcttcctctctctcctcggagactctctctcacacacacacttctatcacatgctcattctttctctctcaagactacacaactttctctttctctctctcctcaacactatataatgacggttgccaattgccattgctctcccaccaatccatctctcttctctctctctctctctctacaacttctcagctaagctaagccaagctagagccatctagctacttttgctgctttctctctcctcctgcaacacacgacctagctgagagctgagctgagttgcgccggcc

SEQ ID NO: 5617 - DNA, 2000 bp, Oryza sativa
ctgctgatcacaccccagcattgcagttttaccttctttttttacagagataacatctttctgatatctgtctaattatatatgttcctctaatatgatatggaaattgtgccttgttatatctaaatttgtaatatactgtatttctgctgtttgatattgatcaccttctggtttgggtttcagtgttttcacctctgaatcctcactcgtgagttgtggatcgtgatttctgatgtctgtatactccctccgttttaaaatgtttaaacatgtttgaccgtttgtcttattaaaaaaaatttgtgaaatatgtaaaactatatgtgtacatgaaagtatatttgaccatgaatcaaatgatatttgaataagacgaatggttaaacacgtacttaaaaagtcgtcaaatattttaaaacggagggagtattttttttctctctcaggtagtattgctacttatcaagtgttggatgcaccatgcgtagtgtgaacctggaattttgtaatttcataatgttgaaaagaataacgtgcaatgtggcgtcccctgatcaacatggaagcatactcttctttctctgtttttttttttagccggcaacgtggcgtcaggccgtcagacttgacaaacacatagcctgattagttgtctactttatcttaagcgacctctccgggtactcacgtgtggaattggacgaatgcttttgactattgtttctcttcgtctgaaatacgaacaatgttttcttttggaacgtatatgctcaagtactcaacagtatacagtactctgcttctctctctctttctctctctaaattatgctcaaaattcccataggtattttaacatatgaattccagtaagcgttgcacatatgtagttccgaggcttcacgctttcatcgatatatagttcgatagccacagcccacgaaattgacaaaaacaccagacagctactgtaggtatacaaaatgtacgagcagacatgacctgtttgtaactactactccagtgacgacacgaaccaccgaccaccggtagatgatcactaaaaagtttgaaaggcggtcgctgtcgagcatgtggtggtggtggtcatcaactcgtgcattgccacccagatctccaacctcggctctgatgaaacccaacagacggaccacccaggcacgtactccgtaccgttcatggccggtgcggtgccgtgccgtggccgccggcaaggccacccatcacaccagggcccccatcatttggtaccaaataagccaaaacacatatttacaaacaaaaattaatttgtaaatgttcttaacgatctaaaagtaaacttcaataaaaaaaacctaaaataaacttcaaatttaaacttgaaaatttaaattttagatgataagtactccctccgtctaggaacatagcaacctaggaccggattagacacatcctaatattaatactggatactgaatatgtcgcatccgatattagattgctattttgtgggacggagggagtataagtataagagaaaatgaggctgcaatttttttttacggtggtcggcatgttgcgacaagcagcaaagcatctcgaatccatcggcatcggcgatgccgatgtgccaatgtgctaccgcccgagggggttcaaaaaccagccgaaacccacgcggcacggcagcccattagcccaaatattccgccgatcggcccgcaccaagtttccggcagcagcagaggagcggcgcgcgcgcgttgtcgttcgtcgtcgtctcgctcgccgacgcaaccaacgcaacgcaaccgcgaccgtttcgaattcgagcggtttcacgctcacgcgcgccacgtttgtccccaccccacagccgcgggggtgattaaaaacggaagcgaatgccgcctcggcctcctcgtcctcacaaacttctcgttttcctcgtactcttcctcttttctgtccccttatctccggccgattcac

SEQ ID NO: 5618 - DNA, 2000 bp, Oryza sativa
atgttttctttttaaaaaaaaatgcgaagaagtgcccaacccattccattgcaaacgaaagttatgtgcattggtttgtattaattaatcaacctcaaatwaaacaacacaccacacaccctaccagtatttttgaacagatcaaacatactgacttatctaatttttgacttactaacatgataagatatatcttttacaaggtggcaatgcacagaggcaataacggttgttggtgaaaggtggtggcatagagtgaaagacctagttaatctagtattgaggttggtaggggctggctggcgaagaaggaaaattggtgtgagggtggacacgtgctggcattgtttggtggttgttaagcttgtgggcgtttagggcacaactacaaggtgacatacgagttctaggagaaagcccgatctatagtattctaggatagcagtggcaatgcctttggatgctgcaactatcttcaaggtggtgtcgaggtgcccttcttcctatccgatagaaatttttagatgaaatgatatccagatatccttggacgggcaataataatgtcttcatcgtcgcaactttcttggtgttgtcggtttggaggatacgttttttgagtgcgatgtaggccggcgatgattggtcttgaatagaggttggttcctaaatttgtgctatgctatctccttcctagcggtgtggtctttttccccctttctttcaggactatataggtcttgtttggatttagggactaaattttagtccttgtcacatcggatatttgaacactaattagaagtattaaacgtagactaatgacaaacccattccataaccctagactaattcgtgagacaaatctataattaatctatgattagcctatgtgatgattcagtaaatatgtgctaattatggattaattaggcttaaaaaaattgtcttgtttattagctctcatttatataattagttttgttattagtctatgtttaatacttttaattagtgtctaaacatataataatttataatttagtccttgaatctaaacacgacttataggtagtctaatattttttcatgctacgaagtaccttgatatggaactttgtacagtgcgttttattccaaagagaaagatgactataaagtagtaaaatcaaacatgtgcttgaaacttgctttttcacaagttcatccattatcccgaactagaatctgctcgagcgaaagcaatctatcctcctagagtcaaacatgtcataatccctgtcctcctcagttcgtatccaagaatgcgatgccaatctccaggacaaaggggaaggcgaggacggatgatcccgagatgccaccaccgttgtcgccgtgtttacgtatattattacttcgtcgggaaaaaaaaatagtaagaccccgacagaataattaactatctgtcacttttataagtggtgttaaattatttatcaccagaccatatgctatagatcctatatgtaatagacagcgagtgaaaaataattaattaccatcttttaaaagtgacgagaagtttaatgtcctagccccgacgcaacacaatcacataaaaaaaatttccagggggtctgggtgtaaaaagaaaaggtggaattatgtgggagacgcaggggcgtggatgcaaaaaggtgggtgcgtgtcctcgaatccagcgccgcgctcgcagcttcccttctccccgtcgcagcgggggtgatgactcagcacccccatccccaaccccccaaatctcctctctctcctctcctctcctctcctcgcgtataaagccggcggccgcttctccgtcaagctccccccctccatgacgcctcgctcctccgccgccgcctccgcctccgcctccgccgccgccgcggcacagcgtcggaaaccctagcctgcgcgggggcggccggaggacagggaggttgtttgtttgtttgtgtgtatcatacggatacggcggc

SEQ ID NO: 5619 - DNA, 117 bp, Oryza sativa
gtcgtcggtagggtcgggggcggaggagaggaggaatccgtggcggctgagaggaggagatcgcaggaggaggagtgggagaggaggcggtcgcaggaggaagaggccgtgagggag

SEQ ID NO: 5620 - DNA, 2000 bp, Oryza sativa
cctttatagctaatctagaccctgaaacctgctttgccctgccattagcctgacagatttattttatgaagccaatcattcaggcttaattccccttgtgatcatctaactagagtaacacaagtgctctcttgtgttacttcaaggttgaacacaaggctctatgaggttttcaaacattattattgtgttgagtgggtccaccaaccagtgaaacagccttcaggatagtagtatttcctcatgccatattcttggtcaagtatgctctcaattcaagaagattggccttgtcttggggaagggagcaaataggcatgacaactagccaaggatgtacyttttgatttactactaaacctaggcacaagtctaatctcaaagattgagccagtcttgctgttacwattttcactagcgatcattctgaagctaaccatctttctcacccgctcgtgcaacctcttctatgaagatggtcccaagagctaaatttgccatgcctgcctagtagatcagcttatcatacagtggcattggtatatactgctccactgtacatatattttactattactaccttgtacatatgaatctagcgtgtgcacaattgtttaaggcaaagtgtgtagcttggccatgattggggcactagtgcagtatctgtattgatagtatgttatttagtcatgatcaacatgaacttggtacagggatcgataacaaatctgctactattcaggattactttctctgagctgccatgcatccgtgggaatttttgggataaactaagcagaaaggatggggctttgcacgacttttgacggagataaccccggtcgtgatctcttggttccaggattatgatgctaattgttaattattggctgtggcttcagagttcagacggattggccagttctggcaagaatgcttacattctctcctgccatctgagcaaatgatcattggaaatcgacttcacgtgattggcatacaggttttattactctctctccctctcccccctaacctaacacctgtcctcatggtgtgatcttctttccaactgattctgatgtttcaactcgtggaatatgcacatggaaaaattctccaaaaaaatgctggatcgttaattctggatatatcatggctataaataaaaatattacctgtgccccgagatataagcgtagccaaaatcccttatactttggatgaatgtagtatatatttcctacgtgaagtaacagaaatgagcatgtgggaactggactagggtacgtttagcacgtgccaggctcaatcaattattactgctcactgccaataaagtgtacgttcatccgttaatctacttctaaaagaaaaattcaatgcgatattaactgcagaaattttactgcacggaaaccattttatgacaagtgatgactgctttggcagtggacggagaaagaacccagatgaattagaccataactacggggcaacaaccgaacctggccagtcaaaaatgtcatcagaggaatcgacctgcctgttgtttattacaacctgtgtctgttttattgctgagatcagctattatttccatgtctgtactgagatctcacggtccgttcgtgtccttttggtataggctgcagctgacttgtttagtacccagaaaggtggtatgagcgtaccacgagcataaaaacaatctagaaataaaagtcaccagataatgacagatagtaacactctagtctatagtggtactagcatttctgcagtaggagagaaaggggagtttgcagcattaggtgtggtgatttttgcagatagagggtgtattttattcagtcagtcaggtagtctccctggttttaaagaaaggagggccgtatcagaaaagaaactaatggcatttctcttttttctctcttttgccaagaactatgttcttgaacacatcaaaagcaaccaaggaaaataaaaggagtagctag

SEQ ID NO: 5621 - DNA, 2000 bp, Oryza sativa
ggaaatggctatggtatgcaggtatgcaacgagctagccgacatgcatgttttctatttgccgatccatcactccatccgttcatcggcaatggctagctatgatatgcaagtatgcaacgagctagccgacatgcgagccaacgagcacaagtcgactacctctacctctagaaacgccattttgcaggaggatagctactggccaacgaacgcatggaccacctgctgtatgacagtatgatactatccccgtcgctctccggcaaactattttcctcggcagacaggataggtgcctcccaaatgctagcttaactaaattttgcgcatccttggtgcctgcttgctggtcctgcaccgtcgacccccccgtggccctcaaattcgtcctctgagctcgtcttgtaaagcatcagcgcggagaacgtatggtcatgaatgaaccgacatgaccagcaaatgggatcgggcaaaacgatacggccgtgtcccatacttgatgtgcagatatttttgtgacgtaactgctctcggagagcaggctgatcgagtgctaacgtgtaccgataagataggtgctggactaggaacaagattggattggagagcattggagtagaaactcccgtgcatcggccctacgtacttttgtgtcaaatttacggtgtcgtaattcaacttttctcttccttctctcatttttctccgtggatgcgtcattcgtgaaatgcttattggcaatcggttgctttttttcttttttcgttttcgcctccatgagactctgactgcaggaacgccggatgcatgcacacttcctagatatcagctggttataatttagaaattctatgaattggagacgaatcaatactagcgctttgaataactgttcatttttttcccaaactacacgtgaaaaatcttagccatctcggaaaggaaatacacaaacacgagcaggctcccatcggatgctctaattagtcgaagaaaaaaaaaggcaaaatttgagttttgaaacttaatttgagattgattttaagatatttttaacgtagttccttttaagcattggtttttaagtcacaacgaacacatatataaaagttttacatataaatttatttttattccctaataaaccgttttgcttactaggtaatactctctcctttccaaattaatcatcatataatataatttaaaatttctcaaattgatcattatataaccgcatgtacacggatttcatcataatataattaatgtagcaagagaaaatgtatgcatgctaaggtgtaattggcatgatgtttttattgatgcatgcattgtgagagaatatgagtatggtcttttaattgatgtaatttaaattattcttggtcttagtgtataaacatatcaatttcagaacagggagtattagcaaacgatggcactctactatttacgaggaacacagaagatgcatttttcgcttaaaagaagcacatgcgaaaaaatctcatatttccggaaatacgggggaaacactaataaaacgacagaaattgccagccgtgcatagccgccctgtaccgtttcactctagtactcgtggcaattgctactaccgcaggcacagctcatacgccggacacgcttccatgtgggcccatgaggcgcacagactccaacgtgcccatggaccaggtccaggatattttcggcggaatggctcgcttccctctcttctacaaaaagggcctcctagcaactgcagcaataatcagatcctccatcccgcggcggccgtgagcaccaacactcacgcattccttcctactccgcgagatctccggattcgtttcggtgttttgcgagtcgcgcccggagaagaggagaggaaatccggtcaatcgcggcgtcggcgtgccgtcgcttggggtggtgttggtggttctgaattttgattgcttcgtgcttttcgtttgggggagggcagtggtcgcc

SEQ ID NO: 5622 - DNA, 2000 bp, Oryza sativa
ggcacctcattagccaagaaatacagctcttaatgctgaacctagaaggtcaatttccatgtttgttgacaaacttaataccaaattgttgtatctgagacgctaatttatatcagaattattcaaccaaatcagagtactctcacaagcatttcagcgcactaaattaagggcctgtttgattcagcttaagattattataatctggattattatgagcaagctgaaacaaacaaataacttattataatagattattataatctataagccagattactataatcyggtaatccactctaaagatgtttttttwaattattgggtggctaacaactaataatccagagaatcaaacaggtaacagcttattttttattggcttattataattcagtttatagtaatctaatttaataatttatattatataattatcttaagctgaaacaaatagatcgtaaggtctctacgggaagaaatggaggaaacgaatttttgggaagaccaaacatgtgttcctccctacatggccatgatcatgagactccaatacaagttctcttcctcttcgttgctccctcttttctgcttacacgtaggccgtgtcattgagttatgtgcttgcgatcacctcgattgaaggagaggaatggatgggtgctttgttctgtactccatgcctcagcctcttcttttcctccttgttgttttctccttttgctttggttcttcttttgttcctttctctttttctctcatgtaaatcttgatgacaggtatcagaggatgcctttgtgtcgtttctcttaatttatttcgtgtaaaccttctgctggtttaccttctgattttctgaatgagaaaatacacccactgaaatagtgagtgatttcatgcactgaataagcttatcacttaaaagaaaactttaattttggaacctaactgtggagtttcttttkgtcatactctgtttttcagctttagcttttaaaccgtaaataatatagatataaaagatttacttataagctatttttattatttcatttatgttttcatgacttatcaactaaagctcaaacgatcaaagcctaaaggcacaacaaatcacttcagcttggccgcgttcttttcagtggttgggtttggacgattagccaaatgtaaaacgagaaacacgaataacatataattagttaagtattaattattaaaaaaattaaaaaataagtttatttgttctttaaaacatcttttataaaaaaagtttcgcacaaaatacaccgtttagtaatttgaaaaacgtgctaacgaaaaacgagaaatatctaagcggaactagctgtttagaatgtggaccctttttatatcacgtgtcgtttgtcaatggcacgtatttctcatgtgattacacagctccaacctttcacagcgatgatataaaactttcactcactgacagcatatatatttgtagtcattgtttttttgagcggtatatttttagtcattagccaataagaaaaacaacttttatcctggagtaaatagtaattagctggtaatcacatgggcaaagttgtaaaattacctaacagcgggccccataggtcaggccccatcccatcaggggtttaatccagccgaaacggcgagtagttctcgttcccctgaggcctgatcaccaccctctctcctcccctttccctgaccccgcgaccgcgccgcgcgaggcgaactcgccactccgatctctctctccggcgacgccgccgccgccgcacaggttggtagtcaccggagccctcccttccgatcaacccttgcgcgcaatctacccatgcatgttcatggacatgacctgctgcgtttgtttttcactgttcattctgatgtctctctctttttttttaaatttaattttatttatgttgtttgatccgtttttgtttgtgatggttggggagttagggtttkgctctctctcgcgcgga

SEQ ID NO: 5623 - DNA, 2000 bp, Oryza sativa
cgacgctgcaatgggcaatgtcagagctgttgaacaatccaaaggtgatgcagaaggcacaagacgagatacgacaagtgctttatggacaagaaagaataaccgaggagaccataagtagtctgcattacttacacttagtcatcaaggagacgcttcggctacaccctccaacgccactacttctaccaagggaatgtcgtgaaccatgccaaatattaggattcgacgtgtctaaaggggctatggtactcatcaatgcatggtctattggtagggacccaagcaactggcatgcacccgaaaaattcatgccagagaggttcgagcaaaacaacattgactttaaggaaacaagctttgagtacataccttttggagcaggacgaagaatctgcccaggcatgacgtttaggctagcaaacatcgagcttttactcgcaagccttctgtatcactttgactgggagcttccatatgggatgcaggcaggcgacctcgatatgactgaaactctggcggttaccgcacggcgaaaagccgacctgttggtagttccagttgtgcgtgtccccatcgtgggttaattagccatccacatttcagttgaccgttattcatatcgatcagtgtctcgctgtcctttgtccaaatgtcaaattaatcagccccaataatgatcatatatatgttttgtttgacttttagtttgttcgagcagcagtaagtagataggctaagctttgaacaaacattcaatgtcgttcatgaaatgtatctgcgagtgatctccaatggtatcttgacagtgatgttttccaacctgttcagacaatatttttcaacatgttcagacaatttttgtccctgcttagaaacttatcaagatcagaattcagattattagaaccaacttacaacaatgaacaaactgcaaatgatctgaagtccaaaaaaacaactatgcctatgctgaattagcaacgactgaatgagaacatgcaaagcgagagctcatctgctcaccttcctggatactcacacgtcgtatgcatccattctcctcccgtttcatccccccctcaaaaacttcttgtcaacatttggcagagcagcggtgatttcaccgtgccatgttttggaatttcgacatcctgtctcagtgtctccacacaaaatgtttttatttttgtttttgttttgttttgcagaggccaaatgagtatcagctccacaacctcagggcagtaggacactctgtttggctgggctataacttttcagataaacagataattagttaagataatatagatgcttagatttgatttggtcaccacatgactaacactagtacatgccgataaaaatgctgctttgcaatatgagaacgataagtatcttgatatgaaattaaatactcctactaaaataacaagtaatatgaagaataaaaaagaaaagtattttttatgataacgaaaagaaatccggtctctatgttcacacacggccctttcagtgtagtatgctaaaaccttgtcaacggcccagaattaacgtcgtctgaatgtcaacatgaaagaactcatttgctcatgggcttcaccttcctgcacactcacgggtcagatatatccattctcctcccatttctttccaccctcgaaaattttgtcaacatttggcacagctgcagtgatttcactgtgccatgttctggaatgttggcatcctatctcactgttgtgtctggctgcttggctggccaatgaattgtcagatataatagactagtattagacaaaataatatagatagttagatttaatccattatctaaaagagcttagatttgatcaggtcatcacatggctaccactagtagatgtcagtatcactttggacatttggacaaacactttcttatcggcacagcttctgagctccttcagttcaatccacccattcgatagtccaaaggagcaaaagccatagcc

SEQ ID NO: 5624 - DNA, 2000 bp, Oryza sativa
gacagactgctcacttggggaaacaagagaaaacaaaagatataacagagtggcatttgcccgatctatggtctgacagaagcaaatggtgtccatgctacggtggagtgtactgtggctagaggtttacaggagacaatgagagcacactgggtattgccggaagaaaggagtttcaaatggacagggcctgattggttgctagtgatgctggatagtttgaacagattggtgaaggcacatgttctgtatttactttgaagagcctagcacctgcgaaatgttgtgatccatggtaaaggaaatgcatcaatagttgactcggttagcttcctagtaagctatgaagtcaactattgccaatctgacaaagggaagatgaccacaaagggaagggccctttgtgtatagaaccaaaccagaaattctctctacaagtattgacagacaggtagagaaatggtgtgctccaccagaatgaaaactgaatgttgatgctggctatagggaaagaaactggggatgcaagtgtcgggtttatcttcaaggactggaggggcttggtgctacttgccgaccacaaagccttgcatcactatggctctgctgcccaggctgaatgacttcgagcgacggttgaactgatccacattccaattgtgatggagatggataatgtagaaatagccaaagacttaaaacagcaggttccttgaaatcggcttggcgatgacgattgaagagattaaaggaataatgcagtgttttcaacaagtgcaagtgcataagataaagagagaagcaaatatggtagcacatgttttagcccaaatggtaatgatcttgtgcatgcggagtgaaggctgtgtactcccacaagaatcctagacttaatgaaccaagaatgtaatcccttattcacacattaataaagttctctctttaccttaaaaagaaaagacgaacagagcatcggttattcagtttcgttttttggttgtgtacattgtgtagagaccggattcttaatccattattaaaaaagaaatcacctccattagcaaaatcctaaagctaataccagcaagttgctgagaaagatagcagtagcgagtgaccgtgatattcaaagaacaatgaagtggccacgaaattacacaaggtggtcattatctaaaaaaagaattacacaaggtggtcgttatctaaaaaaaaattacacaaggtggtacgaaaagtaagaatttacaagggttcgttttccttgagaaccaaagggaagagatcggatagatcaggagaccgcgatgcaacttattacttgtcgcggactcgcggtatgtgtggtgggatcggtggatctaccgcgcccggttgtcgctagcgcgctagcagcagcgcgtgcgcgtcgccagaggcgtggaggcctcgtctcaacgctcctccccaaccaccaaatcacatggcccctgctgcatgctcgcttcccccgatcatcccgccggctaccacccctcgcaaattccgccctctaaaataaaaacgcaccgttcacgactccacgctgtgggagccagacttttctatactggtacagacgtgcagtctagtagctcgcgcgcacagtatgtcagtacgtagtggtatgtcttgcgcttgcgcctgtcggtggatggcatttctctcgcaaaatcgcgacgcggatgcacagacgaatcggcgatggatcatggtggatcacgccaggtgctgcagggccgcaccacaccgctgcagcgtcaccgtcggtgcagcacacgccgccccgccacccgcgcgcacatcggtgacagcatcagctcacctcggtagctattaaaatccatcccccttctccacctcacctctcctccctcccagacaggctccattttccactctcccctcctggcctcccacctcccatccggatctcgccgcgccgcgccgcgccaccctttttccgcgccgcgtcgtcgggc

SEQ ID NO: 5625 - DNA, 2000 bp, Oryza sativa
tcaccttgcatcttgttgatttcttaatgattcatcatttcataatttggatcattttgccccaatgttggtgggcgcttggagatgggggatgttcttggtttactacatctcatgtacagaacttgtacctatctgttgtattgaagtgcaaatttctttgatccagtactccggtgccagccttattccccgttcctacgatatcttcattaaagaatgccaagtctccaagaacgcatgttccgttctttgacagtttgatagcagtggcatgttgagccgttaggtagcatatgaactgtcagatgctgttgtgcatatgaggttttgtaacatgatcaagtcaacacataattcctggcaatttccatgcactcatgtgcactaaataacagtagttgacttaacatgaaatccgatcagaattcagaaaataacctccaaactgaagaacatgaactgaattttttttggtatcgtatttcagtagctaatttttcatgatactgtatcgattcttaaattcgttgaacccggcacgaacaagctgccttggctgctaaaaatgtcatttgataattatgaatttggtacctgttaaattattgcacgactcgtatcatggtacacgaagaactctggcgttgaatcgatccttgcacgtcttagtccccaacccamacgctcagttgccatcattatccccacccgctgactgacccagggctgcatgtttgttacacctccccaacatttgcacaactcgcacatcaccgaagaaatgttcagacataaaaaaagaagaagaagaaaagaagttgcatcagcaagccagacatactactctctctcggtcccttttcaagtgcagttatagttttttttaatccaactttaaccgttcgttttatttaaaattattaaaaaaaaattaaaaaataaatacacataaatcactattcatgttttatcatttaataacaagaaaaatactaatcataaaaaaaatttaattaagacggactgttaaacgttggacatagaaaaccacaactgcacttaatataggatagaggaagtagtgctttttttttgcaggggcataattatcatatcatggtgtgcaaaggaagcgatgggacaatctcgttatgtttaaattattagggcatttgcaaatttgccaccggttttttcaatattgcaaggatgccactcgaatgatagttctagtggcatttttgtaattttctaatggcagttttgcaataatgattcaaagtagtggtaaatttacaattgcctctaaattaattaggatggacattttccaaaaagacttggagatcggtcagggcttaggacaaaccagtgcacaatgtaacagcgacatatcgcgtagaagaacaattcaaacttgagttatttatttatcttttacgatgtttatgacctcgatttcaagtctacgcccccattttgtcaaaaatattactccttcccccctctgaatgggatggttaaaatgcaaatttaatatttaggtcttttttttctccaataagagttggatgaagtttaagatttttgtgacacgattttcaaactgctaaacgtgcgttttgtgcgaaaactttttatatgaaagttgctctaaaatattatattaatttatttttcaagtttgtaataataaaaactcaatcaattatacgttaataccacattgttttgcgtaaaaaaacttaatcctaatcttcatcttcatcttcagataaaagaacgccacctcaataccactgttcatcgtaagataaattcgttttcgttttcgtggacttgaatttcaagtctcctctccgatggcctctctaccatccatgtcttctccactacgtctcccgcgctaaccaacctacaaagatcagagatcgcgagcgcgagagctcgaggtcgcagaggaggagagagagagaaggagatcaagaagcacggca

SEQ ID NO: 5626 - DNA, 2000 bp, Oryza sativa
acaggggcgcacacgatcgggcgatctcgctgcctgctgttcagcaaccggctggcgaacttctcggcgaccaactccgtcgacccgacgctggactcgtcgctggcgtccagcctgcagcaggtgtgccgcggcggcgctgaccagctggcggcgctggacgtcaactccgccgacgcgttcgacaaccactactaccagaacctgctggccaacaagggcctcctcgcctccgaccagggcctcgtctccagctccggcgaccccgccgtcgccgccaccaaggcgctggtgcaggcctacagcgccaacggccagcgcttctcctgcgacttcggcaactccatggtcaagatgggcaacatcagccctctcaccggctctgccggccagattcgcaagaactgcagggccgtcaactgatgagcaaaaaggcaaagattttttgcatctgccatgaccccatcttggatttgccagaagctatatcgtcttcttggactcaagtgtgaatctgtcgtttttaatgtgttgtggagcgctacatgtttcgttttgttcaagctatctaggattctctctccaatgcacgagtagaataagcaattagcatgcaaagttgctcgtcctacacgaatctgcagctgcattttcagtgggtgtatcaccaattattagagcacagacaaacgcgctgtgtctatcagagtaaaagaaagaatatgcaactgccatatggttttatcagtaggtgctcgggtacgtcctccgaactgaatgatgcagctccttgaacaagcaaggaaaaaaccggaatgaatgctaacgactccgttgcaaagaaacttttagatttttgactttgcatttctggatcgatctgccacctaatctcatcatcgaccacttatgttccgagaacgatgcctcgccttctctccagcatccaatcaggtttagctttttcgtactactactgcaactactttttcattacgtggtgcatgatacagtgactgatgatgtggccaaaaatcatgccttgatgatcctgaatatgacaggcagatttttagtttggagaaggacaaagggtgaaaaattcgctaaaatgtcatggaaaaacgtcggtgaggagtttaattttagtttgacgagaactctgtacaagctacatactgtacacaaaatattcagagggaagaagcaggtacgttgtccttaatttgtgtatgcttaccacgtacggatatagcactagttgtcagcaaccactcaaccggagaaatcattcccctccaaacgaccaacgaccacctctctgatcgatcgatggaagaagaaggctccaaatattgccagctactactactttcattggccctgcaattattcgttcagaaagtgatggggagagcgagggaccgtgcagtcaaggcatcacagcttagctgctgcattgctgcacctgcaacaaactgaaactaaacgggagtcagcgttgtactgcctgaatctggtggcactagcacacacgatcgggcgagagaattaggtgcacccaacgaacgcacagggaagggaaggccatatgcaaaggggaaactattctaaagcacagtgtttctgttcgcacaccagcatgcatgcatgcgttgcactctgaaaacgacgccgcgatagccgaagagctatctacgttgttaacacgttcgattcttccgcgaatgattggttatatatccttcgggttcaagcaaaggtgccgctagttagtttgtcatacttaaacaattaagcctgtgcatggcgagatatgtcatacacatgtcagattaattgatcgcgtgtgcgtgtctatatatagccagcttcctttcttcttcgtcacaccgacttaacacttggtcatttctcatttgtgcgtcacggagtgagcagtgtacatacgttactagctcaaggctgcagcggagagagagagagagagagagagagag

SEQ ID NO: 5627 - DNA, 2000 bp, Oryza sativa
agtttgaaataattaaaactcaataaattatgcgctaatggttttcttgttttgtgtgtctacacttaattttcatcttaaccaggttagaaggcagcctaatatttgtgaaaaaaatgatttcaacatagatattttgattgttgcaatattaaccacacaaatgtgaaatatgtgtcttccgcatttgcagtatttgttttgtgcttatgtgatcgatttggtttgtactctctccatcccaatttgattatcccataagcaaaaggcaccaaaacatccatcattctgatattaatcctcatcaatcaaggtgtcccgtcgtgttcaacaaaaattaattaacactttaaatattgcatgggttaaaccaatagaaaataatattgattagttgaatgcatttagggcatttcgcgatgcaaatttactctttgcacaaataacaaataagtattttgttagatgatcatttaaaaaatatcaaaaatttagatgacgatcaaattgaggtagagggagtacttcgtaacgtaattttttcttacatgtatggattgagaaatattttggcaatctagaaggctaacacttgcagtgtaagctttaaacgcatgagctagcgttgctgtacttttwaaagtccaacttaaaacttgatacaaattttacaaaaacttggtaatcaataaatttcacagcgaaaacgggccgggattgggagggcctggtagtgcatcaggcctgaaccgacctagcccattcgacctgacgtccaggacaactcttacccatcaaaagcccaaaactgtttacagttcagccttacccagaccttacatgggccgttcgtctatgcgggcctggcctagtggaggctagccgacttgtggtgttctttactgtcgtcgtacatgcatgcactgcaccaaccaatcgtgcgcactaactgatttagtgatatgatgtcacgatgcttatctttctgatgggagagactattccaagagcatgtttagaggagtaattggttcgtagtcaatttaaaaaaaatttaaaaataggtttatagcttttaattcattttatgaattacaactttttaaaatctgaacaaaaaagtttataattccgagagaaactgcaactgccacaaaatctccaaacaagactcaacacacgagatgtaatcggttgtggaaaatgttttctttttcttttatcaatacatgcagctagcagcagtagcactacacactgctactcgtctacagatttgattggcagattcagtcagatcacatcgtcgcaaagtctgcaggctgataaacaatgtaaccataccattcgtcccaatcaactaatcgtgccacacgttgcaaatagacgctgcctaattaacaccgagacgcatgcatatacatggatgcatgcatttacagcacttgatcatttgatttgattaagttggtgctccactacgaaccacttggggttttcatttcagatagataacacgagcactgggaattaggaggcgtgctaagtgcagcttcactacagatttacgctgctacactattctattagattatagcggcttatctacttgagttgagcgatgcaagcttgcagaagatcacacacttcttcagagtcagagattcagaaacgctgaaaagggtcctagcgtccaatgacccatcgccatgcatgcagccatatggaaaactgattaccagttatggaagctgacgacgacacatcgatctctcactagccgcccatttactctgccattcatgcacgaggtctaacctttgtccaaaaagaattgatatccataattccatatgatatgagctgacacagtgacaacactgaatcactgcccactttgaacagcctatataaagcactgcaagaagcaatgcgagtagacatcgagtccaatcacaagtgcataagtaaaagatcaattacaattcgatcgattggcc

SEQ ID NO: 5628 - DNA, 29 bp, Oryza sativa
cccsggrrargscccccccccccccctcc

SEQ ID NO: 5629 - DNA, 289 bp, Oryza sativa
aaaatcgaagagcatatactggtgagattagatataactattttattttcttcagaagaagaacattttcttttgtaggaaaagcaaagggtgaaaagaaaaatcgaagagcatcccattcccatccagctatatatagattgggaatttgggatttgatacaaagtactaattttgagcccaacctaaaaccctcaccttatcctctcctccgattcctcctcctcctgcttctcttctttgcttcgccttcgctttgcttgtggtggccggagcaacagccccggcc

SEQ ID NO: 5630 - DNA, 2000 bp, Oryza sativa
aattaacaactcttaaaccaattttttattaaactttcatatgcattgtacttagggattactaatgtataccttaacttcactgctggagggcgtcgccaaccctttcctcccggccggcgcctcctctccggcctgctatcccctcccctcgctccctccggcgctcacggcgacgatgtggcgactctcgacggcggctggcgatgtggtcctcaaataaatcgaacaagcatcgcgagctggggagacggggctttaaaccggcctgtcgaacgcccattgttcgacagggtcggtggagggacctgtcgaacgcccccggttcgacaggcctggcggcgcggggtggtgggccctgtcgaactccctccgttcgacaggccagcgtgtcgaacgccagccgttcgacagggctctgtcgactgcccgtcgttcgataggtgccctatcgaattgcacccgttcgacagggacctactttcgcgattttccccggttggccactacttttgcgattttccataaaaataatattaatcctaaaaaaattcgcgaagcacaggcggccgtcaccgagcggccgtcgatgtggactggacgcgcggcggcacgaaataactggatcgcacggcacaaacgaatgccaagcgaatcatgcacagccgcagaaccgcgcactggatcgcaggagctagcgaatttttttcttcttcgaaacacaatttgacaaacctctaatttattaatccagtatacataagttcagtgggaagaggatgcgcggcgactccgatttgtcaaacatgtggcattaggtgcgtagacaggtgatacaatcaaaagcttttatcgcaaaaaagaaatctgaaaaaaaagaaatcaacgcatcaacgcatccctctcgcaaccatccacgactgacctaccaagttgcatcaaatttaaacactcatcaagattcacgcactaaccccacaaattttaatcactcacgatacggtcgcgtcaacttattatttccgctcctctcttgcggtgagttcacgccatccccctccattttccccaaagcaaacgagattagagaaaaaaaagagaggattaatcggtgacaagaggttttcaaaccaaaaaaatcggtgacaagaaaaacgaagaatctgctgctgcgccgcctggaataaaaggcgcacagggctttgggagtttgggaatttctgagccaaggaatctcctcctcttctctctccttcgtgcttctccagtctccacctccctgggcgctgttgccccttccaaatctgcgccaactgcgccaccgtatcccggttttttttcccccgcttcttgtcgctgcgcccaatcaggaggcgaggctgctggcctcgtttcctccgcgcgagggttggggctttccgcgccgcgaccaagaaacggttcccggagcaggagcttggaggcttccgcgtggtctggtgattgagctcgggacgacgggaggtgtagttctgcgcgtcattgccgggctcaaggttggatacttggatttggtgcggatgttcctgtttgctactggttttggggacttttgaggtgggtggtggcgtcagatttgatcgcctttggtgcgtttctctggatcatttgttttgaaattcgctcttgatgctttaagccgctacctttcctgacctttcactccaaaggtttgaccttttgagttcctgtgctgattgttcaacaggtgatcgatccaccagtcctggggagtaggcctaatccctctatgaacaatacgatcggaaaagcagtctcctgttcagatgctgcccattaaactagtcccagtgttgtacaaagattctgtcttttggcagaatacagtgatcccctctgcttcttgtccagggcagaatacagttgctccaactcgatgttggtattgtaggagtggataagtcgtaaggatctttaaactgcacgagtggagcaaagcc

SEQ ID NO: 5631 - DNA, 430 bp, Oryza sativa
  misc_feature (1)...(430): n = A,T,C or G
aaaaaaaaycmnaarrgttttctttwwwaagggtcwtankttttcccccasaatttnmacccsggawtaawccgggatctktttaaaacmktamcaraarnnytccctggwtttwaaarsgcckyargarttwwtyttttgarataggcmtakccggmcacgyagttcaagggtntttwaccatggcwgcwaanwccggcccgkytwtgtcngcttacyccaacwtgaacacctcstwctkgccgtacttraacscccccttknkarcaaaaccctakgaacgtcggsgcscaccccctgntnagaagtctygygtktcctgctccccscmycmcsaaamytkgsggsyttsggyttsctsgaaasggttycgccgccccgcggcggccatattctcggctacgcaamcggcgcatccggaaattccggg

SEQ ID NO: 5632 - DNA, 2000 bp, Oryza sativa
tacaatagttatatactacattattaatatctggtcccacctatcatacacacactgcgtcttggagtccgtgctacagctgactacaaatctatagcccgctgctcttctctctcctcatttatcttcttaaaatatgtttgcagctggcttatagcctgctattatacttgctctaatggcgtagtatatttttatagttaactattatatgaatgggctattagattggctatagatattttggagccagtaattgactatactattgaccttgctcttaggcgcagacaaaacatgcgcgaggcaaagctgcgtgtcagtataacagcgattttattctctgtaaacaacaacggtcactatatgttggttgctgctcctgtcaatattgtcaccgtggtttagtatgtcacagcacgtgtagcaggggtagaatattatgctacattgatatttaggatagtctacgatgagatgggatgggatgaacttaggggtgtttagttgacgggtgagtgtgggttggtcctaggagaggaatatttttctcagatccgggaccaatcgatccgggaaaaatagtcggacgaactcgtcccacctgggacgagtgcacggtgtcagctcgtccgcgactgccgccgctcatccacgcctcgccttacctccgcgtccgcctccgcatctgggaccggccgtcgctcgtccgcgtctcgcctcgcctccgcggccggtctcggagatccgcaaccgccgccgcctctgggaccagccgccaccgcgtctgcaaccgcctccgctgccgccgctcgtccgctgggaaccagacggccctaacggtccatctcatctcaactcaatttcttctatcaaacaaaaaaaactataaccatcccattttttttaaaaaactagaataggtctaactcattccattttgtccccaaaccaaacacacgctgggattccttttgaggaaaaagaaatcagcggcatgtcagctttgatggtattgtttacaacactgttgtggataatttaaaattttggcttgacgtgtcaggaggctcctggcatccaaatacatgcgtcgtctgaaatatcaaaattcagcccccagcagctcgtagtggagtgaacgagtgatgtggaacaggtagggcacgcgaagaagatgtttggttgatgccaatgcttgatacaactaattttaggtaagttattttcactttgagctggagattttttttacttttgtggtcttttgaactaacctcaacaaattttatctatctacgtctaaattgtcatacgacgaagaaataatcttacatataacgacgagagttcgttgacgagtaaaaaccgacgtaatcgagatcgttgatatatttgagaaaagagtcaggtgttctaaagtaaaaacaaaagaagtaagtttacctgatcgaaagtaaaaatattgattaaagggtggtttaaaataaaacatcgataataaaagataatctaaaataaaaagttttaattaaaaacccctaaacattgagataagaattgattttgagaggccgctggtgatattcttagtgagagaaccttttcgatttcgatctccatcgatcatttcggttcaggttttcgttctactgtgccgagttgccgacccctccccaggaggagaaaattgagtcccgaatttcttttcaatcacaaaccatttttttttccgtttccttggatacatgctcatgtcggggtgcgtgcagcgtccacatgatgtgtataaataatcacccgcacatatgcccactccctcccaccttccccaccctcattggctcccccgcctgcctccccttctccatccaccaactcgccgcacactcaaccccgcctcgccgccgcacaccacccaccggcgaagagaagaagtcgtggtttttcttggctgcaagatgataacgggggcggacttctaccacgtgatgacggcg

SEQ ID NO: 5633 - DNA, 2000 bp, Oryza sativa
ttcattcaaaaaaaatgcatcctcaacatactgaaacaatgtactaactactagcaacagatcaatatgcagcaattccctggatatatgaccaaagcataagaagggacatggactctgaatatttgcatcctcttgtgggctctaaccttaattctgaactatacaggtggtgcacatggatgagaagggatggaacaggaaattgccgcggaatagggttcaaaattaccggtgtagaagacccatttgacggggcgtttggtgagggtgtcctcgtagtaggtgatgaagtcggccttggcccagacgtggcagtcgaagccgtcggcggggtggcggccgaggtagacggagccagggacgagccagtttgggggcaggatgccgacgccgacggcggcgaagcggcaggcgcggcgggccggggtgtagaagaaggaggtgccgttgttccactcgttgtcgtagaagggctcgtcggcggcgagctggtagcggatgacgtggaggttgcggccccccggccagtcgtaccacaggtccgccagcgacaggttgccgtggaactccatcaggagcttcgcgtggaactgggccggccatggcgtcggcgtcggcgtcggctccgatccgtcgccggcgacgacgaggaacaaggccgccgcgaggaggagaggggccgccgtcttctccatcttgtgcaagtggctgcgctgctgcgtgggagtgagatggcgtagtacggtttcgagggcttgagtgaaattgtgtgattttccaagggtgattatgcaaaaattcgtccatttttagtacggtttgggcccattaacaaatggactttgctttgtccaattgctacaaattgagcctactttcttttcgtttttgctgctttaacaagtagaaataggcccaagtggcagagttacctacctttgctaattttggactccaagcacacaattagtactcatccgcattgtgctaattcaggttattgagaggggaagaaagtggttatacgagatcgatggaggacgcagcagctaacggtcgctatacgatggaaatgagattgtaccggacatattgtgcatatatacaaaaagtataggagtatgttccagacgatggcaacttgacctctttaattcaaagctagcctcaaacgtacttaactattcatgctttgacgtcaaggcaagggtcgagtagtaagtaacacaggctcaaaaggcaggctatcttaagctacctatacgttttgagtgtagtatacgagccgatcgatcgatcgatcgaccactgtaccgcactgcacgcgccaaattgaaaatcggattagtggctcaaatcaaaaactaaagttagtctgaactttgtctagtgtgcaaaatcttttgacatkamttaakswattggtwggtkktgtgcgttgtgtcttgtgtgatttccacacttggttgacgccgacgtcgttgtaaagtttgcacgcggcaactgggcgtggtctctgaacgaaccgtcaattcattcatggaatgaatttgatggaaacatatcccgactttgtgcagtctgtaattgtgctatgttagtgccacaaagtcgatatagcacaactacaaattgcacaaaatcgacatgggacgactgcagattgcacaaagttagaggagtttctttcgaatttgatatatggtccgtccaaaaaaaatcatgggattggcgcctgcctgaatccatggtgggtcgttggccaactcctccatttctcacggcgccggtcgccgccccggccctacttcccttcacgcctccactgacctcgccggccggccaccaccaccgcccgcgcgccacacctataaaacctcacctcctccacctccatggctcaccaccacgtacagcaaacaccaactcagctagctatactctactcatcttctctgccagctgctactacaccaaccagagctaatcaagtaaca

SEQ ID NO: 5634 - DNA, 2000 bp, Oryza sativa
ccacgtggccctccccccgaggggggttaggcctgaggcaaggcggcgccgccccctacatgcccgcccgacctcctccgcgcggtgccgcatgtgctgcgttaggtkggcgcccccagcgcccacctaaccgcatttaaggcggcttgagcgggcacgccacgctgcattaaatgcggcgcgtggtgcgcctgaccggtctgtgactgatctgcaaccggtcgaatgaccagtgtgaccgaggtagtgtgcttgcacactggttgcttgtcaggcggcgtgcaccccctgtcacatcgtgatgatgagaggctgctcaacccctcatcacagccggagacggtttgcctaacctggtcagggtagggtttccatttcccagcgcaagagaagacccaaaggtcttctcccattaaatgtcaaatgacgtgtgtgtccccccgtgtcagtcggatggatttgacaggccccacaccacaacaaggagtgccagagacttccaggacaagcaacaagacatgcatttaatgtgattatcctccctgaataggctcagtgggtccatgtggtaaccccttgaggtataaaaggagttccatgcctacttaggggaagatgagcccttttttactagacgaatttggtgcccctcatcatcaacatcttctactccaacaaggagatcttgtaatttctcacccgattagcatagcacaggagtagggtattacgcttctcagcggcctgaacctgtataatcccttttatctcatcgttctcgagaggcccgaccctctaaacttcgttttttttcgctaagttctcgaatctaactcgctgcccccgggccaaaccaatgagaggggcctcactgtcccccgcttgaggagttcaccctccgacagcgtggccactcaacaaaatcttaagtcaaaacttagctgacacattaaaaataaaaaagacaaatccaatgcctaaacaatattgttactattcacactgaatttatcttttttttctcaatatgcagatcgaatttgagcttgatttggtggagtgatagatgccattgcactctacattgtcattttttttacaattatttacattgaatttgagagggaaaaaactacgaggggagtgattagaatccatttckgctttcaattcaaatatagagtgaaacacacaacgatctctaaacttgtaggtgtgtcacctagattcatgaactctcaaaatgcattttagatctttgaacttattccggatgtcatataggttcaaatgggcctcagctgatttcgtacattaatatggtattccacggtggtacctacatgttagtgggacccacatgccagtcatatagaaaaaaaaagagagatgagaaaaaagaaataattttaaaaaaacaaaatgaaaaagagaggagacagaggataaaaagatgttttaaattctttctatatgggtctcacttactcatgggtgtcaccaatcaccatggcatgccacatcagttgagctgaaacccgtttgttccatatgacactaatgacaatttcggtaatccgacaataaatgttaaagatagcctatagcacactcgtacaattttagagaccgttcatgtactacactcttcgaatatatcaccaacaaaatatcatagcacatcactctttgttaaaaggaaataatttcatattactgacacttctaaaaccccaaccaccaaggcaccaacaacgcaaaactctccccgcgcgccacggcgcgtccgagaatagccacagccaccccgcgcgcaacgccgcaacgcccgcccgtcgcgcgcaccagcgccgtcgcgcgcggcgcgccaccccagcccccaacacacaaaagcaacgccaagcctcgcacgcgcgcgaggccgacgcaaggaggaaaggctgccccggggggagagagagatcacccgcttcgccgcccgcccgcgccgcggcggatcg

SEQ ID NO: 5635 - DNA, 1649 bp, Oryza sativa
gtctataaactttaggtgtaaaactttaaatgtatagaaatactatatatgaaaaatatttgaatttaaattcaaatttgaatcagatatataaatttttgacttataaactttagttctataaactttaggtatataaactttatatgtatagaaatactatatatataaaaaatatttgaattcaaattcaaatttgaatcggatatataaacttttgacttataaacttttggtctctaaactttagatgtgtaaacttgagatgtataaactttagatgcataaatttattaaaataggaaaataatgcggtgccaaaaaaggaaaccaggtggagggggctacctgatcgctactaggtaggtagggtgatcgatcgcccattagaactagcatatctccgggaaatgttttcggtatatataacagtataaggtcgccatttgtgtatagtttgttataatatggttcatcaactccattgtttagtactttctatggtccctgtcattatttggacttttggagccttggagggacatagcacctttgatatatagcaatgatcatgttactaatacaaagctgtagttttacgaggaaaccatgtatgatgttttttcttcttttgaaaaccatagctaaaaggataggaaaccaatagatttgggaaaaaatatctgaaattacttaaagaaaatagttgtgctcatgatgtatgatcttgtaaaattggtgtaattcggtacaacaacttgcataacattaactatatactcttcccgtttcaaattatttgtcattttaaatttgttctaagttaaacactttaatcattgactataaatttatataaagttgtgtagctaaacatcaaaaatttatatttttggattcaccataagaatatttttataatatagaattcatatattgttatttgttaactttcacggattcttaaaaattaatggttaaggataaacatgtttaacttagaacaaacctggaacagtaatttgaaacagagatagcaacaccttgggggatttgtgtgaaccagagctgaaattgtccattaggaaatttctttcaagtgagaatttgcattaaaagaactgaacagatcagttccacaataacaacgcattttgtcgatagcacatttgcaagtgtttatgaagcaaaacattttttgataatgcaccatgcgcgcgttgcaagtgctaattctatcgatagcattatgaagcaaaatctgagagcatctgaatttgccattatttgggcagttcttatggttacactgaatttgcttgtgtaaacttgctaagaaaaaagacgcgaatattagggaatgatctaatatcaaataattaaaaggggtgaggcttcgaatctaggttatttagcctaccaccttgtagagctagccggaaaacctctggacgtttctcaattgtgtaaacttgctgctagctgagtttgctggtccaaataaaggtagattatgttcttaattcgatcgaagtgagaggcatccgaaaaaggatgctcgaatcaaaattcaaaatatatatgaatttgttacatttgaattcccaaacatgacaagctgaaatggtggtttttgtgtctgacaggac

SEQ ID NO: 5636 - DNA, 1437 bp, Oryza sativa
atttttcataaaaaaatagtcgacatgtatttacattgtagttcctaaagtacatatgtaattttagtatatttacaatgtaagtctcaaaattacatatgtaagtactaaaattacatatgtaaattcgaaaattacatactaattacatatgtaggtggggtgtaaatgaggtgtaactactgtgtaagtggctgaaaaaaatcgactgtagcatatggcgccatatttctagcaactccgttgtgcaaatagaggaggccagcagtgccaatattttgagatttgctcaaatttgaataaattccatattttttttcaagcttttggggggctccttttctccaccctcatactactagctgacagtgcagtcgtagcgtatttgtgccacagcctactcaatttgttcatttgtatttacagggaacttcctcctgattcgatccttcaggccataagagatgaaacaatgtatgatccacgtgaaagaattgagatggcgcagggccattcactttaccggccatctcttcttggtcaacctaaaggagatgccaaagcttaggcagttcttccttttttttttggtgctagatatcctgtaagctctgtgtgctattatgcttgctgctgctgctgttgttgtaacactagtgagttccagcaagggaccaagatctcagttgattgcttcaagacttgttgagcttgttatgtagtttgatttgttaaacgcctgaaatgtgtacatagacgttgttttgtgtgatccaataataaaatatgcaaaaggtaatgttcaaaatatatttgtccacgatgcctgtacaatgcatcattaatgtccaccttattacgtacagtaccgatttatgcaaagaaatcttcagtacttaaattgatttatcctccgaacttccaacctactcgaacagacagaacacccatttcactatttcaggcatccatttcgacacttgtaacacatgttactttctcatccacgaaccgactcgtttgaaatccaatccacggaaactgggacatcgtgccactgaattctcaacagcgacatcgccaaggtcgagtagattgcggtcagagcagcgatatatagcgtcagtttcagaggcggttcattcgtggaagaagtccactagtagtactgtaccaccacctgccgttactgaacgtgcaaacaccatgtccatcgatctccccatcaaccgtatcaagggtttgacgtaaccacgtaaaaacgcatccccaggggggtcgtggggccctcggtagttgctgcacgctgcaaagcctccccctgtatatatagaccgccgccgcacaggaggaggaaggagaggagtcggaaaggagatacagttctcagatagtttctgctacctttgctgccgcgcgctgcagaagatcggcgag

SEQ ID NO: 5637 - DNA, 2000 bp, Oryza sativa
cttgatgccgagagacatgtggatccgccggggtggtgtcggggaggacccctgggcttcctggcacagtatggtttgggacctaacctgttgttggtctgggacccctctcgtcggcatatggtaaacctgtgtcggctttgaaaatgccttgtcatgaaagcttggaggtctcccgacgtggctgatccccacgggctgggtgatccgggttagtaatgtcgtgtgggtaaagtgtaccccctctgcagaggttaacaaactgttcgaacagccatgcccacggtcatgggcggatgtgaggtgattcctagcgtagttttgtttgactactgcttgtgaaattgctgttgtggaaaggggttcgatgtttgaaagatctgcagctgatgggatcagctaggcccgggtggccatttgaaagttgttggcccgggtggctgtttgaaaagctgttggccgggtgccaaccttgattcaattctaaagactgatacattgcacatactccgaccggacgagacgcactgtctcatccgtgtcgtttgagaagcactcacttagttgttttcagaaaggagttcaaataaaatcaattgcaaaaacaacagcctttccttgaagcatgcattaaacacttatttcccatggcttgctgagtacccccgtactcacccttgctctatataaataatctcccccagttgctaaagaagatgaagcggatcctgctgatgaggagttcttccaggagcaagctggctacgatgagttttagggtttcggcctagttcccaagccgcgcctgtgttgtttggtccaagtcctggcttccgtttcccttttgtaatgcagttgtgagctcgggatctgtccgcagcccaacatgactgtatctctactctataataaagagacctctgttgctgtgatattctgtctccctgtgataccagcactgtttcctgggactggtatcgattaataggttaatttggagcgtcacgggctagttccggtcaggactagttcggggcgtgacaactgacaagcgggacatggaattttggaataaggaattgatttatggaacaaaggaaaaaggatgtattaaatcctttttggaaaggaaaatcaaggagggatgtatattagacttgtttcgggtggcattggtgcggcccaaagggttgaaggaggctcggccgagccattgggccggcgcgggcacaaggaggcagcccaagaggcgcgcggagagagagagagagagagggaggaggagtggggcggctgactgggcgccggcttgaccaggtcaagtggggccgacggctgaggtggctgccacgcaagcgcgagagagggaggccgagctcgcccggatcggacggctcacggcggccgagaggcgccgacgaacggcggtgaaccggagtgggcggcaggcaccggcggcaggaggaggagaaggggaactcattccacggctcggatcgggaagacgtcgcgcgacgacggccggcggcggcggccaatctcgccggcacgccgacgtggccgcgcgcgagaagagcgaagggcgcgcgggctcgggcttagccgaaccggtatggtgttgcgacgcgcacgcagtgacgcgggacccgatggtcaccgcattcaaactcgcggcggcgctatgcggcggctgaaggggcgacatggcgcgggagtgggtggggaggccggcgactggggcggcagcctgggaaggttcaaggggacacggggagggtcgcggcgcaaggaatcggcgagagaaaggccgacagcggcggattgcggcggcgcgcgctggcggtgagaaaaaagagggaaacggcggaggggcgacaaggattcaattcaaggtggtgggagtatctctgggagtcggggatcccgtttccggctccggatagggtggaggagcaccgaggagggccagcgtcgacggcggtctccgggagcgggcgaca

SEQ ID NO: 5638 - DNA, 2000 bp, Oryza sativa
cagctcgcgatccaccgactccctccgatccatcgattttcagtatcaaactaaacaacgataaatcactcgacaaacaattaataaaccctttttatcaaaccctactaatatatatagtcctacaaatcatttgttttttaagggattgaattaataggataaagctggagacaagtgcttaattttgctactggagagcatgcaggttaattaagtattactagcaacaagtgtattgtgaggaccatacgtgttagctgggtctgacctgacgatcgagatagctttattgagttgcgttgattattattattattattatttattctcaattgcgcgtccgtcaaaagctagctagtgtccgcgggtggtgttagctcatactccactagctagtccactgcactcaccacatcgatcgatcactcgctgatagctaagctaaatgcaaatccgccgaatccatgacatgcatgcatccagtgtaccactgccaaactgatactgatatgatggacattgagatcggcttaacttataaggtagtgagaatagcatgtgaaaatgcttaaacattactccctccatactaaaatataaagaaacaaacgattttaatttgatcattgatagtaaaaaataaaaaaaaagatcaatcattttatattgatgttactggatttatcattaaacaaatcatcataatatacatatctttttatttaaaacgtcttaattatatatatcgttggtcaaagtagtgcctcgaaaattgtgtcgagataaaaaaagttcttatattttgaaacagagtattattaagggcatgcattgcgtgtcacatgcacccttgtaactcctcaatctaatataatcaaagagaggggtggataaattaaatgtggtgaacaatgtagtatatttttcgatgctaaaataagtcggccaaagtctcacaaatttggagtaattaagctactccggccggtagtttcaaaggaggatagccagtccagtccagatgggcgtgcgcctaaccgggccggtaactaactggttaatgggcagctaccataccaccatccatctcttctagtattatttgtagtgcatgtttcttctgctatcctcctcctcctaggcctttaaatgaaaactgctctgctcgatcgacgatccatggatgcagagtagctgggggcaaagaaaaaaaaacatttaattcttgcaatcctagctagtaatatatattcgagtcgaattgtttgtttgtttgtttgttgctaggtttgtctgggggtttggttagttataaaaagagagctagcaattctccacatttctctcccggttcctccgctgcaaccgttctcttgcttcaattctcgattcgccatgcatgcaagagtctgctgaacgccgattgattaattgtcttgtagtatctaggaaagtaatccgctgctgtatcctcctcctatctggattctggagtgatccctgcccgctggctccatcccgccgctgccgacacacataattaaacagctactagttgatcgatattatttcttctcttctcttggggtcatccctctcaaatcaagctctactactctacatactctctatcgggtgccggcactgcagtcccccaggtactaactatctctgttacttgttgttcgtcttttccttttgagatggatcacagggcaacaaaatatagatagatagatagatagatatatggtacactagtaccaaataccaatatcaatagatcgctattacgttgccaggaataacgcagggtacttaattgttggctgtttgtttgttggttggttttagtattccttatcttaagggactcgttcctttgagacctatgcatctgcatctcttcctcctgtgaatctatggttgattaatctcatatatatataggtgagtgagtgagtgagtggagtgcggtggcagagagctagctaggc

SEQ ID NO: 5639 - DNA, 2000 bp, Oryza sativa
acggaagagcaccacgccaaagtcatccgcatgttgtagaaaatagtcatttccgttgaccccaccactcttttggagttgaaaatgacaacgcgtgtgaagctcagcaacgaggaataatccaaaactaccaagcaagcacgtaggcctcgttcggaagtgcttcggacaaagatgaagtactgctacctcagttttaggttataaaacattctaacattacctatttttataaagatactacatccgtcccataaaagttacatttctagctaatttaggataaaatagtatgattgaaaaatgaccacaataactttatttaatgaacccactgtatgcacacattccatatatacaaatgattaaaaggaagtttgagagaataaacccatataattagcatacttaacaaaattacaagcattaacagcccaaattacgtgggatggaaggaaacttatatagatgaattaattggttaggcccaacatactagaaatacaatttttgtgggacaaagccttggagctagaaatacaatttttatgggacggatggagtattaataaatctaggcacacatatatatctagatttattaacatatatatgaatgtggacaatattagaaagtcttataatataaaacggaggaagtaacacattaatgaaaaaattattagccctatagttaattaaggttaattattttaaactttaaaaagtagatttatttgatattttaaaacaacttttgtataaaatatttctatatttagctgtttaaaaaaatgctagagaaaaccgatatagggatctgttgtatttcctccgtcggtaaaatatctataaaaatgctactttgactaacaaatattaataaaaataaaatattttaaataaaaagagctgtgtattatgataatttgtttcgggagaatagccaatatggtccctaaagtttcgcttctgggtcattttagtccttaatctttcttattgtctaaataagtcctttaattttgtcacgtgggctgatatagtccttggtcccaccaaaatcgccacatggacatgccatgtcatattcctatgcaaaatctatatgatttgtccaatttacccttatatatatcatagcaaaataaaaaaataaaaggttaaatgtaagagcaaaagtatacctcaaacggtgaaaaaaaggatgagtatttttttcctatggttatgtctaattcacccttatatttatttttctatgatatacgtaagggtaaattggacaattcatcatagattttgcatgaatgatgacatggcatatccatatgatgattttggtggacccaatgactattctaggacttgtgataaagtttaaggatttctttggaccatttaaaaggttagggactaaactgatcctacggagaaactttagggactaaagcaactattctcccatttgtttcataataaatatagtaccatcaattttacgtgattgattttttttattttttattttattaatagctaaaattaaaaatgcttgacttaacccttaatataactgtacaaccggacaatcgaacaaccgtgacgtgtcatcctatcacgagtacgacgagtcacggtccagcacgagtgcacacacacactgcaccagtcaccgttctcagtagaggtgtactagtagaccgtatcacacggcagaaaacaccgcgccgccaccaccacctgcgcctcccctcccccggaagccgccgaaaagccgcgcggcccaccaccaccaccgtcgccgcgtccggcgcggactttaaaccaaaccaaaccccactamtccccggagcaccaacgaamcgcgaaaaaccccctcgaaacccaaggcggcggccttgttgtggactggayttttttcacctcaattcggcttgktcccggccccaaaggccaaggttcccctycctyccaccaacccaccaccagsgtyaccc

SEQ ID NO: 5640 - DNA, 302 bp, Oryza sativa
gacgaaacattgagatatatgtattagagagattagtttgaataagccaggattaattagatgtcctcgttaaggatgaggaaaaatgtaataatttgtactacgcggtaacctatgagaaggataaacttaatcataacccaaatgacctgaagatatttaatgtaaaattttatctctaatgatatcttaaccgttttataagccctatataagctgaagcgaagccacacgtaccgtatcgacacaactcctttcccatcgatctgatctcccgtgtcccttctctcgtttccctggca

SEQ ID NO: 5641 - DNA, 2000 bp, Oryza sativa
gtgagaggtgacactaaaaagagccatatgatcagctacccacagctataatgaccaccatatagattaaactatattatatatctacttttgcttcttccatgagagaactatagcatttggatgtaattatttttagggtgtgggttcaatcttaattttgattgttatctatatacattgtgaaaatgcgaacaataaaagatcacttatgttggtcttatctatatggattacttggtccatttatatggttaatgccctaatatctcaatcaatcacaaccatttttatttagtttcttcacatactttatcttctcaacacctttatttaattatttttacctattttttaatatccgtgtctatctaaagaagtttactttctcttctcaacacattttttaattatttctatctatttttaatgccaatgtttattaaaaaaacaatctttttctcataatatagaaacctatgaccagttatactgtaaaataattaattcaactctatattattatattatactaagtatgtacaataaacaatgggtatgtttgacacagctccaactctaggagagagctccagctccacctctcttagagctggagtccagtcaaacaatttcagctccaaataaaatgggagcagagctaggtaaatgctctcacaaaatgaactagagaggtggagcttggtttaggcaactccacaactccactacaaattcaactcctggagctaaatttaggaattgaagctataccaaatagaccctataagttagctataagcacatgtggaggggataagaaaggagaaaggagagagaagagaaataagctatagatttgtagccagctgtagcacggactctaaaacattacatgtgtatgacatgtgggaacaattattaatgatgtagtatatatttgtagttaattattgtatgaatttgctattagattaaatataaatgatttagagttagtagttggctatacttgctattaaccaaatggatcggagatacttcctccgtcccattatagtgcagctatgattttccatacttaattttgatcgtccgtcttatttaaaaacttttttttaaaaaaatgaaaacataagtaacgtataaaatatattcatattttatcatctcatagtaataaaaatactaattataaaaaaatttgaaataagacgaataattaaaattagatattaatctcatagttgcaaccaattgtgaaaggagaggaagtcctccgtgctactccgagtatcctccagcacgtcgccacgtgcggtgcggggcccacgtctcgatcgccctcgcgctttccaacgcggccgggggttcttctctggccgttgcgccctgcgcgtcgcgttcgccgtggtgacgaaacggaaaggagagccttttcttccctcagttcctctcctccaccacttcgcgttacacccaccaccaccaccaccaccaccaccaccgccccamtctccctctccccttcccttcccccagcagtagccctccagtccaccaccccaaccgccaaacccctctccaccccccagatccccctccgcctcgtcggccatgcgccccgcctccgcctccgccgccgacgagcgccccctcgtcgagctcacctccgccgccgcgaccgcacccgcgtccaccgagacctccacgttctcctccgcaccgggattcacccgcgcggtgcgctgcagcggcgcgggatcctcctcctcgtcctcatcctcctccgacgagggcggcggtggggtgtaccggggaacgcgatctcgacgaccaagtacacggcggcgagcttcgtgcccaagtcgctgttcgagcagttccgccgcgccgccaactgcttcttcctcgtcgtcgcctgcgtctcgttcagcccgctcgcgccgtaccgggccgtctccgtcctcctcccgctcgtcgtcgtcgtcggggccgcc

SEQ ID NO: 5642 - DNA, 2000 bp, Oryza sativa
acgggtggtggtgggtggtggtgggaggtggtaktgcgggcsggcggggccagccacagaagcccacgacgcgggcgggcgcgcgcaggcgcagccaccacccaacgcggcgtcgtactcgtactgtgctcgcgcgatgtcaactcaaccctcgtcctctgactcctctcccctccccgcgcagcgcaacgcaaggtcgtccctacctttttccgccgagacagccactcgtgccgcccccgcaaaaaccccacaaaggcgagccctgcgaccgcatcccgcgcgcgttagtgcgacgcccacattgaactctactcgtctcgtcgcagcgcagcgcaacggcgactcacgcatgattttcttgggcttacgagatggggaagtgtatgatgggggtgttgacgcgtcggcgtgcgcaacctggggggaaagaaaaatttgggggcgagttcccggcgccacgtggcccgggcacgagtattatcaaatgatttgcctccaataattggcctgtcaaatgatttgcgccactggcactctgtacccaacttcttctttaccttcccccccagtcccggctgctgataccaagttattttcagtttctattttgccaggtcaagcttcctatccatccaggagaaaaaggcaggataatgtcgcgttatcatgctcaaggcggtaacgtttttttacgaaatttgacaaacctcgcgatgcgaaatttgacaaaaatgtttcaaccgaaagtcgtgtcaaagaaaagataagagggatgagcgaactgtgtcaagcagaagaaaagttgtgggaggacaaaatctgtcctgcgaccgaaggaagaggcccaagtttgttgcgcctacacagccacatgaacccctttttatcaccctctgaatctctgatccaaccattcagatttttgccgcccataccctcgattcctcgtgatctcgggatcgtccgcgtggatattcctctgctagtactcccgtacttacggccaaccatctgtccgttctcgccctaaaatctgtgcaactgatgagtgaccaccaagtacatttttttcgtttaatcattttttcatcttgtttcggcgacacttgttgcagtgcccgttccatatggaagcttgaggtcacatgatttgcctcaggccacacgtcactcgaaaggaagaaatgccacaatggtctccccaattaattcctctgaacaacttcctcgtagtttaatggcactgctataatgtgtgtacgtatgtatggttcattatcgtgcaacgcgctctctctggtctcttctcctctcttcgtcttcgtctttgcccatgaaaattccctgccttgtccctccaggcaacattgccaggtcaaaattatatacaggagagaagagggccaattcggggagaaaaataatttaggttttgtttgctaggaccaatcatggggcgacagctgggcggcactggccatggaggccattaacaacacggagacctccccgtgcttagcgaattaattagtgtggtaatcagctgctaactacgactgctaaatgctaaccccggggtcgcgacgccatgggcttcacctcctccccctatataaacccaccaatgcctgccttttctcctcccccctccgcctcgcactctctctcgctatagcctatagcgtctctcccgaaggctcgagacaccacacctctcttctctttggctcctctcctcgctgcattgcgatcccaagagctgtgagctttaggaggtacgctcgtgttcttggctgtggattaattcatggcaaatgtggctcggtttaagagcttttgatgaacgtcgtgtgaggaatgagaggggaaatgatgccgtttataatacattaaaaatgatgataaaattgatatgaaactgcacggagaagtaatcgaaggacctgctgattttttcttgattctttctgcagcttgttcatcacgacctgaaaatc

SEQ ID NO: 5643 - DNA, 2000 bp, Oryza sativa
cttggtcggccggtcggccttgaggccgagccgagcccggccgacgccaccctcgcctcccctttgagccaccgcctggtggggcccacctgccaggcgccacctccttcccttttgagccgctgacctgtggggcccacgtgccggcgcccccttcctctccyctttgagaagctgacccatgggccccgcctgtcggcagccgccccccccccttggatgacgtcagccctgggtattattgcgcaataattaattaaggacttttcctttattagtaaaaacacagtttatcttctaaaattcataagtaattcatccgagctccgttttaagtccattcaagtctcagtaaatcaggaaaaatgcaaataatccattaaaaatggttttgtttcctgtttcagtagtcttataccatgttttgcttgtgtgctttgtttgtcgcgtaggtttcggccgtttcgtcgatccgcggtttctcgaaggcgttgctgacgtctcgtcaatgtgagagcaaggcaagtcatgctttacatttgatcatattgtacccaatttacaaacaccctgcatttctattaaatgttgcattcttttacaatgtcatgtgggatgggtcctattacttagccatttattgtttaccatatgccattgataacctgggtatcaaaatgattagatgttggtttaggaaatgcttagccatgcttagctcaactagtacacaaaaagggatcacattattacatagactttgtctattagcatagttttggattggtgccaccgcaatggtgttagttaattaaaatacactgaatggtgggctgtgggtgcatggttttgctggtcgcacccatggcagttaaggaccggttcacgggaaaccctgggagacttaccgtgcttaccgcaagcgggagtgggtaactgcttgatctgaagtatagctcgaccctttcctaggcaccggtagcgagggtgggcgtgatggagttgggtcggccgaggtgttcggttgtccagctgccggattcaccgcggcgcaagaggggaccgcccactgccttttgaggggtgggggtgaaaccttagcgtggtgtggatggttaggggagggttacgtggagggtcttgtcacgatttccccctttgcagtatcatggtgatacttcggggcatggcgacatgtgtggaatcgtgtcttgtgggtacagttgtacacctctggctagagtaaaactattcgaatagccgtgcccgcggttatgggcgatcaaccagattcaccgtgattagtctcacccctagtttagcttaatgaactggtgtagttcaggtggttggttgggcctgttgcaacgtggtgtagcgttggatagtgattggttaatattgattaattactacagctgttttactgctttcaactactgttttgaaatgcctgctttatgcaaaagaacccctagcttcctttggttatatyctgcatcatacmtcctcttccggtatgacttgatgagtacagtgggtagtactcagtcttgctctcttttcccccacaccagagttgaagttcttctcagttggagccgtctcagagaggttggtttcgtcgctgcagtcaaggtttgcctgtggagtggagtcgcccgctgctgaagtcaagcttcccggtttagctcgcttttatctttcccgctgcatttgtaatcttttatatttttgtaaagacgtgggtctgtatgtcaacaattatcgtttgtgtaccctggctggtcctggacaggggtttaatgcacattcagcttagaaattctggttcgagaatttctgggtgtracagattatacatctcatatccatgcaatgaatcacaaaattatacatctcaatcaatcacaaattatcagaaaaaaaaaagaaaagaggccggccggcagacgagagggcacgaccgctgccgcgcgtgacacctttggccgcccgcc

SEQ ID NO: 5644 - DNA, 2000 bp, Oryza sativa
taaatcgtatgcgtatgatttcactcgtcgtaaatttaaattctactagtgtttaacaaaaatcacataacatgcgggtgtgttttcaacggaattacggtgagaatagagagtcacagctactctatgtctgtttgttctgtttgtttgcatgtgttttagcgcatattcgtcggtatgtgagcgtggtgttgagtgtacagcagagtgtaagcgtgaattgaaaagaaaaagaccaatactagcactagaataatgaaattgtgaaaatgatcgaaaagaaaataaaggaaagggagatcacttgcttatcacctgcggtccaatgggcgacggaaacatggagcccgtgatgtaaaatactcgagagaaaaaagaagaattagcaggaaaacacgagcagcggcagcgagcgatggaacggagcaagtgggggagagaaaaacagggaacgggggtgcagcttggtctctcgggtcatcaccgtccacatcatcacgcgccacgaaatatctcccccttttggtaaactcgaaattaggaggaaactgtttgggttctgtagcagttagtgacctattagagcagatacaatagtagaccataaaccagctataaacatattttaaaaaggtaaagagagagaagtagtatcacggggtccaatacgtaatgtgtgtatgataggtgggaccggatattaatagtatagtaagcaactattatatgaattggctataaataatttagagctaatagttggctatactattaaacttgttcttgcttttagtactagtgctctgttttaacaccactgctgccaatagttttactgataccgattcttcatgtctcagtagccatcaataccagcggcttgacaaaatttaactctacaaagataaaacgcaccttcaataatgcggtagagtggagttttccatcatggttgtacacacgaatcctggtgcagtaactctgtgtttaagcgcgcaatactacaactaattaagaagtcttttgagctactccaccggacaattatcgtggactaattttttgatgcctccatttattataaaagtactatttctattgtagtactgcttagggctaaacacactttaaccgtttatcgctttatcaaattttaaaagttctataagttttttctcttaaaactataataaaatttggcaaaaggcatgaaagtaaacaaaaccaacactaaaatgtgcttaaattttcgtatggttgattcggtgaacaagtccttgttaacttgatctcagcatactagtatcacttatctcctcctgtggcatacatgttagggtgacacaccactgcttgcccgtgtgttacgcaacagagaagagagacaagatagtagtaaaagaaaaagaaaatatcctatatactccagcaaggggagcagcgtgtgtgcacgtagcacgcacagcagtaggttscgcgaagcaatgggggcatcgtccaagccaaaaaaaaaggaaaaaaaaggaaaaaaggaaaagctgtccgtaggtgagggtgtgaggcgagagacggtgctgcatccaccaccccgctgcgcccgctgccgctgcagcctggtcagccagccagacagcccgcacccacgcggacagggcccaccacgaaccaaaccggcccggttcggttcacagccacacgccgcggcccggtttatttctcttgatttatttaattggtttaacttctttttaatactaatgttttagcgtgtggttttttggtgtactccctacaaagagaccaccaccaatccggctaccccatcccccctcctctttctctcctcttctcctctccacaaaaacatttctactgcttgctcgtctagtattccccacctccctttccttgccttcctcgctgcctcctcctcttcctcctccgtctccgctagggtttccgcgccgccgccgccccgatccgagatgccgccggccgcc

SEQ ID NO: 5645 - DNA, 2000 bp, Oryza sativa
aaagtttatagatctaaagtttataagtcaaaagtttatatacccgtttcaaatttgaatttaaattcaaatattttctatatatagtatttctatacatctaaagtttatacacctaaagtttatagatccaaagtttataagttaaaagtttacatacccgattcaaatttgaatttgaattatatgcgattcaaatttgaatttgaattatatccgattcaaatttgaatttgaattcaaatattttatatatatatatatagtatttctatacatctaaagtttatacacctaaagtttatagacccaaagtttataagtcaaaagtttacatacccgattcaaatttgaatttaaattcaaattttttttatatatagtatttctacacataaatttttctaacttttgatttttaaaaaaatttgtgtggtgtactgttgtagaaagagaagaaggggaggaggaagggggtgaagagggatgagtatagggagaggcgggacaaaccgatcgcggggcgatcgcccattagcctcccccctaaaagaggaacatatcgaattataagagccacaagccacattgagagttatatagataggaggccggaagtcaatcactaaccaccgacccagtcgtcggattagtaattggcagattatagtgtgtgtgtgtgtgtgttgggggtttaaattagttaatttgttcccatattgtaatcaatgtgatacatctcggagctaaacatataaactcgatgagggttattacccaccttggatgaatttagtcagcacgaactggttattactcatccttatggtccgaactagtataaaatccttgtccccttttttttactgcaatctcgcatacactttagtaccaaagatccccatactccacaaataccattatcgagtatagctcttcgacaactcccccattataatcagtgtgataaatctcagagttataatataaactggattagggctattaccatcttagggggggctgaacgcctgaaccatccttttagggtctgaactaatataaaatccctgtcccctgtttttttactgcaatctcgcgtacacgttagtaccaaagatccccatactccacaaataccattttcaggtatagccattcgacaactcccccattataatcagtgtgataaatcttagagctataatataaactagattagagcccattataatcagtgtgataaatcttagagctataatataaactggattagggctattacccatctttgggggctgaacgcctgaaccagtataaatattcatgttgtctctttttgactgggacggcaaatccttgagattgacgaagtcaccacatgcgcctcgctgtcgacgggtacgtcgcctggaaaattcgctcccatgtggagtcgaatctaggacctcaggtgctattaagactcttgtaaccactaggctacatactcatctactttaccacaatcttgtgtataccttagtatcagtctccccaccataccatacaaatatcattgttgggtataacaagtcgacaccatggtgcagattgttataacaagcctcatctttcgaatgtacacatagagatagtatacgtgtatgtttataggagtaaattaatatacgcgcgttgtgagcttcttcatttttacgcttcttaaagaaaagatagcaccagtataaaatagcctccatttcagatccgtactgaaaagcacaagacgcgataaaaaaaagttttactacaactagttgcgtctacatgtacggaccagtcgcctagtagttagcagtagcaggttagatttgaagcgttccaaggtgattacgccaccttctcgccttcctcgtgtatatatagcacgagtgcgcaggaggcacagttcatcatcctctaaccccatccagctcgagaagaacaagacgaacacgctctcttccaaagctgaaagc

SEQ ID NO: 5646 - DNA, 2000 bp, Oryza sativa
agttaagttttagttattttaatattgcaatataaatttatttgatattttaaaataatttttatataaaagattttttttataaaacacacctttttacagtttaaaaaaattgctaacaaaaccggaacagaatattaccccctccgtatcctatgtatccaggttcattgctagaattgaattctttgtaggacagcagtaatcagatttattgttagaattatttttttttaggacagagtattaatcatcaatagaagtgaactgagcctgataacttcccagtgcaatcgaaaatcaatttctgggtttttttcttgacaacgttccacttattgccctatactgcataataattttgcaacaaaatgtcaaataacttaaaaaatactccacgttaaacacctttttattttgcaacaaaataatatcccacgtatggtcaattaacctcgtaaatcgaaaatctagggtttaagtctaatgaaagataacaatcggcctgtcgaaaagtctgatgggccaagcgtaacaaacggccctttaaaaatttaattgatgctttggttggggtgcaccaggcccgggcagcagtgcaacgactgggcgacgcgcgagggccccagtggctagccactgtggtgggccctccctcacaaaaaataaatttaacatcgaagtgggcacatggcccacatatcagatattaaactgataagaacagatactacacttgatcttagccaaaaggccgagaaaggtatgagttgctctcctgctctgggcctcctcttatacacgctcctccgccccgcctcgctcagaatccgcgaggtggtactaacattgagaacgaaaccgtatcagctcctccctctctcctgctgcgttgtttggttgggcccgcgtctcttggtgggccgcgcagaaatgggcttttcatagcccaaatcactctggattttacttatctttattttattttataagtagtttcatgtttgcatttttaagcgtggcgtgatccgtgttctgttcttcttgcggagcaagcctgcattccaatttttgcctgggccatccaaaattcagcaatttatttatctgtttctacttttgcacctgctgaaaattaaaactatttttaacaagctaattattgaccaatgacgtggctgaacagttacaggccttcttcctccccgaagagacaccaaccacgcgatgataataatatattttatatattttattttagtcatggtcgtatctaatttgtcttcctgtttgcaatttgcaatgaggtgtcaactacctcattctagaagcaatttgaacccaaaccttttggaatcaatttgaccaaattttactatctttattgaccaaagtgtaaaacggagaatttttgagggggctaagtgcgaaaagtgcaggaaaaaaatgggcgattttttttttatttataggccaggaacaatcgctcgctcggtcgccttccccttcttcctcctctccgggagcgctttgaacaatcgctctctctctctctccctccccgattcgattcaattcgcgacgcctccgtgaaattctccaaagcgtaagtgcatttcatctctcccggttgcgatcctgttcgccgtaggctgtaggattcctgggcgggtggttgtgtagatggatttttttatgtggaatttcggtgggttttttttctattggattttggttttctacgcgggggattacgaattgtggatccgttgtagtttcgagagatttaatttgctttttttaattattatttttttcggtttgggaggaattgtttggaatcgatgtggcgatctgttcctccgcgcgtgcgcttggtggtgtttaattatttttttgcgggattttggttgattttgggatgtattatgttctgacgaaatcgtttacttcgttgtttgtttgcgcagcagcttgccctgtagccgcgtgctccggcc

SEQ ID NO: 5647 - DNA, 2000 bp, Oryza sativa
attagttgaaaagttcagtttagaaaaataaatactagttttgttgttaaaataagtggttgtcctaggtttgccggattgcttgattgcaacaagcagcaactgtgctattctccagatcccagtgacatggcatttcatttcgccaatgctctatgcttcacatatggctctcaagtaccaccatcatgtcagcatgtcacgaagtcccattgccagtggccgcaccaatggttagcagttgctctgcctctacacaccaaatgcaccatcattagtcgtctcctctcacgactacctcatccgctagtatgcccatgattatgtgctcacgaatcagttagtcgcaaattaaagctagctcacatacttgttgcatcctcacccgtgattgaggatgcgtggcacacacaaaaggagaagatgcaacaaccaattaaggtgatgttggcctgcaatgctgacgggaaactatttttcgttttaatagtctattatagtgttggttcaaatagatctactaatgcccagtacaaagaaaaatatgtaacataggatatagattaagatatgcccatatctccaaacaaatatttaacacactttgttcaatttcacaggcatccaaattatttaactaataaatattatargtacaaactatattatatttgggtaaatggcctaaggttatagtattaggttgtacttcatcaatatctcaacaccttaaatccaataaccatactcctccatcccttttagtggcagttcggcaasttttccgsgccaactttgataattcgtcttatttaaaattttttataattagtatttttattattatgagatgataaagtatgaatagtactttatacataacttatgcttttaatttttttttaaatttttttcaaataagatagatggtcaaagttgtgtaaaaaaatcatggctgcacttaaatggaacggatggagtaccttttaaccatttttaattcaatggatagtaatgctgatgtattcacattagtttcactagaaaattattattttttcaacgtaccaggtacattcaacacatgtttttgatctcacatacaaaggctaacatccaacggagcaattttacaaggaaacaatctgcttccgcccaatacttttataaaaaaacccctagcaaagctttccttttcttctcctgtaaccaccttaaatatggatccctcccacgacgatagcgataaggaagttacttaattacagcgacaacaccaccccatttaatgtgtttctttttggagtctaacagatgacgaggttggaaacctaaccgcgatggcaaaagcaggataaatgcgcgctgttcaatactacatttgtctcaaaataagtgcagccgtaaaaatccgtgtccaatattttactgtccgtcttatttaaaaaatttatgaaaaaatttaaaaaaaatagtcatacataaagtactttttatgttttatcatctaataacaataaaaatagtaatcataatttttttttaaataagacgaacgatcaaacgttggggataaataatacaaaactgtatttattttgggacgaaggtagtagcgttttacaggagtctgatttggtcgatcgcatggcaattggcaaccgatcgctcatcgcctattgctaaccaaaaaaaaataaaaaaataaaaaggaatttctaccacagcagtttttgtgctgggcttgggccaaccgagccgagcaactgagcagctagccatggcccatgggccggccatggcgggccgcggcgcgagcggcatgctcgccacctcgcctcgctcccccacgtgtcaccgcttcctcccaccttttccattttttttctctctctctctctctctctcttctccctccccaagcaaagcatcggcatctctcctccctaaaaccccacctcccgtctccccggggcggcggagccgatgagatcccggcc

SEQ ID NO: 5648 - DNA, 2000 bp, Oryza sativa
aagcccaaacaaaggattttcggcccagcacagcctagctccacataggagaaagtacacccaaggtccctcaacttgtcatctaattacaaaatcgtcccccaaccgcaaaaccgcacacaaggcatccatcaacttacaaaaccattgtagactagatcactcggcggttttaaccctggttttgtccgaagtggtggctgagtcagcgtgagacccatgtgggacccacatgtcattgaaacattagtctattttcccacacttctttctatcccctcccttccaagcagatcggcaacggcgtggggagcggccgtccggccggcggagcgggcaggcgacggcgcggggagcggccgggcggcgggtgctcgtcctcctggtcatcgaggccagtggccggcatgctggtcggcaacgggcgcaagcaccaggctctgacgacgaggttctccaagacgggcgcttgtccccccggtctgcggcgaaacggcattcggcatggcggacgaaggcggcgcaacatccgggtgggggagaagcgagcggaggagggtggcggcgatgaagcggtggagggcggcggcgtccctccccctggtggcgatggagacccagcggcccttccacaggcggcgcaatgcacggtcatcggcaccaccatatgccggccgttcttgtgctgccgccaccgccaagccgacacgacgccggcggcgagcgcggggaggcgttgaccgagctggaggaggacgacaagatggcgcgcggcgctggaggactcctcatgcgccgtttgccgcttcctccactccgccgccctgctcctcgtcgccgtccgctccatccctaaggagctctcccctcgcctcctctggacccccgccttcgagttcatcgccaacgaccgtggccaccccacctcctccattccacgcggtggagctcgccgacgactgatttggacttgggaggagctcgccggcctccccgcgcctcctctgggccctcgccttcgaactcatcgccgacgaccgcggccaccccgcctcctctctttccacgcggtggagctcgccggcgatgaacgatttggacttgggaggagctcaccggcctctccgcgcctccgccgtgcctccactctcgctcgttcgctggcctccgccgtgcctctgccgatgctcaaggggagaaatgggagagagagagagagaggagtaacggaggggagggagaagagaaagggtgttgacgtggcatcctgacatgtggggtccacatgggtcgcacattgactcagtaaacacatcggacaaaaccgtggtcaaaaccaccgagggattttgcaatggttttgtaagttggggatgcgttgtatccagttttgcagttgggggacgattttgtaattcgataacaagttgagggaccttgggtgtactttttccctccacatacgatattcgtgttgcggcccatgaggccatagaccatcagttaccccagcccgacccatcgtgctgcaagcctttgcaaccatcgacagttgagcaggccccccaaacgcgatgggcgtgggccgcgtggcgataatgtgtgcgccccgctcccctcatatccgtgtccgtgcacgagtgaacaacccaacccaaccgatgcgcgacgcagtgacgcaggcacagcgagttgaccggccgcgccacgtacggttggttcctcctcccaacacgcggcgggacccgtctccacgagccgccgttccctagaacgcggcggcaacgagcatcctcctccgcgtgggccacacgctgcgtttacaagcgttcacaccttcggcctggccttttttatactcccccccttccccaaggtgatcacgtctcgtctctgtctctcggcccaccgcttccatcgttcgtcctcgtctccacgctaccgtttcgcaaccacccgcttcctcctccggagaccgctcggccgccgctcgctccagc

SEQ ID NO: 5649 - DNA, 2000 bp, Oryza sativa
aaagacattctagggtgtttagcagagacttaaggtttgaggagaaaagactatactaccccttatataatgatgtgtggttggggatagtatggggagaaatttgaatgagaggtgattgatgggacaagtagtaccctagagtgacaatctttgtgcgacgaattttgaatcctagagtgaaattccttttgggaccgagggagtagcttacagtttccatcatatgaaacgtgtgtgtgagagagagtatgggtctttataaattcttacatttccaacatacacagatcgagcatccacctgctcctttgcctcagctgtagacgcgctaggatctcctcctacaaaacaaaagagtaatagcattagagaagttgcaatggaaacttaccaactagtacctatcagaaaactgaaaatgtgggaaatagaacatcgggtcaaggcacattcagatttagatgtttaaagcgttttatgggtaaattgcggcctcaaagcttgctgctgcttagctgctgcagccagggaacctggtgcaggcagcggggcaagcaggcccataatactaatcatttgaagacaaaccmgaagtcaaatcctagggcactgttcattttgatgtcattttcaaccttaccaaattttggtaaaattgtcaaaaaaaaaaaggctacatttagtttgctgccaaaatttggcaactatataagaaatcctaccaaaattttggcatagtttgccaaaattttggtaatgccaaaatttggtaaggttttttttggcatcaaagtgaacaggcccctaatccaaaacctccatgacttgtccagatatatacactcaaatgataatataggggtagactgagatttctagccacatggactaacaagtaaaaatatgtgtatatcccaaaatataagggcacagtcaacaacaaaaatgaagaaatccgaaaccttatattcaagcagattggatcgtggttgaaatgttaagtagcaaaagttaacccaaatatacatatttggaactcggaagtaccaattcctaaatcagactatcagagtagggcacgaattaacggccgatcgatctaacctcaccaagttaacctagtcgaaattgagggaccttaataagttttaaacttgatcagatagtcatctaacctagggtacacgtagatcctcacaatacagatcgaatgaggccgatatgaacatagcagatcgcaacaagaaaaacataaaagcatcagtaaaaattaggcaggcagtgagcacacccggcggaccaccttgcatctccttggcgaccttggcctgcatgtcgcggagggccgcggcctcttcctccatctccttcagccttcgcttcatctggtcgagctcctgcagctgcaacaagccaaatggggtagtagtcagctactcgaagtagggttaggttcatagaccatagatgcgcggatcatggaggtagggagaccttcgcggcgtcgtccccgccggaggccatgtcgacgtccgcgccgtccatgtccccgtcctccgggatctcttgcccgtacacctcgtgctcctcctcgtccatggcgttcgcccctccccaccttcgtcgatccccaatctgactcgggtctctcctttggtgttcgtgacttttggcaagggatcgaatcggaagcgaatgggtgggcccaaaacgggccggttattttactgggactaaagatatcggcccatctgaattgtgcgttccgccggataagggataactgaaggcggcgctcagtcccgcgccttctggaaccttcccgtggaaggggcatacagccttgcagcggcagcttccggaagcttctgaattcttctccaagatttgccgcgacgataaatcctctcgtttctccgctcgctgattcattctcaacgcaaaatccaaaagataagcacagttacgcagcgagagcgagagaggagtggagagcc

SEQ ID NO: 5650 - DNA, 174 bp, Oryza sativa
ttaatactttaaatatgtatctatatccgatgttacatttcaaaaattttcgtttgcgaactaaaaaggccctcagtcctcagcttcagtgcctcacgcttgcaacaatatcgtcctccctgtccgtgtactgtgaatctgccatctgtgacttcgtgagacatggctccagcg

SEQ ID NO: 5651 - DNA, 2000 bp, Oryza sativa
gtcaaagcgggggacgaggtatatgcatcgtcttcgcatgatcaaccggcaagccacatgctgctagcacctcctatcctcttctccctttgtctccttgattcctccctcctttccctgttgttgctacaaccaatgaaacaagaagccgagggagtcctagtgcttcgcatgcgggagatcagcttggtgggacatgggagcttggtcattaaagtaaacccacacctatgacgggatcccatcccctagtcactctatattaaaaaggctctccattaaaaaggattatggaaaatcatgcatgcgatcaatgggcagccaaataataatacaatccctttgatttaagagaagaaatatcattaatctcttctttctataaagctaatgcccactaaataactaagttcaacatgcaagtatagtatttattagcactcctaaattctacatgcaagcatgccacatcaacccattaaacacacaaagctcaacatgcaagcatatagtaattatatctacaatttacttcatttctaaaactaaacatacatatgctagatcatcattctcaaatcattttgataatattttaatccaaatcgtttcatcatttctccattatctaacatatatcccacagcaaagtgcggtgcatcatctagttattaagaaatgagttatcgagaaaaaaacttaacatgggtgttcacatttaaggataattaatttgttcaatggtatgccatgtgcttcttgatagtgagacgtacatggtgaatttttgaatctcaagccatatcggcccagtttcttttacggtgtttgcgaggtacttagaggtacttggagatagaataatctataccattgatcaagtgaagggcaaggtagggaacaaaataattgtaacatgatggcaattgagtaattagctagtaaaacatgagttttttttacgtgaattgaatacctccaaccaatgatcggtatatcatagtagatctcgatatcattgtagagaaaaaggtaaatcaggatactccattgatttagagatctttagcgatcgattagaacgtaacactcgcgtctcctttattctctccctttgcttcttgtgtgttctagggtttgaacctgttcaccggagggagacagagggagaagcgccggtatggttaagggttggaggagacgggatcggccgatcgatggctaggcaagcgtattcgtaagttaccctttgcttatttatgcagttgattagttatttatgtagttcacaaattccttgcataagggactaaaacaagatctcctcttatgttgttcttctagagtttaaacgggtgcagccacaggaggcacggtcgaagaagaagcttttggcatggtcgagcgtttgaacaggagacaatatttgattgatattagtgccgataaatgacttaacttgaatacaacgtaaaccacgcaaaagagaaaatggcgcaaataaaaacacacaacgctgacaccatatagatgttaacacgtgcggtcgtacctatgcggtacctattataatttaggaaataattataccattttcactctactagcaaaattataattttacccttagtacctaagtacctatatcaatacttaaatacttttaacatggttcctatgattgagaaccgttggatctttacctttttggaatgcaaacaacataaaagttctcttctcgaaaatggttccagtgagagtatgtgttcattggggttattgtgcgcgcacatacttcagtgttgtgttctgtaaaatactgaaaaacagaagatcaagcgagcgatgacaatgtagcgactactttcgagttgacctgccaagtaaccttacaaggcgctgattgttaattaaacgcctaaacgcgacagtaataccaatatcaagcgatcgaattgaagagcctggctaacatttgtaatttccaccatacgagagag

SEQ ID NO: 5652 - DNA, 2000 bp, Oryza sativa
gatgtgacacccgaaaattttcttttcgcgaactacacacacccaaaagctcaaactctggacgtgccgccggcttctgccggtaaaacattgaaccagtcacaccattctttttctgaatgaacaaaaaaaggcacagctccttttctttcccaccaagaaagacaaggcacagcacagtgccccacccatcatcatccatcacagcccggccatgtcacggcaaaagggcggccacttcacctcgtcgtcaccagaaaaacttttatttttctttttcccccatttctttcacaaacgcaaacacacaaccctctcgccctcctcctcctcctcctttcccttctctcctcgccttcgccttcgccttcgcctcctctcctcccgacctcccccatcgcgtcgccgcgacgccaccatgctcgctcctcgcgcgtcctagtagcggccgacgcacctccctccctcccccttccgcgcgccatggctcgggtctccgccgccgcagccgccgcggaacgccagctcgccgtggcctgattgattgtttgattgatttggctacgtcgaccgtctccctcgctctctctctgcacgtgcttttacggtagtccccccccttgacccctttcggtgcgctgttgcgattctgtggtgaattcgatttaagggtggatttctctgggtacgaatggatatggtggtgccgggtaatgattgttttgtgggcgtgacgggtgattggatacggtggtttttcagtagtggtagtcttgtgttagggttgttgattgcgcacggatttcctctgttgtcttgagctaaattgccagaattggtggttcggatgttgataaacgcctaggtagtacctgttaggttcgttcaatttgtcaccagaataatttctgaacgaatttttgccagtctgggtgttggtctgcttcttgttctggtgccgttggagggctatttctgcaagaactacagttatctgttcgttttggatggttatctggtgagctgaacggctgcatggtgccaatttgctccgaggtgaaaaccttgcttgggaattagagttgactgctagtgctgatgtatctttggagctttggtgatcaaagcctcaaaggacatgacctgtgcaataaacaattacaccttcttgcaacttggctgcattactttgacaaagttttctagtagactctgcagccaattgcatgggaaacaaaaatcaccacttcaattgttctgcggaattatcccaagtcccgagttttctgttgtgtgcagaaaagaatacgtggtgcttaatttgcatcaatattctatgcttcctcgagcatcagcacgtatgccagaattagtatattttagttgcttgtggttttgttagacttgggtctgttgttagtacagtggtcctgattatactatggaatatattccattattaacaatctgtgcttaaattttaatgtaggtactaggcctttgagttgttatacaacaactttttttttctggagaaagatgtctccaagtttgtagtattcactctgtttttctcaatcaacagtaaaatctgaccccctttttaatcttttttcagaatctcgtaggcatttacctattatcaaaaaccagcacttctgatccaaaaaggatacaaaattgagagttagagatatccatggtaactttatcctgcaacataaaaccttcatgcagactgatgcgtttgttgtattgtttctttattttgtttctcgatgcctttgacaattcagagcaatagagttcattaatttgagctgttcatttttttaatttagatgattctagacttgtgtttttctccaatctgcagaaagattgcatattgttcttctgatatgctttataaatatattcatatcttcctccaataaaaagaggaaatgaaaacaacaaagtttacatgaaaaaggagttgatttttaactgcagacaca

SEQ ID NO: 5653 - DNA, 2000 bp, Oryza sativa
attatattaggtctctcccagcacttataaaactatcacataaataacctctttacttgccgttaagggccattttgacataacccagaatgtgcaaaaccatctccacaaagtcttcccttttcctttgatacaaggggaatgatccagccaagagaacaagatcattgatatgatctctatccctagtgggcactgaacttattaaatttcatgccagagatggggaacaccgaacatattccctctaaaactaaagggtggtcgagaaccatggggcacaaaaacaccttaggatgcaaggacctccctagctagttctctcagtaattggtatactaattaagtactaccattatgtcgtacaactaattataatgcatgtagtacaccaccctctccctataaaaacccatccattgtgcacatagatgacacaccacaccaagttcaaccccaactatatctctatttgtaaccctgcttcttctctctctttgatcttcacttctctcttcctcaattggaagagggttaggggatcaagaagaggagacttttgcaaaggtaaatatgcatggatgcatatatatgcatgatcaaaattaagctagctgtacagtgtgctagcaacatatgtgtactactgtactgctgcaatcttttctttgctagctatgataagtgcatatattcctataagttacctgtcttgatgtagtgggcattgtaacaccgtgatatttgatgatcatgtgtgggggcatatgcaggtgaaatataggtaggtaagctcgctgataacatcattgagtcattgaccaccgtgagtccaatgtatactgcatgcaagtaccggctagctagcttaatagagatctaagtcaggagcaataagttgcagacatgtgcctttgggccctggagggaggcgatcgatttactttgggcccaactattatattccaccacgttttgtttttgcgccatgaagtttgtgttttgtgtgtggtccacactcaactctcttgagaaaaccttagttggtgcttgatttcggaaatagtcttaaaaaagcttttggaaatatgtttgtacagcatggaccatatataggtacttatattggattgactatactcgaaaaatctcatatattatagcattaattatggacaactgcaacatgtacgtcaaaaacacagtggttgttttaagaggttatggttggataactgctatagatgctagcccctcaataaataaaagtagcttataataaattatatatttttttcacatatgaccttgcaacaatagatgagtctaactaccactactagtgagccgtcctaagggtttgtagtcattacgacatcaaacaaccactaactatacacatggttgcattaccttttgtgagtaaatacatttagttcagatatacttggatgtgctttgaatttaaaacttattttaagaaaaaaaaaaggttgttagaggtgtgtgctagtcacacaactaggttttatgccaaaacatgtcagaactaccaccatattcaagtactatcatgctcttacacgtctatattatacgaaagcgggaacatacaagtggtcatatattccgcacacatgccagaggcatatacgtcaacaaactcagcccctcaagtccctcacattattaaccctttacatcgatttcttcttaaagatagcaagggacaaatgctagctagaaaaccatagggccactgcacaaataattaatattccctttgaattgccttctacaattatcccccaaacccgaacccttggccgcgtgagcgagcgcaacggcgtcgcggctataaattgccgcgtccactctgcatctctcactcgcacgcacagtctctcccaccaacaaacacgtacgactttgaacgcaaagtcttggcgccactcgatcgatcactctctgctcatcaggtgtttgtggaaagtgcagag

SEQ ID NO: 5654 - DNA, 2000 bp, Oryza sativa
gttgggcacgcgcagaggagaatcttcccaactaagcacgcgtgtgggaggagttcacgatgtcattgtgggtgaggttcctcacataccaagcaacgcaattcgtgtcactctctgttgccgcctcctcaccgacggctgtggcccttccaccaaagttttcctcacctctctgtgcccctttcgtcacccttccccacatccgactcccaccaccgactctgtctctatcacccggtagcgttgtcgacgtcccacgtccatgttgcttgggagcttagtgacgccgctcgcgatgctcctgtccatctccgtcgcgggagacccttgctgcttgggagcatgaccccaagctcccctgcgctgctccactccatcctcgaccagcctcctactctagctccccacccttttccttgatcctatccgctctgtcaggcgagcccaaacttgcgccaccgctaactcatcggccaccgcacttacagtgaagagagggtggagggtggatggagaggaggaggaagggtcctcgggagagagagagagagagagaggtagcgagcctcctccaccgccactgccgcctcactcggccttctccaccgccgccgctgggaggggggaggggttgtgaaggacggagaggagggaaggctcccgataagagagatggggccatcgacaagggagacagcaacgccgcgccgtgctgcgccatgctcctcctcgtcgtccatggttgttggaaggaggggatcggcgagccaactccacaccatcaccgtcgccgctgttgttgcctcgcctggccgccgcgcgcagcctctgcaccgatgctagatgaggataaggggagaagccaagggaagaagggttggagagagaggatgggggtcttgcaatatgttttgagagtgatggtaaatggatcccacataattttttttaattctaataccacataagcccccacatgggacgaaaatcaggtcaacaccaccacgtcagtaaaaaccgttctccaaaactgctagagaagttaaaaccatcctccaaaatcgctggggagttaaattacactggtttcaatacttcgagaaactatccagtttactcgcttagggataggaattagttgcggcatattttaaggttgtcaaatggacttttttccgcgccgttatcccccaccacctctgttaactgaccccaccccgtctcgctcgccgcatcacgcgccgcgcgacacaatcagttcaccaccgcagccacccctagctaaatccctcggcggcgggggaggtggcggcgtgcgtgggcatctcggcgggggtcgtacgctcatgtcggcgctggtaaactccattccttcctctctctctctctctctctctctctctctctctctctctctctcgtggtgatgttatgcctggatgatctgggtagggtgcggggggaggagatttggggggagttgggactgttgggagtagggttctgggagggatactggctgtactgaacctgcagatttcttatttgtttctcgctgggggaggttgcgggagttcatagctgcgagcctatcttcctggttggtccgtgaaactgaaaaattagtccattttattttaagaggtgaaatgctcaagcctgtctcaactatagggggtgctggattggatgatgtgtgtcgacaggagtcgcacgcaggcctcatgccttccggaagttcagctgcgcgtgaaaacatcgttttttaaatttaccctttttttaatgcaatttatcctgtcttgtgagttcctttcgtttgctacgtttagaacgtattgactttggaagataagtcttcttttgggggggaggttaaatttcatatcgaaacactgtgaggttgattacttgccatctactctgacatggtagttgtgtgggacaatgtatacaggtttggctctgcgtattggttttaagtggatttcctgtgcaca

SEQ ID NO: 5655 - DNA, 773 bp, Oryza sativa
gacgtttagacatgcgttcatcattcatgtaaactaattattttttattacaagtatgtaaaaaaaagtcatgcctaaagcacttataataatagaacaaaccacaaaaaaaaagtgataactatattttttaaataaaacaagtaaacaaatatacattaaaagtcaacagcgttagacattaaaaaccggcggaaccatatggcaattataccgatttatatgaaattcttgtattccgtattttttgcgggataacttataacacacttgtaacacaagtatagcttccatgaaaaagaaaaaaaacacaagcagctaacaaaaaaaaaaatgggggaaattggtgamccaagaatgggcagggcagccatgcacctgtttgttgttgttgtcgtcgtcgtcttctcctaccttccctcccgtccctccaccgcgcatgcacgtacgtacccgccattgctgctgccaaccctattcctctctcttccaccgctccgccttcctttgatcctttccccaccatctccaatggtggcccccctcgtcgcctagagcaccgaccccaacgttgcccaaggaccagggtggccacctctcctcctccccccgccgcggtcccccctcgccgccggctcgccggcgacgaagacgtcgtcgtgcccccaccaccaccaccaccactcggccacccaccggtccttgtccaattcgctctctccacccccgcccgccgcgcggtcgtcgtagcaacggccgcgggcaccgccacc

SEQ ID NO: 5656 - DNA, 2000 bp, Oryza sativa
tgagaagtgagaacctaacagtttgatttggcattttgtttgtacaattcattcatgcacattactctgtatgtctgtcatgctaattatgttgtgaaattcataaaacttagagcaatctggagcatcaattgctgtccagaattactgtagaagagtatgcgtgctagaaataatacttcacagtcagtgaacaaagcgtgtagcattttgaagacaccatagcccacatgacggacatgctcttgttgtttgatcaggctgttggttctatagctaattatttttccttattttgatggtgcaggcttgtgctctgtacaataattggtggcctatgttagcaggtaattgttagttagttatcctcaatcagtgttgtctaatcctcgtcgaccttcaactgacatttgccatacttctgcagctcttatgtatgtccttgtaccgatgccatgcctattcttcggtggtggatctacccagttcttgactagcagagatggtggagggtatggtttgatttgttgttttcgttccagaaactttaccatacatactgtactacttggatgtaaactaacatatgtaaagaatagtttggaataaggaaattccttctgatttgtagttgtgacaaactaatgatagagtgtttatcatttcaggtggttcaatgctgcaaaattcctgactggtgcatctgccatgggaagcattgcaatcccagcaattctgaggcacgctggcctaattgagactggagccatgttcatcgagttcacgtccttcttcatccttgtatgcacagtgatgtgcttccatagagctacgctggatgaagattggtaaaaggctcgaggcacatggacacaagaaggtaaatctgtttcatggtttgcttctcagcacgtacaagagaaattccttagtggacactaacatggacatgtgtacaaagaagcaaatatttgagttggcgtgactgtctgtataaatgctcaaagatttgctgatctagcgacaatgccaatgttctatgtgcacttttcatgtgaatactcctcacatgatctatgggcaacctgtcagccatccgtgtgaaatgcgatcaaacgagcaggcaggcgccctgtttaattcccttgattggttctttgcattttgaagcatttggccaccgtgcggcagctcgtctcctgctgcatctctccaccgtttcgcttctctcatccctatcccgcgccaccgctcagaatgtcttgggctttaatttttctgtgttatactgttctcgatcaatgcgattaattttagacatgtgcttgttctaaaaaccaattcatcaaatcaatactggacagtttttactacttgggtttgaagatgaagattttctttttggaggggttcgattcagaattgttgcagaattcctaacctcttctccctcttttcaaaccatctttttattataagaaaaaatactttaaaaattatattaatttatttttcaaatcatgcgttaattcatcgctccgttttttatgtgtatggatgaagttaccaacttcttcaaacggtgcgttcctatatgatatttgtgctgtaaaacaagcagagatatttcacatagcaatcgagcattcagaattttatttaccggccaaaaacaggtaacctctgtcctcttctcagctccggcttgtttttctttttagcgtttttaaaatgtctttatgatttataaataacaatccgcctaatcacaacgaagacagtttggccgagtggtctaaggcgccagatttaggctctggtccgaaagggcgtgggttcaaatcccacagctgtcataatttttcttccttctgattgattttgatttttaatcctctggttttttgcgttcccagatatataggttccgtgctcatggattttcgttctggtgaaatttgcaaggattttcaaatcgtttaaatgttatcatctcagcg

SEQ ID NO: 5657 - DNA, 1962 bp, Oryza sativa
atggacascsaagagataacatscsctcgctggggttatttttagttccggttgttctaaacaacgggactaaagatggatcttagtcccggttgtttataccaaccggggactaaaataattggggcctggcacgacctgacaacctcttcaaccgggagtaaaaatgatctttagtcccggtcggtgttaccaccaaccgggactaaagatcaaaaaatacccctaagtttttaaaccgggactaaagatgctttttagtcccggattttattggaaccgggactattgtggaattggaccgaccgaccaaagatggtttctccaccagtggcgggtgaccacccaggcagggttgcctacttgcgtgcggagctgctggtgcctgcttccttgtcatcgaaaaggaatactccaagtgttccgaatcttttcaccttgttgaggacgttccaagtgttccgacgttgtgcttagaattgtcatcactgacgtcagcaatatattcaagagtttcgatatatccaagcttatggagcatgttgtgtagttacacacgtgctacgtactacatgcatgcatgtatccgatattagtatatctgaacatttttttctatttatgggccacagagaaaaaccacatcataaaacatatcgttcagaacaatcgcatcgagaatacatgtatgtacacttgtagacaaattgtcttaattttgaaaataatacattttctcgatcggtgcatagtttcgtgctttcgatatagaaatggagatggctcaaaaaatwataactaattgtgaagacgacttgttcgttcaaaaaataaaattgtgagatgacccgcgttgaatttctatgatattcatccattttaaatttctctgactatttatatttcataggaaaatgtgtacacacagtagctaggtatagaccataataattaatattacacatgatttgaattctctgggtccatccggaaacggaaagctttcttttccaacaaggattcgtgctggtaattaactcatcgttcgtaaggaatgcaacactgtcattcctatgggcgcaatgttcccgaccggaataacacagtaattcttgacagttgaaatacgagaaattcgataatatctacatgcatctctcaatcaactaagtgtacgttgatgtacgctacctgtatatatgaagaccacttctatagttaatatagcatcagataaacattttttacttaacacataaaataaacatttatatatgcagtccataatccatttacacaggtattttttccaagctgccctataaaagtgcccgtatataaatcaaggatttgtgcgggcggattccacaaccgctgactcccttaaggaactggccataaaaataaattttcagtttaattttgtaggcgcaaaaagaatcctaaaaaatattttatattttagtagacatgtagtggaaatgttcatttgacgaggtaaataatctgaaaagaaactaatccttagctggtgagaaaatcttagtggaaatgttcatgagattatctggcatagcttcaactactgtgctgtgaggaaacaaaagtatagacactactgtgaattcgtgatcacaattcacaataaggttagggtccttccactttccaattcccagttgccaacttgttggcaaattacacagacagagcgaagcacggaaagatgcaacttgccctctaactacacaacgtctgtctccacctatatataaacccttccatctctcccccacacatgcatagcagtgctagagagagaaacaaattaaccaagaaatcctcttaagaaggatactgacagtgcacgccagctagctaatcactccaccagtttcggggaaaaaatatcaaggatttcgagatcctagctcgctagcaggtgatcgatcgaatcgatca

SEQ ID NO: 5658 - DNA, 340 bp, Oryza sativa
cgtctcgcctcagaaaataatgcgtttatggcgtccgccgtccatcgggttcgaccccgtaacagactgctactagcagcgctaaattgccgtatgcgagtagcaacaaacaccctggtgattttgccccgttgtctcactgacttgtgggtccggttttgagagagttcttcgtgtccgtaacaaatatactgttgcacgcagagtagaacttcgaagtacagtcacttctgccccccgagtgataagctccacagcctccaggtgcaggaggtaacttgatcagatcacctcctcccaaatcaacccacacccgtgcaatccactccgctgctcctcg

SEQ ID NO: 5659 - DNA, 2000 bp, Oryza sativa
aacattgtgggatgtgggaagtataagtcagcatcgagtaaggcacattatgccgttacggctgagcgcgcgagcatttttacttggagggatttattcgggtaaggctattgcgcccctccccatataagctccctcctctccccccttcctcctccccttattctctttctactacagtatactataaaattttaaaaaataaaagaacaaagttagaaaaaaatatatatagaaatactatatataaaaaatatttaattcaaattcaaatttaaaacgggtatataaacttttgacttataaattttggatctataaactaatatttgaattcaaattcaaatttgaacgggtatgtaaacttttgacttataaactttgggtctataaactaatatttgaattcaaattcaaattttaaacgggtatgtaaacttttgacttataaactttgggtctataaactaatatttgaattcaaattcaaatttgaaacgcgtatgtaaacttttgacttataaactttgggtctataaactttaggtgtataaactttagatgtatagaaatactatatataaaaaatatttgaattccaattcaaatttgaatcggatatataaacttttgacttataaactttgggtctctaaactttagatgtgtaaacttgatgtgtacaaactttaggtgcataaatttactaaaatagaaaagtaatacggtgtcaaaaaagaaaaccaggtggagggaggggaggggggacgggctgatcgctaggggcgaccgatcgccccttagcaatctcagattgattctcagtatttaatgtttttcatgaaatcatctgtgtagtttcaaatggacttatatagagaaatcaggaatctcaaggataactatccgcgatataggaacaaggattccccaccgtggaaatggggcagcttggtgccgtcatccattcttgagctcctgaggatgtcaccaggtttcttatacaaattatattgtcagcggctcttaattatcaagtaattacaactaacagtataagctaaaacctaaatataaaaatttcaccgaacatcctttgcgtcggggagagactaccttaaatatccgcccctggtaactccatggtccttagcctagctcattggttgatcctccaataccgatatagacatattcgacagatttcgaggaaaaagcagttacacaataattactactccctccgtcccagaatatactaatctaaaaccggattggacatatttctctgtccagattcgtagtactaggatatgtcccatccagttataggttgctatattctgggatggagcgaagtatactatagctacactagtaacatttaatacaaaaatatttcaaatgttattaagcttattagtcaatatgatttttttttcgtcacgcaaaaggcttgcacaacaataaattataaagagcgaaaacttgttttacacaacgtgcatgagccacaacggttgtcgtgagagatggggaggagaaaaaaatataagaggaaaattagttagtaggatagtaatatactccagttgtgatctaaccctttcagtttctattgaaatagtgctgggtaacggatactccctccttccaaaactaagtgcatttagcagaggatgtaatatattctgcgactatgaatttgataagcactttgtccagattcgtagcattagaatatgtcaaaactaatttcgttttaaaaacataatatgcgataatatcatgctaatatcaagaattaatatctttttaaatgctacatatctgtattgataacgatactgatttgccaatttttggaagtgactgcatttcaaagactgaccaaatgcctacaaatagcaccagaggcttggctcacctactcamttcctcactagattcttaatacacaacccagctggtgaaagagaggaacttgagagttagctagc

SEQ ID NO: 5660 - DNA, 2000 bp, Oryza sativa
cctagggagtatggatggtattttttatggttatccaaacgaataggcgataattatatttacattagtggtagttgcaccttatattttgggataggagtacatattatgaaaatctttactacttacatgaaaagcgtaactcaaccggttagatttcttgcggtgaaacaaaccgcccgggttctaggactagacttgaccaggttctatcggaaacccccccgataagataatatttgccccctttttttttgaatttggcaatatttatttaaatttgaccaaattttgtttagtaaaatcacataattccggactgaaataaccgaaatttcataaatttcggccatatcggtgaccccgatacaaatgcatgaaacgatagattgaagcatgaacttgacacgtgtgcttgtatttactgtttattattcttttaattgtaggtgacgtatccatcgatagcaatacatccgttgtgacttcgtcaatctcaagacacctatgatgactttatcaattttaagatatgccgactcaaagaaagtgatggtaatgttatctttttcaatcttcattagcacaagcatattcttgtgtaagaaaggtaccagtggtagactacagaaataaggtgctccagtgttaaaccaaaccatgcatgcctaaacaattggatccctcaattgcctactcaagctcttctacatatcatcactatatcccattatccatttctttagtacttctttttttcatctagacttttttaaagaacaggcagattttataacccggctttgaaagaaagcccaaatagaacaaggtctttgaggaaataaccaaagtattttgttcatctagatgtgaaagtattttcatcttttaagaggatatcttattgtttttatataccctttcaaatagtcattttaaaaagttacatatttatatggtgatatatcatatattgttctattttatcaatttttcctatgatttttttagtaacatgtacgaaacgacgggatgttctcaaaggatgaaaaatccacattccatctaagattactaaccttctcgagtcctttggcgtgtcctcacagcctattgacaaacacaagaaaaaatgcatgcatatttgatcaacaatgcacggatttgatttgatgatgttcatgcttagaagatggcattgccacgtcccaagggcgcatccgcgcatgcgaccttccaagtcccaacataaaatgtttcaattttcctgcctgctgtcatgtcgaacgcagcctcctaattaagaaattgcaatcactgtctgtatgtaacatcatctgaaaattagaattttttagkttatcataccaagatattggcattgactaaacattattaactgaattatatgacccccatattgcagcaagtagtggcattctttttttttttaacgtgacatagcacgcacacactccatacggatggatgggtatattacaggcatacttaaccatacttatgagtacctctaaaacacacacacactcactttataaacgcacatacgcacaccatctaataccatataatacgaaataataatataatcacacacactcattttataaataattaaaaaaccctatccagttaaattacgtttacttcacgtcaagcggtgcattctgaaagcctacacgtcgatcgattgccaagtcagtcgcatgaccgtgttctgaaaaaaaaaaccactcacatgatcgctacttacactctccttccatctccatatatcaaatttgattgatgattaaataaaattagtacctaagcagccacggcacgtgatgctgcatgttccgtgaacgtgtcaactttgtccgaagctgagctcgatcggattgttgcaacgagcaacgactttctctcgataaatttgtgtataaaagccacactctgctcgttatccggcagacaagacgagagaagaattaagc

SEQ ID NO: 5661 - DNA, 2000 bp, Oryza sativa
ccctctccctctccaaactggactattcttctcttcataaatggacggagatcggtacggttgctgtccgggtgcccttctgacgggacggcccatatctacccccacttccgccggaaacaggtgcgacgtgggattatggctgtctgttgatgacgcgaccagtgtcagaccggtcacagatcagtcatccttgtccaccacgtgtcagcttagcaacgtgcatttttgcccttcttcatatagcatcttgcctgtaatggttgggatgaagcctggtataaatctaaccagggctaacgtgccatctctaagagattacacgctagctccggcttgagacgagtgcctagaggctttcgtcttgacgggatggggcaaggcgtgcgtcagaccgccaatcgccacctaacccgtgatctgaccggtctgtgactggtcacagaccggataaaggaacgcgctgcaatacgctgcatgcagcgtgacacgttcgaccagaccgcaataaatggtagttaggtgaggcttaccgtgttcacccaacccattcatgtggcgctaactccacaaggggtcggggcgcctcggccctcggggccggggcaggagtcacccgaccccccctcggggaaatcaggaggagggcggacacctcaccctcgggcccgacgtccccgaaggtgccaggccacgtggrcgattgtgtctgcctcaagcctctggtcacgatactcccggtcccatatcaccgacacatgttaatttgtagaattaaatagattgtagatgctcttgcatgcttgcatgaggttgaatatgtaattatggttagtgggtgatgatgtggtatggttgcatgttaagctttagagttagtggggctataagtatagataagagatatgcaagctagggttgtttatttggtttgtcttttctcactgtcctcagaagcaaatgtataggaagttaattcgtaatattttcaaattccaaaattgaatatgtcaaattgcataattttaaatgactggaatcatatccgcacgttgcaatggctcccatctaaatgtactaaatctataaatatcaaatgcaacaaataattatttatgtacaaattataatatttatatttacgctatgtaggagaccaattcatcacctataaatgtaccatcaccgscaamtccctcctttaaaactaagaccaagttaagaagagccatggraaatwgatatgacattgatagggatagtatatataattatatacgggttgtacataaattaaagtaaagttgagcccgaaatttggccactattttcaagtctgagacatacggttaacctttttccttctgaaaatcaacgtgtaaatcaaaccctagcgaggcataagtagctaggcttatcgaatctatactatatatatatagttgatactcagtctacttaatctcaacatttaagtatgccacattatcacccactagcaattagtattatctaaagtatttaaaatcacgtacaagcgtgccacatcatcaccaagtagcaattattatttaagagtattttaaatattatacaaacatgacatatcttttacaattttgttgtatttttagaacttaatatcaaatcattatctccacatcattttaatattatttaaacatatacatatatcgtttttataatgtataatatgtatttatccacatatcccacggcaaaatgcaaagtatataactagttacctcatgatggtttacaatttggaagcatcctgagaggcttattwaattttgttgtcaaaaawtaarggaaacaaaatttctaaatacatgcatctttagttacttctgtcctctatagctacaaaaaatatatatgcactcagctgatccatcatccatgcattcgcatataattgcatccaatgactgatctcaattcatttccataaaattccagatcagctgcaactggac

SEQ ID NO: 5662 - DNA, 2000 bp, Oryza sativa
ttttcaatacttaggtaggggcaggtaattgggagggaattcctcctgtactttgtctaagaaaatctcagccatccgtttttattaatgatctaatctccaactaaactccctatcaatttccatcacctctaccaaacaagatattgggattaaaaatcaaattaccatcttaatctcataatcaattccctcgtgtaaactcccaatccccttccctcaagttaccaaacaagcccatactaggggttttgccttttttatgtgcatctctgtgtaacccttacgagttctcacgttacatataacatattctcctgcaggtatcctcaaatcctagtacaatacaaactagtgtaacagatgaaaacattagttaatcctaattcatcgtgaaactttgggccaaaatatttgtaaaatttattattcaacttgttaagaccagtggtgagagttttagagaaccgacgaagaaaaatattgaacctccatgaattggcaaaattgagtttgcagtttgcactcgtggaaacgtatcacgtggttaccgctgtcccacagtaaaactgggaaagaaattgacaagtggccctcttgaatgcaagttgtgagcctctggtgcacttactctgatccagtgagggaaaattacgctactaggaccaattttcccgacgatggcattttatttttgaaggcgggtagacctctcggaactaaatgaccgcttacgaaaataacaaccgtggggtgagatggttgtccacctgcgaaaatctattttcgcaagcggaccacctaagcagtgcgtctgtaaaagaaccctttatatctgcagggtccgcctgccaaaattgatgtagcatataaataggcgccaaatcgcacaatttttttttctaagtcttatctcctctcttctccctcacagcccccagctctcctctccctcccccttagcggccgtgggcgttcggcggggatggccacggcgacggcgacgcgcgtgcggggatggcgaggcgcagggacggccacggcgacacgcggggtcggcgacgacaacgcgcggggcggcggtggcggcacacggcgctgctcccctcccctcccctcccagatccggccagaggattttcataggcgggtgactgggctgcttgcgaaaataggcgtttgtatacaggcggaccgttcccccgcatagaaaaatgatttttggccggctgaaaaaatgatttttctagtaatgttaatcgcaaggttattgtacaagtttttaaaactatagtttatctattttcatcgtatatacatcccactcaatttaaactcatacagtcgtattagcctatagccgtattagccgtattacccactccgtttcattgcttcaccccgtagtacatgattctccatccattcgcagatgatcatcacataatttttttcaatgttattcagaaacgatcaacatatttgataatcttccatgtgacttttcatttttctgtgtggtgctaaattttaaatgatcattttgcatgcattgttctatctatcgttcaattaactgcaattacggtgcgtgcatgtatgcaagcgatatcattggcataaactgccatggatgtaattaatgcgtaggacacacgaaataatgttgcatgttgatcgatgccgatttaagtgacatgtgagagtgtaacggtgtcgctgcacaaactatatacgctgattatttgtgattggaaggagtattttcccttttacaatggcaacttgcattgtcagttcgccgccccgcgtgctccgagactccgaggtggtccgtgcacagcacatatgccggcatgcgcacatgaaaattaaatttgaaaatccatcgtcttctacttcattttagagagaatcgaagccaaatatgaattacaagtagcaacggattcttgtgaaaaaagagctagctagccatctgctattggtcattccgatcc

SEQ ID NO: 5663 - DNA, 2000 bp, Oryza sativa
gaaggtgggcatgaaagtggtttactagattggtcagttccacgccaccatatcctgtatcgctatttcgtcaaacacctagttggtgttctgtggtcttgccgacgttgtcatcgctcagctaaggctagtcgctgccgaaccgctagccctagctggtcaagggaggatgaattgtggggaagagagatagaacgagaggagaaggggtagttcaatgacatatcgcgtaaacacatgaaaaaaaaataaaggatagtaggtcttttagggtggagtggagcgggaaaaacccagctcaaccctcgtagtatgattttgtggagcaactctgctacctccgctcaaaaattgaaacacatctctaactatagggaagttggagttgagagctaaaaatgtgtcaaacgggcacttagttttctcttattttgagtggcttgatgtgtactctagatacgttgagtggtacccaccatcccattataaaaggccgtaaaagagacgagagactgtttgcacgtcacactcacaaaagcctatccccacgaatacgggtggacagaaaaagatcgaaccgaaaagactgagaccgagacgagaaattcggtcatcaattcggtactaggcagtgaaagaccgaattttgttcggtcaattcggttagtctctttggttaaccgaatataccgaattaacagaaaatgcctaaatgtaacctacagtccactaagttcaataggattaaactataactttcacatccctacttcttctaggcatgcaatctaataagagtctttactcatacttgcttacggattttcttttttgtgatttttgtgttgaaaatttccattatttctttgcacatatgaaaataatgctgaatttcggtcagaccgagaccaagaccgaaaagatcgagaccgaatttgtcggttctaacattttttgcgttgaaattctgttttcacttttcaaagaccaaagatcgagatcgaaaatttcggtcagaccgaatgcccacccctacccaagaagatgaggcgggcgagtgtgcggtgctgtggagtggaggtggtgttgcctagtggagtcgtgcagaaggagaatagatggggattgggatttggggagggttgactagggttagaagatatatatatacttgttcattgggcttcaattctatgggtcaaatgacggataaattttagaattggtccctaactccaatgaatacatgtcaccatggaagatgggaatgggtcccgatggtgatgagttttgaatcattaaatttcccataaatgatagatatcaaccatcccatccctaaatatgaattcaccgtggggaatcagtgattgggtccgttgccgtctctgtacggcagtagtacaagtgagaggaggtttttccggttgagtggtggtacccaccatcccttataaaaggcccgtaaaagagacaagagactgtttgcgcgtcacactcatcacacaaacacaagccccatccccgggaagacgaggcggtgtgtggcacgtcacgtgccccaccccctccccacccacccgcctcgtcacccacccatctccaaatccatggcccccctccccgccgccgccaccgscaccgcctcctccgccgccaccccgccgacgacgaggcccactccctcctcccttccacccctccaacgaggaggatgacgacgacctcgaggagcgcgcctacgaggcgaccgagaaggtcatcgtctcgatctcggacttccccgacgccgacgacgacgaggaggagtccgggctcgccactcwccrccgcckcstcgggrwtccsgcccttctcgtggaggaagctgtggctgttcacggggccggggttcctcatgagcatcgcgttcctcgacccggggaacctcgagggggacctgcaggccggggcggtggccggggacacgctgctgtggctgctcctgtgggcgtacctcc

SEQ ID NO: 5664 - DNA, 2000 bp, Oryza sativa
gcagaagctggcctttattaagtgtaaatgaatttggatcacaactcaacaatccggacatgcatggatcgttgatcattggccaactttgcatgcatgggccacgtctcctagtactaagctccaaccgcatcgatcgatctggctagctatctgctatagagatcaccaaggccggccctggggcagtacgaacggtgcgaccgtaatgggcctctaaaaattaggggcctccaaaatatgtatactatggtattaggcttgaaattcgttaatgacaatgagtttttaaatattatcttgtttttttatggtgaatgggggcctttattttttttccgcaccgggccaccaaaaagtcagggccggccctggagatcacagcaatatatattatcagaaatgattattcagaagatatacatacataatctgtacttccatgtctttgacgactctctgtctcactgcctagccaagccatgcagtagtagattcagagagatatagcaaagatctaaataaactagacaaaactctaaccctttttatatatatgtatgacaaaaagttttagtgagatctttataagagctctcataattctggtaccagtagtggagactcgagcccttgccgtccttatattagatcatcccctggagccatgcatgcagagataatatatacactaaactccgatcttttcatacatgaatatattagtagaaaatcatagctcgtagtactaagaacatgtaatattccatattatgtttatttattttggagcacaatgaacaatcagaatatttatatatacaatagatctctcctacgtatctaaacctaattggtacttgctaaaaactggtcgtacgtacgttaaaaaatatctgaccattttagatggatcatattaacatgatctatatgcatttaacttttcaggtcatgttaaaaacttatctattctacatctacatattgtgggagtttatacttcatgatgaatgtttttttttataatgggaatttataaaacccggcttcaaactggatacaacggggtttttattgattccaaattctagactaagcaaaatgtcggtaagctacaactaagattacaaactgagtacaactcaatatttattaattcagaattatgaaaccattcagttttgctatataattgtcgataaattttcttctagaaatttaacatatataattatagtactatcatgatataattacattgtaatttacatataactataatataacttgtacgcaactttcacaaaaaatttgaattgttagatttgtttcaagattcttaccggcaaggaaggaaaaaaaatcaaattgtgcgtacatgtgagaggattcggttgacctccatttcacgaaaatagcatgctacgaagagatttttaaaagttacatacaagtgacattgtagttacaaatgtaattacaactcgattgtaccataattacatctgtcaaatttctagaagaaaagttgtcgacaaatgtatatgtgacctcaaaaaattaaaaaaaaaatatttcaaatgtcaataacaatagctgtgcgacacacggttttacgactatgaaatacaagaaagaagagatcgggaataacaaataagctcagatatatgtgtagttgttatcacttgtttatatcagtggcatggccgctcgtgtgctgctagctgcatgccccatccatatattgcatacatacacacatgctagctactctcatcactctaaaattctaaaatacacacgacaagacagtacaaatcgacgagcgtcttctttataaatcaatagccagcctgcaccacagcctgtgcccatccaattaactacaagaccccagttcatccagtggatcgatcgatcagagctagctagatcgagagatcacaattcagaagcaaatcaatcaagcawtccggatcgatcgatcgatcgac

SEQ ID NO: 5665 - DNA, 2000 bp, Oryza sativa
ttggcacttggtggtgcgaccacggtaggggtgraagtgtgtacgtgccgccgatgaagtttcgagcgtgtcagggtgtaacgttttgtgtggacgttaacttgagtgttaacgtgacagggtttacgccgaatcgttcaaaaacaggatgtgtatgatgcaagagcgggtgctttcagtcatgggctttatgactttctcaggatgaatcagtacatatagcagattaataattcaatgttgcgagtaccaaatatcgtgtgtgcttgatgatgaacagcgttccggaacctgaaagagttgtggtacgacaaagaaacgataaactctctctgatacgagctgtttggagtcttgcacgcttgggtacaacttccatgggcctctggtcagatgggctgcaccgtacgaagcccattcaacggtccaacccgatgaggaaagaggccagacaaagtctacggccggccaggttgtgcatgttctgtggattctacaaaagaaatgttaccttccctcgtgattagtccgggtcacaaatcacaaaggaaagacataaccacatagagtacacattacacagcaatgtggtttgttgttgaattttttaacgagtcgccagatcatcttttgtgttatccccatacaatgcctatttattaatctggaacatcagacggaaaataatagagatctagtaggagctaccgagataacaatactttgagtggattcgcgtgtttgtggatgagtaatcgcgatggcgttgggatgaatcgagcgcgcaggattaagaaaccatgcgtcgagcgcgcaacgatgtcgaattcaagcaacgctagatggtcaaatgatggaaacatgtggaggcgtactcgcatagtactacgagtatactacttgcgcctgtttggagtcgagacacattgacaatcaactcttcgtggatgctaattaaccggtgttactactctcgaaaggaaagtttagtgtaccactctactaattccttttggttaacgattcgaagctcctaggaaattcatcaagtaagctgtgatcgatgatatactacggtacacagccggtagtagtctctatttttatgtgcacttgttggatggagcggtcaaaataatcttctgttttccaccgagcacgcaaattaatcgtgtgtcatcgggcaaccacacgatgaccttgcaagtataatctcgtgtcatcaggcaaacgagggagcatcgcattgacacatctccaaccctgaagaagacgagcattgatttcagacgcagagatcaaaacaactcagctcagtagactgcagaggacgccactccggccggtccgacgctccaaaaaccagagcagctatcctatcacgtccctgcccctgcgaatgacatatggcccccaccatgatagtagccaacggaaaaccgtgacgagtccagtgcaatccgtgcatgcacgccctgcgctgccacgcggccggcatccgccaaagcaacaggtcgttcccgcgaactcccaggcagagagcaagggtatgtggtgccatcctcttgtaacgcacacgcgggtcttcctcgtttgcgcaactgcatccacgaacaaaacggctgcctctctctccctccatctccctcgctggagtggagactcttcaaggccaaggagagtagcaggcagccagcacagcagcgagtgataaaaaagaggcagctcttggtcgttggtgtgcatgctcacgcgattcgcgtycaaaaatttatcaggaaacctttttcgaggtcgcggtaatactcccttgccctgagcgcgtacaattgcggttatcccttctgtgcatctaattctttccttcttcagagagctgtatctacttctgtcccgttcgtcgttatccatatatctcatctcctccctgtttcttggattcttgcagagtatcaatacatcttcgtgctagtgcgtgtgtgagagagagggaggcggcc

SEQ ID NO: 5666 - DNA, 2000 bp, Oryza sativa
tttttttattataacggatgtgttactagtaatttgttagggtcacctcatgttcgtgatctttcaacaacaagatcgtgtttaattcgacgaaaatgaccggtaatgccgagacaaggtggtgcaggctagtagcggtgaatgccttagatctctagtcagttttgtggtgttcgatcaatggatcagcccaacatcattagctcccagaggtatggtggaacgccacaggaaaggcgtgtgaagagaggcgatgccacggcatagcggcgagacgagagagagatagagagagagagagagagatgtggacggccgcagtgcacggcaaggaagggtacagactcccggtggggtgaccggggggtgaggtgatgtgtatggcaaaaagaaatgaaggagatgtgttggatgctgactgatctgaacagtagtgctactggaaaaatttaagctattttcgctcaataaaatatctaatactaggtgcataggaatatctgaacttgcacattttgagggctttttacagcacgtttaaattacttgatgctgtgagtgtacagcacatgaatggaatttttgtagactctctattgtaccacatactcatagaaaagagtctaatactggttgacaaataaccctactattggatctagattgactaaaatcacaaacactaaatagaaatagacttgccgtttgtgtagcgatgtatgtactctctccgcacctaaaagatttgtttcacagagactattttctaagtagatgtccattagatctttaatagtattttttttcgttttaaccttcaaacccagttgtactcccttctcttcctcatctttgattatcttaaacaatatcaataatattcttttatgaatagtgtgagtttaaaataaagtataccttttcctttaaaaattactagtttttaagttttttacttacagtatatattttttattaagatacatattttacctatgtttttttaacatgtttttaaaacagcttaacgatgtgtttcttaaaaacattttatgtataaaaattgctttaaaatataaaataaaaatactttcaagtttataataatataaactcatatgttaatagttttkgtattttacgtgtgtgctgacatcatcttcgtagcctcaaacacactctaatttatatttcacatgtattttactcatactatttcccaaaggcacgagagaggacggcaacaacaaaaagatcctcgcctccccacacctgaccctacccatcaaaatcctcctagacaactcactaaattatataccaccagtatgaaaaagaaactaaaaaaccatttttaaaaggtcccagatgaagaattcttttccaactcgatcccaacagaagaaaaggaaaaagaaatgaatagcaccgaggagaggacagacagaacaaatccatcggtctcctcctccctccgatttccccccttcgtcctcgtcgtcttcctcccatttttttttcctcctcctcctcctctcatccctcgccgcgagccaaagcccctggtttcctcgcaactgcctccccgcgattccgtttgacccccaactgttcttctcccctaccaccaccaggtcgcagtcgcttccaatttccaaataattccctccaactccggccgctcgcgaggaaagaaaaggagtttctttttctctctctctctctctccccctctctccgagatccgtttcccaaacaggcggggggtcgaaagtgtttggtactttggtttggggagcttgtttgccgacgcggatctgcgtggagacgagcagaggggggagcgccggaattgggtggtttggcccgggaggcgccggaaagtgggggagcctttggattccccgaacccgccatggtgatccggcacgagtagtagtggtggtggtggtattagtagcagtgagatgccggcgcgtagcgcggtggtggtaatagcc

SEQ ID NO: 5667 - DNA, 2000 bp, Oryza sativa
atgttgatagatgattttcttggataggtcaacacaaggccatcaatgatgaaggcatgccccagcatggccgccctttcatgaaaggtcgtctttttgttgaattcaacgtggagtttcctgagcctggtgcactcactcctggccaatgccgatcgcttgagaagattttgccaccacgacccaggaatcaattgtcagacatggagctagatcaatgtgaggagaccaccatgcatgatgtcaacatagaagaggagatgaggcgcaggcagcagcacaggcggcaggaagcatatgatgaagacgacgacgaggatgctggagctggaccaagggtacagtgtgcccagcagtaagaacaattcgatgccattcggactagacgatttagcgtctcttatcatccaaagaccgcggtagctactgagttcattctattcttttttttaatgtacccccacctaaagtagctgatgcatgttatgatttctcttttgtgggaaatgttatgctaccatttttgttgtcttaagattaaggagcttgctattagtcataatgatgttgcggcctcactacaattattacagcctgccgtattatataccaaaatgagctaatcctcgacaataattcttacagacagcggaccgaatcagttgtattatactattatgcctgtggttctgtatggggatgcaaccacgcaatgcctgtgtcatgaataccctgaatccatgatggtatggtagtcaaatgttgcatgcttaaactcgtttctggtccaagtggtatgatctgatctgcgatgcatttgctctgcctactgggccaatttattttatgcttgctcttgttcagcatgcgaggaacaacagtgcgaggcttgggttggacgttgaaactgatgcaccactggtggccactggccagctccacttgttcaagaagatcctaacttctgaatcttctgaaaatctgaaccgatatgtccaccattgccgtcgtctgcactgcagatcgttcggttgcaccagcaggaaacagtactggatcctgcagggaaggttaaaacaaagccgtcgacctatgatttcattgaacgagtctctgtctcgcactgtattaacatctatttaaacagctagtggttgagatgtaacttttgtatgggcaacgtatgccactctaagctcgctaggccggatttccaaatttaaaaacaacattggccggtcctgccaagatggtgatcatagggggtgtttagatggggctaaaactttttaacccatgtcacatcggatgtttggacgctaatttggagtattaaacataaactaatwaaaaactaatttcataaatgagagctaatcagcgagacgaattttttaagcctaattaatctataattataaaaagcttactgtagcatcacattgtcaaaatcatgacataattagactcaaaagattcgtctcgtgaattagtccaaggatatggaatgtgttttgtaattattgtatgtttaatactccaaattagtatccaaacatccaatgtgacatggacttagaataagtccctggaaaccaaactggcccatagcctgataggttcttatacaattgaagtacagaatgagtagttgtacagattgcgactgttaacctttggttagccagtacatgacatccacttgttcttgcagaatttctagcccagccattacatgacgtccacttgtttttgcagaatttctcacatgtattttttaattcaggagcttattatttattaaaaaaatattcaggagcttaatttttctctcaaaaaaatattcaggagcttaactattcttggctggtagtggcagcacagtctcacaaggcgctctgctatttatacctggaaggaagcgcatctccttcctgcggtattctgtgtgcctctctctctctctctctcctccaccttgtcgtagagaggaggcggcc

SEQ ID NO: 5668 - DNA, 860 bp, Oryza sativa
cgatatcatctattaaaaaacggagggagtattaatatcttgatttggttcggtgagagaatcggagagagagtgcattagaaactttcaaaggagttcgtaaacattgaggttatcctcttagtagaaatactccaaatatwcatagaaattattatttcctatgaaatttttytgaaccaagactagcattcaaagactctcaaaggatttttccccctatggattctattactccatatatatttcatacaaatttcgtccaatctaaaaggactcctaagcactgattttttttctttaaaaaaaaagaacccaaagttwacatgcgaaaagacaggggcctataattaatactccctccgtcccaaaatataagcatttttagaatagtgtcaagtcaaactttttaaattttgagtattagtagcaaaaattttagaaagattaatcatgtaaatttgatcttactatatttatcattaaacgaactatcataacatgcaactctttttatttaaaacattctacttttatagatattgttggtcaaaatagtatctcgaaaaccgtgtcaagaccaaaaatacttatattttgggacggaggggtagtattcattgattctctccatccgtagcagccaagtcccatggatggttgcatgtgaccacatcgtacggggctacaaggtggtgtgtattcatgcccacaccgttgcatgtataagtacagcgcaaaagtggtagaacgagaggctctgatgcgcaccagatcgctcagtctcacaccgcacagagacagagaagagctctagagagaacgagagagagagacagagagagagagagagagggaga

SEQ ID NO: 5669 - DNA, 2000 bp, Oryza sativa
ttattcctttctgaaagataaaaaatatctccttttcttgcaatggaagaaagtggcttaaaaactctaagaaataggtcatttttcctatatgaaagataaaaaattctcctctttttgtgtaatgaaagagagtggattaaaagcacaaagaaacatgtttattcctttcagaaagataaaaatacatcatttttttcctacaatggaagaaagtggctttaaagctctataagaaatagtagatcctttctcctatatgaaagattcatatcattatcatagataagataagtgcaaaaatttccagctcattttcttatctaatatataggcccaaatccagctgggacccaccccacctagcttgagattcttttgccaccttgtggttttgttgcattggtgccattttgcataagaaaacacccacaagacaacaaaatgcaaagacaacagatgcatgcattgtgcacatgcttgttcaagattcaaggccccatggcttgggtgccgcattgaccacgtttcatgatgttaaccagcttgattcccttgctactttaaccactattttcattttttttcaccctacttattattattaaaaataaatgtgtacaacttaactgtgaccatttaatgaactctcatttgatgtaaaattgcagaatcttcgtgataaatacgaggactttttttttcctgaaggattttattttgtgtgatccatatgaacgcatggtttccatccaagcttgacttccaaacagaattttctattgaagcttgacttcaagcacgataggcaggaagataaggaggagaaaaaacaaaccaagcagaatcaagtctgccaggatttggtattgcccctaatcttattcttcttctaaaggaactaaaaatcaaaccaaaaagatatacttatgtttttttccagctcccaaatccaaatccaaatccatactaaaagaactgaaaacaaaccaaaacaaagaaaaatatttccagctcccaatgagttcgtttcttcctttaccaagttctactctctcattttccacgcatacgctttccgtactaataattgttactttttaaaaaagaattctatatcagctatttaaaaaatcatattaatttatttttaaactaaaatttaattaatcatatactaataagtcactctgttttacatgcacgtaagattagcttccaagggacgtatccttaaaaataaaacttactccttctgttctaaaatataaataattttggatggatgagacgtatcctaattcacagtaacatgatatagagttattatccataaaaaattcctaatattttgagacgctccatcatcatctaaagtagatgataaaaagcaaactagaaatttaaaaaataaaaacaaccttttcggcttttcctagtactagctcccaaatccacactcccatccagtgcggaactgcaaaagccagcgggccccacctgccagcgacccaccggccaccacctcgcactctccgtctcctccgctgcgcccccaacacggcgcctactactcctacaacagaagacgagctcgcctcgccgccgccgccatcgccaccaccacccgcagctctcctcgtcgcgtcgtcccgcacctctcgatctccaacgacgcgggggcttgccggcgcggcgcgagttgacgacgactcgccggctgtagcaggcagcagcagcagtagagagacgagacaggagtgagtggtgatcgccgcggttgggtttcttggattgggctgtggctggcgttggtcggaggagccaggaggaggttccctctcgctttgctcgctcgctcgttcgttcttggctgggtttggtttggtttggtttggtctcggttcagatcttctctccaaagattgggattctgttggtaggggggrgagggaagccattttcttgtttcgatggacgctcggtagatcggtaggtag

SEQ ID NO: 5670 - DNA, 2000 bp, Oryza sativa
tggacgtgaaaaatcatagctgcacttaaaatgggacagagggaggatagatgtacaactgtaaatctttcatgtaacctaaccaaaagcaaataagtagcccctttcattcatagagacatccagttcttctaagcaacaagtaacaaacttctttctaaattgccttttatctcgttcttcttactaaaatttttttgaaagagcaaaagacaaagggagaacggtaagcaactagaatactactccctccgtttcacaatgtaagactttctagcattgcccacacacgtatagatgttaatgaatctaaacacatacatatgtctagattcattaacatctaaatgaatgtgagcaatgctagaaagtcttatattgtggaacagaggaagtatgtgtaagactttctagcattgtccatattcatatggatgctaatgaatctatatatataataatgtttagattcattaccatctatatgaatatggacaatgctagaaaaacttacattgtgaaacggatggagtaatagctagctactatatgagaacttatacgagttgatttgaggcatgcagggataacacctaaccagacagccatcaaaatcagatgctaaaatacgggccatcatagatcgcactcgggtctcctcgtggggtttgcgtttggagacgtagctttccgcagccgcttgcactgcatctgcatgcaccgtgtgtgtatatttatattcttttcttttcttttcttttcttttcttgtggcgacggttgcgtttgtagattataatgcaaggagatagtgttgtacacgaattcagcataagaactggcctcctgaaaaaaaaattatatatgtaatgctctactttagtagcctgagagtgacatgtccttgagaatggcacagcgatttttttcttcagaacccattccccccttttgttggatggaatttgcatccttgaaaaaaaaatatagatatcttatccctcaatacttcctctatggataggcaatgaacatatctgcaattaaatttagatgcaatggaaatctgacagcaagcaaaacaatacatgtcagaaaagctgactcaacactagtacaactgacctgaactatggtagcatttcagcaaaatagagcaattttatcactttgactactgaaacaaaagtaatttccatagcctatcaaggtttcagtgggtcttacgagttcacatcttcaaagtttcctgaacaatatcatcctctcaaacttctcatccatagccaaagtgccaaggaagttcaagcgtgcttgtcggctagccacaagatcccatgaatatctctgaccgtcgcaagatttaggctgcatgatactgcatgcagtggttaatttataacatcaagagacatctgatgatttctctgcctcccaatgcatatgcatacatgccagatatgaccaaaatttgacggttcgccgcttcgtctctgacgcttgaggcagcatgctgcagaactatccccaaccgaagcagcatatttcaggtctctctgttcttcaggtggagatggtctctctcttcactcgtgttgcttcaggagagcccatcaggttcacttcatcagatgaagctgatggcgtcctctagctgacaggtgggcccatacagccaccaaagaagggtgtgggtcccacctacctacgtctgcacaattgttgcacacgcagatccagcacggatgggggccacagcacagtacgcagagcctaccaccgggaaataaccgaaatgccattgccgcgtgcatcctataaatacggcggtgaagcctgcacatctctttcaactcaaggccagtgtctttgctccttgagttctgcactagctagctagtgtgtaacacacctactagctaggaagctacccgtctctggctaaccaccaagctcgagcaaattaagcaagtgacacagttcagaacaccagcattcgcc

SEQ ID NO: 5671 - DNA, 2000 bp, Oryza sativa
aacaagcattcaacaaagcaaacatgaatatcacatccgccgcccaagcatcgagccgccgatagcggcgtcatcgtcgccgccgcggtcagatccgccaccgccgcccacctgccgtcgccgccacggccgccgctgccacctcccctctgggagagggagaaggaggggagggaagaagccgccagatacgtgctcccggcccgcgcgcagcatcgtcgtcgttgtcgccgtggtcatggtcgtcgtcgtcatggttgctctcgtgctgccgaccctgtcgtcagatccgccaccgcctgcctgccgtcaccgccgcggtcgccgtcgcccccttccctccggctagatctgggagaggaagagggggggaagggaaggggaggagctcgctgcgccccgtagcaacgagccgtcgtcgtgaccgtcgcagcaccaagccatcgtgggagggggaaggggaggagaaggagctcgccacgccccccgtcgcagtcgacccccccgacggctcctctcattgctgtcgccgcaccccccgacgaccgcctcccgtcgccgtcgccaccacgcacagctgccggagccgccgccgccacccgagaaccccgccgtcgccgcctgggaggaggggaggaggagaggagggtgctggaatttggtggaaatatttttattctatggtggtaggtggataagggtatgggcgggcggttatttttggtggtaggtggataagggtatgggcgggcggttattttttttatgtgcggattttttttaagaacgccagcgaaaatcgattttggctggcggttgcttaagtgagcagccaacaaaaataattgtatcttcgctaccgaactatttaacccaaccgccagcgaaaattatccatttttgctggcggcgcatctaagtgaccaccagacaaaatgaacatatcttcgctggcggacggtataacgtggccgccagcgaagatccattttcactggcggtcggtgcccctcaccccctcgttacgatcttgctggcggttttggcatttttccactagcgaaaatcatagaccaacaccataaaaaatcgtttttctagtagaccaacaccagagataatccgtatatttaaggtgaagtgagggagcccaagctatcgcagcattcttcaaaaatgtagtgcaacaaaaaaaaaaggttgtacttatatcccttgctataaaattagtaattataatctttttaacatagaactgcaaacccaacatgcatagatacgctagggttcgctagctaggtgattcaatagctgtacaaggagagggttgtttgtctataaatagagaccgtgagagatgtagttagaccatccaagtacctagcaagcaaaagtcgacaagttttgtaactgacaaaacgctcatcggcaacatgtctgtgagcgaggttaccactgctaccaccggccaagcttttgcaccatccgtgtggggcgacttcttcatcacctacaccccttccgattcacaggcatgaagattaaacacaacatgagtacacatatatacaattatattattactctacttatttccttatatacataatacataggcttataattagtaatttgacaacatattactccctccatctcaaattaaatatcattttaactttttacttgcaatgtttaaccatttgttttatttaaaaaattagtgtaaatataaaaaaatgataaattataagtatttttataataaaacaaatcacaaacaaaataaataataattttataatcttttgaataagctaacatggtcggtggaacgttacaaaccaaaacttaaaacgacgtactacttattaagcaagcagctgagatcatcagaggatgatcagtactgcacgagagaacgagcggaacagctaaaggagcaagttcgccgcaagctgttggaggccacgagcagcagcggcagcagtgtcgccaac

SEQ ID NO: 5672 - DNA, 2000 bp, Oryza sativa
ggacccgcttacatctggcaactttcataggtcatagtctgccctcacagaccaacacaagtcttttctgtacactttgtcctaactcgtgtgcatccggaaagaatttcccggtcggtcacctatcccaaattgttctaggccaagcgtgagtacccagaaagaatttcccggtcggtcactgtcggtgacatgggatcaggagtatcatgactagaggtttgaggcagacacaatcgcacacgtggcctggaacccccgagggacttcgggcccgagggtgatgtgttcgccctcytctwagtccccccgaggggtcggccgaaacccgcytgggccccgagggccgaggmaccccgacccctcgtgggtttttgatccgcgtgtatgggttaggtgagcacagtggggttcayttaaccacatttattgcsgtttggctgagcgtgtcacgccgcatgtaacgcagtgcagtgcactcgtttatccggtctgtgaccagtcacagaccggtcaaatcgcgggttaggtggcgacaggcgatctgacgcacgcctcgccccatcccgtcaggacgagggcttctaggcgctcgtccccagctgaagctagcgtgttacctcccagagatggcacgttagtcctggtcagatatatgccaggcttcatcctaaccattacaggcaagatgttgtgtgaagaagggcgaacatgtagattgctaagctgacacgtggtggacaagaatgaccgacgtgactggtctgacaccggtcatgtcgtcagcagacagccacgattccacgtcgcacctgctcccggcgaaagtggaggtagttgtgggccgtctcatcagaaggtgactcggacggcaactatacaaattctccgtcccatttatgaaaaggtggggtaagtccccacaaaaaagagagaaatggtgcatgtggtatccccttaagatataaaaggaggatcctagcccactgagagaggggatctgatttttccagatagggaatcccagaatcaagggagcggctggctcatactttgtagctccttcatacacagatctcccaaaacacaggagtagggtattacgcttctcagcggcccgaacctgtatacatcgcccgtgtcttgtgtgtttcctgtctcgcgaaccttccacatacagagagcttagaatctcaccctgagtccccggccgaaccggcaaaggggggcctacgcggtctcccggtgaggagccccacgctccgtcagtcacctatcccaaattgctccaggccaagcacgcttaatcctggagttctttggagatcggcttccggaaaagaagttgcaacttgttgatatgagtattctattaattctattaagccataggctgggatgttacacaattctagaaaaaaaaagtataggatacatatgaaaactattgttcaaactttaggtgcattttgtatattcaataaagaaactggttttagcgttttccaaagctagagtaggtttgctcttcattttttttaaaaaaaatgtaggtttgttccggtgtacactcacaacttgcattcccaaatatcaaccttttgtcactacattggagatctggaatatatgaaattctaaacgaaaatgttgaaattaaggaaaatgtttgggtagtaaaagtagacatatcacatatggaagttctacaagggctaggtggcaaaaccgccaaaaaccttgtccgccgtcgtcttttttgcgcaaacttccacaccaccacgccatcaccacctccacaccgcccttgccccctcgctcttcttttcttcttcttcttcttcttcttccccctgacgctctcactcccacccgctcgaccaccaccaccgcctcctcctcctcacctcgcaccccgcaaaacctagccccaggtcctctcctcccctccgccttgccgcattacccccagatccaccgcctccggcccagatccaccc

SEQ ID NO: 5673 - DNA, 23 bp, Oryza sativa
aaatcccgaagttggcgcaagca

SEQ ID NO: 5674 - DNA, 2000 bp, Oryza sativa
attggatctattgtttgctaataaataaagcgtccgaaattctctttttgcctgctgcacaacgcacgtctgcaccttggcctttcgcacgtgtgacaaagcgtagtgtctaagacatctaaggtgatcacaaccgctgtagcgctaccgctttgccacatatcaaatcataaatcatatatgaagatgattaattttgttaataacataaaaataaaattaaaggtgatgcagcgagagaataattaagcaccatgggttgtgtttttctcaacactaattagctctgtttaagttgaaaccgagagttgattacataataattataatgtatttgtgttatgtcgtatttggattttgtactatttatccgtacaggtgaaaggaatcattatgttataaatgtgagtgcaatattgacgaatatcaatagaactcttagtacgacaagggtgataaagggagtttaaggccctctctttttttcccgattccatattttggattttttttgcacgctttccaagtttctaaatggtgtcttctttaaacaacattataactttttagaagtcaattcattcgtttataccctcaaatagctatcacataaattatataattcatcaatttcagctatcctaaaccttaagtactacatatttttttcatgcgagtcatggtgatcagtaaattggtgatcaacgratcatcgaagtygtaagatgaatatgtaagagttactctgaacaattgtaaataggtgtyaaaattaattgctattaatyagacatytaatggcttgctagccacaaaattaatttctctctacatatatataaacatrgacgaagttggaayaaatattaccatacgtcccatacatatatattgcgcagttaatattctaattagtcatttaaaattccttaaaatgctctcaagctgccacgtgatactctaataaattagggcaaatattagaaattctaagaaaaaaaagacaaagtatcagttacttgattttcacttaaatcggtaggtccaatattataaaccgttagattaaattgatcttagaacaaactaaatactacgaggtcccacctcatcataggtatgcacctacgtgcatgggtacgtatgcctcccctccctttttaatttttctctttcttctttttttttcccatgcatatgcttccctccctttattactatatcatgcgtcttcatgagatgatttaatcaaaattctagaattttgagtatcatgcactcacattttttatttattacacgtatgtatatagatggactgtatgataattaactagcaatacttttttatttactcgagaaaaaaaacatgattcaaaagttgtaattacttaatccatcccctattcaaaagtttgtgaatggttttctaagatacctcgagaaaaacagaacctttaatttattataaaataacattatccaaactttagtttgccctaaatttatgagacaaaatttctgaacaaacaataatcttatcttttaaaaatataagtgcacacgcgggccaccttcctagttatcctaatagtaacattcttaagccgaacctttcatttgataattgtcacttgttcttgattgcaattttagcatcgcggaaagcaattctcttgcaggtggcaggtgggatccgccggctgacatacgctgtcactgacatgcgggacccctggttgagcacctcaatgtgcttcggatttcatttcacactataatcgcgacaggtcctcgcctcctcggtcgtttgcgcagcctctgttgaagagcttgttccgttttttaaaagacatggcatctcaacaatactcctgattttctactactgattttcccttcgtcaagcgactccaaaacgtgccccatatctaatctgtctcgcacgcggccggcggcggaagagcagagcatcaggcgcgtgtggatagccggaggac

SEQ ID NO: 5675 - DNA, 2000 bp, Oryza sativa
taaataacactctcttaaaattttattctcatttaccatcgactcgagtggcgaatgagaatgaaaatagtaaattcggcattgcaaggaatgccaatggacgggtggagtcattattttcagctgctgcccagcctacggttccagcttccaacagctcgagaagagtgaagagatggcaacacagacacaggaaacggtcgcgcgcgccacagcgacagcgatagagccgctccgcgtcacggcttacgcttccgttgcgacaagctcgcagcctcgcacggacacaacgctatcgacgtggtgtcgcgtcggcctcagcctcgacccgaactcgtggagcgcggagcggaagcgcgggcagtgacaccacggggcggccggcggcggatgctgagagtgtgtccccatgcgttcggcatctcgcgctgcgcggggcggcgggggtcaaaactacaccgtgtgcgatgtggacaaaaaaggtttctccgttttctcctttaggccggagattcccccggccgaatccggcgaatcggcaaaagcggccacatgcggccaacagttggtgcacgttattgtcaaaaaccagtccttacgcaagacgccacgaggtcaacccggagaggaactacatgaatgaataacaaagacgtgattgaaacaaatacggagtagtacgtggttaggacctctattatcgagtaatgatactcgttaggacaagagacaattgaagcaagtagacgcaaaaacgtactcctcctagaggtcacgctagtactccctccattccataatataaggcaccctttgattcaaagaaaattcataggaattttaaagaattttatttctatagaaatttttactatatagccctgtgaatcaaatgaatgaatgaatcctatagaatcctatgaaattcctatggaatgcctcttcccatgcaagttttggagaaaatttagcatgaggtaaaacctcatgttaagaattctttgagtctttatatctcctcaaattcctgtgttttttctacagctcaatcaaatggtcattcctatgttttttaaatggttattcctatgtttttcctgtgttttgtaattctctgttttacacttgtattcctatgagaatcctatgtttttcctattcctccgtttttttcattcctatgattcaaagggggcacaaccactttttttaaagatgtttctaatataagacatgcatgtaagcatgcaattaactatgacatctaatcctattggatgcatacattatatttattaggataatccaaattacaagatgataataattatttcttggtctttgggttaagggtggttgtgccttatattttgtaatggaggaagtatctactacctccgtcccaaaataaacacaaccatgagtttctgcgctcaactttgatcgtccgtcttatttaaattttttttatgattagtatttttattgttatgagatgataaaacataaatagtactttactcgtggcatattttttttagttttttttaaaaaattaaataaaacaaacgattaaaattggacacgaaaagtcatggctgttagacggagggagtactaataatgcgcccataatgggctgtccttgtcacgggctaagctatccacacgatggcacatctaagccaaagcccccgctattaatttgccaaaccacgtccacctggcgcagacaccacaccaccaccgcaacggaaacacggtgaacgcctcgtcccgaaaccccggaaagccggcgagagctcgagaagtcgagaccaacctcgccgagcggatcactcgcactactcccacctcgccgcccgccgccgccgccgccgggttcccgtgctgcgcgcgcttcgatctccttctccttctccttctcgcggccgttcttgtgcgtgagtgagagacagtgaggtggtgggagacccgtgggaagggagaggggggcggaa

SEQ ID NO: 5676 - DNA, 2000 bp, Oryza sativa
tgcggcgaaarttggtgggcggtttccgtgctgggagttgaactggcgtttcggtttttcaaagaagcgttggggscatgggtggacggcgaaaggtggcgcgcgctctctgacgagagaatttttggtggaattggtgcgcggtgacgacgccgggttggggttggggtcgcgttgcgcggcgtcgggtgcggtggggcaagccaggacgcggtcgcttgcgtgcgtttgcttgcaaagacggcgaaaattggtgggctttggtgttggtgggcactgcacacagaaatttgtgattattgattaaggccaagttttttttctcaactccaaattttaactttctctttttttttcattagcatgatttttaagcggtacgtttttttaagataataatagaagttgtttgaaaaattcaaataaactatttttaaaattttaattgttaatgcttaattaatcatatgttaatgaggtttctcgttttaggtgtattaaaaatatgccttcaaaattgacgatcgatcgcagcgagtcgtgcttctatgcttctaaagaaaagaacgcacgaaaattgaagtgcataaatggctcggattaaaagttactccagtttacatgacaaacatcattagagaggggcattttcgtccatggaaaattttttcgcgaacacaaatgagaccaatctagaaaggactagattgattttgaattaagaagggggttaggctcaaacccggaccggctagctcgcagcttgtgttgctagtcgggaagaccccggacctttctccatgggaaaattcagtccatctccagccatgcccgtcctggcgccgggagctcgcgctgctcgaggcgacgcgagcggcggttggagctcgaggcgaggcgaggcggcagtggcggcgaaggaggaggcgagcgcggcgggcgacgccatgcgcgacaaccagccccagcccgcggccgcgcccgcgatgaagcggaggaacagatgggaccaatcgcgtcgcttgtcgtcgtcgctygcgccgcgcgccgtcgccatttcccctcgagccctgcccgtgccgcgcgccgtcgttcgtcgcccgtcgccgtcgtcgcctcgagcctcgttcgcgcgccgtcaccccgcgccgccgcctggcctcacctcgagcagcagcgcgaattcccgctgccgytcgcctcctcaattgccttgccccgccgccctaccacctagtcctcgcgcgccgccgaccaccgcgcgcccacgacgaggaggagcccgcggtggcggtggtgtcccaccacgtgtccccatgcgcccacgatgaggaggcacccgccgcgtgtccccgcgcgcccggtcagcctccgcctctgtcgccactcccctccgtcgcctctgccgcctccgcctccgcgtcgacattcgagccgtcctcgctaaccatcctcgctgtgcacgctgcatgagccgcgagagagaaaagagcaagagagagaatagaaagagagaggaagaagagtatggcaggcgggtctcacaattttttattaaaaaaacgctgactggattgtcacgtgtgcgccacgttggacaaaaccgctctgaattggtttgagggggataattcgcccggtttgcatagttaggggtgaagaatatccaatttttttggtttaggggtaattcggatgactgcaaaagtttaggaaggtaattcgtgctttttttccctacaaactatgccccgtccactcgacacaacctgccaccataacggtgaacctgaagcctcccgtagtctcgtggccgcgccggactgccgggacaacctagccgagcgctcccgctggccgctgcctacagtaaagcagcgcgctgcgcccgcctcgccgccgcctccgcagggtccccgtgccttctcgcaccggcggcaccgctcgatctctgcgtgacggcgtgtgaggctgtggggtggtagtaggggcgggcggag

SEQ ID NO: 5677 - DNA, 680 bp, Oryza sativa
gttkrcacmaattaaatccttaattgaagccatggttaatactgtgcattaagttgaacaaatccgggtggttacagaatatgctcagcgaatgttttttttttaatttttgaattttattgcattattgatttgtactgctccagagggaaagggttgcttttccacaagtcttttactagctgttgaactcgcagtagtcgtactagcactgagtcttttcaaggccattgctcatgggtccccaacaattaaaggatgtacaattgctttgcttccagtggtcacatatactagagcaagatagtaagggggttaggggttgaaatagaggacctgtgtgtaagttagagtgaatcaggaggggccttgtggatctccaagaactgctctacttgcccacttcacttgcttggtccaaggtagtggtcaccatcttgattgtattttcttggttttcttgaaatctttgttgtcgttgttttttctctccatattttgatgttagatgtgatgtaccttttgcttgccttttccccctcaccctttaattaaagttgaagggagtggaagtgattcacatgcctttcttcctggaatgccaaactaatggtctttggatctttatttttatttgtcttggtctgcaataagcatttagcttgactgttgattaacac

SEQ ID NO: 5678 - DNA, 2000 bp, Oryza sativa
actaagcaccacttctctcggtttcaatctataccgtgatattccmtacatcttggtgaaaaaaaattgatgtgccggattgaagatctgtttgcaaaacggaacctacatgtcgagagcattccatttttatatgattttaatttttgggtttatacatttgcatttgagtccctgtaatttttatatttacatttgagtccctataatcttgcaataaggtgcttttggtcttttttttaaaaaaacaataaataaaagggatagaacaaaggcagaaatgtgyataaaaagaaaaagaaaagccayacaaaaaggaaaataaacaaaaaacaacaacaacaaaagtctatttcccctaagtggcgaaaaaaatgtacatgcaaacggaaaaaaaatccgattcctatgaaaggcaaaataaaatggtgaaaaaaaacgctagatctgatttctttaaaaacagaaaaaaagtctgattcctataaaggcgaaaaaaatccgaaaaaacatttaaaaaggttcgtccgattccctaagaaagtggcaaaaaaatggttcgtcaaaaatwaaaagctggttcatataaaatwaaaaatgcacgcgagaaaaaaatggaaagagcgaaacaaagtctaatttctaatcagtataaatctcttctctactctaatctaatctaactatttaaaaataaaaaatacacgagaaaataaaaacggtcaaaaaaacgtgtgagaaaaaagtcagaaaaaagcgcaaaaaacacgctcaaaaggtttttccatcttcttaaaaaaaaataaaaaaacgcgtgagaaaaattatttccattgccggcagaaacattttaaaaaaacatgcgaagaaaatactgtcagaaaaaatacgccatttctaaaaaaaaaggtttgaaaaaaccacgcaagaaaaaaacactatctatataaaaaaaatcgctytgaaaaaactgtcagaaaaaagctaaattgatggacgyttgagtcagattkgatccatckattttttaccatctactacacggcttttaatttcgtcatatattctcatgtattggaaaaacgcwaaaaataacatttagaaaaaacaggcaaaaaargcacgcgagaaagtaattgtcagaaaaataggcaaaaaaacacgtgagaaaaacaaaacmaaaaagggagaaaaatatggttttcgtcataagtaaaaaaaggaaaaaaaatatgctaggaaaaaactgttagaaagaaatgcgctatttctgaaaaatgatttgagaaaatcgcgcaagaaaaaaaacaccgtttataaaaaaaataagccgctcattaaaatacaaacattgtcattgacatgattatgcatgaaaaatgtatattatcattagaattttttcacccgttgcaacgcacgggcatttttttgctagtcattataaaactaaaggtatgaaagggagagactttgtttctctttctcaaaaagttaaaatattcgtatttaagacagcacattcaaattaagataagactctcaagtgcatctccactgacaggtggcccccctagaaaaactaatttcctactccactgtcaacgcttccgcgcgcgggtcccaccccaccaccacccatcactcgcgagttaacccatcgctttttaaacaccccccgcctctcttccgttgcgattctttgtacgtwtccttccccttcttcttctctcccacgaggtcaaaccagagagagagagagagagagagagagagagagagagagaagaggagatagaagccgcagccamacgctccayctccaatgccgmgagggccascgctcscgtccaacgccgcgccgycttctctccccctcatcyytcgcgcgcgggttstagggcttcgccgcgtawstcgcgcgtttctggtggtgggtataagaggaaggggagagtcgtcacagggaggagggggagaaggggcgcgcggcggtggcg

SEQ ID NO: 5679 - DNA, 2000 bp, Oryza sativa
aggcggaggggagcgcggagaggtcgacggtgacagccggcgggaagaaggcgagcgtgccggagattgagcagaggaactccgccagtgggtccgtcgtgaaagacgacgatgacgaggacatcggcagcttggagggccgcgtcggcggcgaggatgggcgccaccacggccaacctctcgcctgcggcgccggcgttgttgttgtcgtcctccgtcgccttgcccctcgtctgtgccgcggccgccgcctgctggagccgcgtggagcgccgccttgcccctcgcctgctccggccgacgccgctctgccggcctgctctagctgcggcctgccccgccctgtcccaccccgctcagccggtcagccgctccgccccagtcgtcgcctgctccggctcggagagagaggaattattttttgtgtagctgatatatggtcccacgatttttattattttttgggataaaattgccatgtaagcgatacgtggatgccacgtgggacgaagacatagtcaaaggagctacgttaggcgtctcatcggccaaaaccgcccttcataccaccgagggacctcgtttgcccggttttcgtaagttgggggatggatcgtattcggttttgtagttaagggacgaaaataggactgaccgacaaatagagagactaagggccagtttgttttgtgaccaatgtttttggtaaggccaacatgtgtttggattgaagccaaattaaactaatttggctattaaaatggcctatgttatataggcatgtcaaaaacatacacaattattgttaaggttgcaaaaaaatttgacaagcctaatttaggcctgccctaagtgacgatatgcatggtcccatggccatatgctaccgtgttccggcccatgaactacagctaagggcctacataggtgatgctgtcagcctgccacaggcacagcccaacggctaaccactgtcgagcctctgcacgaacaccggactggcccggcacgcatagcacctgcgcaaacagagggaattttttttccatttttcattttttattttttaatatttacagaaatattgtaccgacgaaaatatttacagaaatagaccctaccgccctctctgagagtggcagggtgacgcgagggacggacaagttgaaaaaaaaaactagaaaatatatttttggtagggcgaaaattgcatttactcccttgcagcctttgtaaagggcggcaaaggacctaagtgcaaaatgcgcacaccttgcagccctccacttggacggcaggggccattgtgtaaatattttggatggtataatatttctataaatattaaaaaaattaaaattaaaaatgaaaaaaattcctcaaacaggctcgtacaaggctccttccatctaccatctctttctatacgttccaggtggcgaaacgtaagagaaaaaggaaaaaaaaaaaagcaaaagccgtctccaagaaggcacagacgctatacataactccagcgttttccacttggcgcgggaacccgctcgagcggtcgagccggacggaccaacctcccaaaggaaaccaaaagaagatctcacgtcgtcgcacccaacccaccaaccacccgccgcacgaaacctgcgagcgaaccgagagagatcaccatccccccgcaccgttctggagacgtcccgtgcgcgcgccacaacacccgaaccctccacaagccttaagcccggccccgagccgaaaccgcctccgcctattcgcgccacccacatcacgcccctactcgaacattcgtgaacgccgcgccgctctgctcctatataagcaaatcccctccctttgcctttctcccccaccaaagtcgagagatcgaagcgaaaaaaaacagagcaaaatcgtcccagcgcgagcgaatcagaagagcaacaacacaactcgatcgttcatcagcggagagcttgatttgatttgatcggaagagaagaaag

SEQ ID NO: 5680 - DNA, 2000 bp, Oryza sativa
gaatcatggaacatgtctgattgtatctacagccgatggaacatattttagatttgtcttattttattcatcctacaccttacaaccaattcggacaaattgcatcggctaggtttacatgatacgttatcagctcataagccgaccggctatcgtaatttaacttgattttcttgtttattcttgtttgttgtagggtcaaaccaattggcacgtcctgaactcgaaagcgagatttggatctgcactggagctaagcataactcccagacccccatgtttttttcatcaacaggaagcgaacgacctccttggaggcatcgttcacgaggttttgtttccttgcctgatgagcttcgatcctttgggtaatcggcgttctctcgagtcattatcatcaggtttgtgtgagggacgagtagatcttctctctcgccctctccctcctcaggccttctacctgatgatgatcgggagcccatcgatgatctcctggtttggagccctactcggaggggcgtttgcaaccctgtgtaggattagcggtgatcggtctcgcatagcggcgccggcggtcaatttggtgctagtgcttctcttggggtgtgtaaggactaaggagtcgctagcacgtggtgatttttttttctttttcctgattatagccttcgaggacggtaatcttctattctttttcctcctataccgtgtgggtcgtaaaaaagggttgctttcagctttgtcctgtttcattccaaaccttacaattttgttggagatttagacttgcatcccaagttttagaaagtcatctttcttccgagtcaaaattgctgactgatctcggaccggacaacaccacgtcttactttttaaactgacgcctacaaataatgaattaggatgcaaatcacattaggtatttgtgccttggcatccaagaattgggcggtacaaacaaaacaagtcaacacgtcaactgagtaactaaacgaaagaattttcagtagtgagttgctagaggccccttccactgatcgaatcgaatccgtccaaacacattccaaattccactttaattaaattaacattaaattaactccctataagttgaacaactaatccactttcttcagccctagattgcaaacatcagcccaagaaacgtccccagtattttcccgctcattgctaaattaagtttttggttttcagtattattacacaatgattaagttacattcaaaaccatcattttcacttttcagaagtgccttcacaaagtaatcctactttttttatttctttccaactaaagcttgtttctcttttgaatattctttcgtgatttccagtgcacacacactggaatacattttccccacacaaaccttcgcagctactgttccattattgcccataaaatttgatgatttgacactatatttgttgccattttgattatgttgatactcgtgactacggtatatgtaccatcttagtcaacaataatgtattaggatgttacaaaatttactattttataaaaccctgtctattatatattgtggcacgtaatctcaagtattatgttcactagagttttagaaaaccaaacagttagccattttgattttgatcaagcaaatgttacttccgtttttcaaaattttcatataggagtaatggagtatgtctaaaatagttaacggcgtggttttgtgaaactttataaccataatattcgaggttatgtttcacgtgctaaaattcctataatttatataacttggaccatataataagtgtgatagaatttactcttaaataatggaagcccagcatgtggagggtaaaatgaatcacacctctccgatttgaccgtcacaaactcgtcaacacaccaacttattatgctccgtataagttggacaacgaatccaccattttcagcctagcatcagcccaagaaacgtctcacagttggtgattcgatcgac

SEQ ID NO: 5681 - DNA, 2000 bp, Oryza sativa
agggaatccatccagggtccggatttaattcaaccgatgcatacggagagagagcacctggttgtcgcggatcggatcgaggcacgcagcggcggcgtggatgtcgtcagcagccgtagccacgattggggatggatccagtcttgacttctcccccttcgctaggtccggcgaagaattcsggggcatgcgctagatcggacgggagccagcggcggcggtggtggctgttggaggttgggggcgcagagcagcggtggctccggcaatggcgcacgacggcggcgaccatcgcggcggcggcggtcgcaactcggctagtgggcttaatgagaagaggagtgtatgactgacacgttgggcccacgtgtcagttgatgccaatgtagttctacggaattgaggatgaaaatacatgccgtgtttagttcgcgtgtgccaaaattattttgagtatacgaacatatattttaattaagtattaaacatacactaataataaaacaaattataaatttcgtatgtaaactgctttacgaatttattaaacctaattaatccgtcattagcaaatgtttactgtagcatcatattatcaaattatggcgtaattaggctcaaaagatttatctcgcaatttacatgcaaactgtgcaattggtattttctcgtccatatttaatgctccatgcatgtttccaaacatttgatgtgacggaatttttggaagcgtgaaggaaactaaacgctgtcatagtacataacaaccaccttatcatttctactccatccatcccataatatagcaatctaaggcctggtttagttccctaaaattttttcccacaaatatcacatagaatctttggacacatgcatgaaacattaaatatggattaaaaaaactaattgcacggttatgggggaaaatcgcgagacgaatcttttgagcctaattagtccatgattagccataaagtgatacagtaatctacatgtgctaatgacggattaattaggctcacaagatttgtctcgcggtttccaagcgagttatgaattagttttttcattcgtgtccaaaaattccttctaacatccggtcaaacatccgatgtgacactaaaaaattttcttttcgcgaactaaataaggcctaaaatcgacattcattgtactataaaatatttcatccgattttaggttgttatattgtgggacgaaaaggagtaattgatacatattttatcttggttttttaagatgttgctctaaaaatattaaacaaatttatttttaaacttataataattaaaactttttagttaatgtggtaataattttcttattttaggtgtgttaatttaatctttatcaggttcgaacggataggtccatgaatttgtaaaataaattcattgaaaatcatgtccaaatctcggttgaccggtccggcaatgtggcgctctacagtagtacacagtatcagaaargaaaatatttactgcagtttttcccttctctttctcatttatttccccttttgtcataagcacacacattatattttcttctacataagcaaaaacaaaaaaatgttgagggaggttgggagacgatcagaaagcatccccagccgttcatcgcccatccgaggtagaaatttactatttgccactctctcaaaataaccagtgctcaaattccactctcccaaattttcattctcaaataccactcgggcccacatgtcagccttactcattatcgggtcccgcatcacttttgtttgaatggagagtgaggctgacatgtgggcccgggtggcatttgggaatgaaaatttgggagagtggcatttgagcactggcattttgagagagtggcaaatagtaaattatcccccgatccgacggctcacattcactctcacctcacctgccctcgtttcttccgtcccctacacacctacccgaggaagaggaggaggtggggtggcc

SEQ ID NO: 5682 - DNA, 2000 bp, Oryza sativa
tccttgtgcataatatagtaatattgtttgtctctttcgctatattttctactcttgttgccttacttattactcgctgatttttacgctggtccactcttactcttcacttgatttgcatcagcaattgaaaaacttctggaaggatgtcgcagtaaatatgctactggagatgaagtccaattggtatgtgtttttaactgaagattttttttttcttgatggacagtacttgttttgtcttggcaatttatttcataaacagagtgcatcattgtaattaatattaggatcaccatttacatatgttttttcgtccatacagtattaaactactcatcacatctattcccatcaagctcctgctacacttgatacagctaatatcactgcactctttactgaaaattatcgtcttcgatgcttaaaccactgcaatatacaccggaagctattgcctactcttttctgtgtacaggcggatgtgtttctagcgccccagattcacgcaggaataacacgtttccaaattgatatggtagggaaattctcatatgctgtccttcattttaaaatcattgtcagtcttgagaaaactttttggactacctgctcagaaactaacgatggcaattatttttttaattatcagtcaaaatatccaattctggcgagattttacaaggcctatatggaacttccagcatttcaagctgctgtccctgaaaaccaaccagatgcaccttcatcctgataattgaagggtgctgctccatcaagatgcctgcggtaatcaagtatatgatttttttttagtcatacatgcagattaatagagctgctggtttttccagtatctatagaagcaccccaatttcagaaaatctaaattaccaatttcgtttttttttcttttttcttttctagtggaagtctgcatttctgcaagtctccatgaagtatacccacgacatcatgcatttcaagctgcacatcctcaaaaccaaccagatgcacctctatcccaataatcaggattccaagcgagccgtatacattgatattcatgtaacttttacttaaaaaattggatgagtagtctccagtgccatacatgtaatttcagtgtaaaatgttcagtgtaaacaagatagtgggacatgaattacctgtgacccacaacattatccatccagtactccagtacctagggatatggtattgttgtatatgtaattgatgatgcactgtctgaacttcagatgcagtatgtgattagtccactgatgatgcacatacgtatgcactgacgtaagcagaattgaatgttggtacacatgtaaacacctcaactattactgaataaactctcatactggcctgaagggttaaatgagcaacatttttataagcagtagattaaaaaaaagttgctctgattaagaaagggtgaaaggtatcatagtttttgtcttgtctgtttcctctgcaatcggtccaactgctgactactccctacatctcctgatttctggatatcttgtaggccccaccgagctgctatcatgaggtgttaagacttggccagtattttcagagatatccttttgcaattcggtccttttgtaaaacttattttacaaatatatcctccgtgaaacttattccagaaatagaggttggtgttagtgcgagacctgggttccattgaggcaataagtttcaccgaggaccctattttgtgaaatgagttctgaaaaaggaccatcttgcaaacattactggtatcccttctctccatctctttgctcacacctattatccaaacagtagagactactcatcaaagtcaacttattcctatatacatcatccccaattttctcttcattcataattcatctccacattcttcattctccattaatttcacggtttcatctcgacatctcatcatctgttttaagttgctagctgaggaggaggagcaggtgccagca

SEQ ID NO: 5683 - DNA, 2000 bp, Oryza sativa
cactcatcagggttcaaaacctagcacctacaaatattatgcatacgttagtgagctttcaataggaatttagtgagataagagatatgtcgctggtttccatatctttgagtgcatgggagggggtgtatttgcgggtgtgcaagtggtgtttgtgtgtgtgtctaccggataatcacaaaaaaatgctattacgttttggacatcttgtagaaaatttctgttatatgatgattttgcaaatggatcctcagcgaaaattattttagaaatagaccaatgttgttaagtaagttttgcaaaaggaccatatggcaatggcaaaaagtacaggtatcttctgctgtcggcttgtctcttttgctgacaaccacttgtcgaagggcagaggcttcaaacggcatattcataatatccaaatacagcatcctcaaatttctgttttttcttcttctcctcattcttcactctcaaatttcacctgcaccttctacaatatctcatcatctgttacaagtgatcagaaggagcaatggcatcgtttgaagccaatcaatattgccctttaagcagtctaaacatttccagagatttacagaacataggaaagttagaagaatatcgataacaaatgtccaaaacatcattcgacaaattccttgacagatcctactggattacatttcttttctttgagaaagggaagcaagaaaggatcatactttgtttatacatagttatattctaggattcaactagataatgacctccacatactttaatcaatccaccgcagtcacacatgacctgttgtagaactccaaaatcaactattggagcgatttgtcgcaactgacatggtgggcatgacagatcttgttgaattccatttcagcacaatatactaccattaatatattatgtttgcaatcaccatgctgatgttggaatcaggttgaatttcaatgagctatattgaagaaatttgaactggaaaaatgccaaatcgaagatagacagttaatatcgtactaatcactattataaatgtgatacgaaattggttggatggttttatcagatacgattcagtcgaaatataagttcatgcatccacaagtacaagtgcttctgaaaacttagctattgctttcttttatttccttctcttctccccacttgcaactgctaacacacatgccaatccttatgattgaatgcatagacccattcaattaaggtcgtgccaacttgttttcaactataaattgcacaagtataaatgcttgacaattgcttatagctactaattaagaactaggaccattaggagggatatttcttgcaattgtctgtagcttgagctcatgttggcgataaacaactgaaaaaatggtctcacaaaagaataaaagaaaaacaattagatatttagatgtggagcaattacacatcatccatattttttccctcaattttatactactcaccgtacttccttgtacctgcaattcagtcccttcttgtttgggtcaaagactcgcatgcacatgctcttcaaccttttctcattcagaaactatcttatcagcttaagtgattgcgatgtgttaccaaaaccatttaactcgaatggataaaatttatgtgataccaacatcatcaaatttaatgtataacagtttagaaatttatcatgtcgttttccggaaacaaattgcagaccgttgactccatctgggtcttctcccccatttcttgtacagtttttctacacccagttgcacgcaggttacttattggatcaatcatgcatatcaatgtgttgacccgttcttgatgcatatacaattgtgtgtcatctcctaccttacattaacaactaatctagcctgttgcagttcaatcagagcttctgaccttgcaaaaggatgagctgctaaaagcatttcagtggcagctcaagagagagaagagagagaaatagaaactgcccaaac

SEQ ID NO: 5684 - DNA, 2000 bp, Oryza sativa
aatacattttagatgaatttagacacatattatacaaaatttaaaacttacccaaattgcgacatgttggtacagagttttatctctccattgaaagggtatatatatatacactaaaataatggtggaagtatttattttttttcaagcaaccacaaaactagagtgacttagataaaaccatgaaactagagtgtaagagaacaaatgccataaatttagagtgtcatgtaacaaattttatcgaaatttaatttcctgagttagattgctggcagagaaagggaaaaaaaaaacgctgttctctagcctctaggtatatatgcatgcatatatgatataatagtgcggcaatgaatccaacttttgtgcacgtgttagtttctagatggctatgaacaaactgaactactccctccgtttcaggtatcataacatgttttaactttcgtcaaagtcaatctgcttcaaatttgactaagtttgtagaaaaaataatactccctccatctatttttgatagtcatatttcatcttggcacacagaccaacgataactgattctacttatcatccatctaaacatgctactagtcattcctcgtaaacaagcgatcattaatatttacatttctcgatactcatgtagccaatcttgtgtggaagaatgaagagtcacgcattaaatccaagaaatccattaagatgataagttgttggattgaaatatgcctatcaaaaataaatttttcagatttaaaaatatgactatcaaaagtagatggagggagtagcattttcaacccaagacaaatttattatgaaaatatatttaattattgatttaatgaaactaatttaatattataaatattactatatttttctataagcttaattaaatttgaagtagtttaacttttgacaaaagtcaaaacgttttataacttgaaacggagggagtagctagctactagtactattatataccgtgtctaaaatctcagakwmtctctgcttgcattgtgtgtacgcatgttttttagattttccatcgtgtagacaaggcatgggcaatgtcaacgcttggtatgcattattgccctaaactaatctcaaacaatctaacctataagcaagcagtagaggctgcattttttaaaaaaattttcttgtatgcatgtgggattattagagttttgcttctacgtactgctcccttcgtctcataataaataagggattttgctctttaaatttatcctaaaatataatagattttgaaatccagagacaatatttatattctcccttaccaactttatttctttacattttaaagtaacttgttttcgttaaaaaacactatttaacagtttaaaatgcattgataacaaaaaatcaagataaacttatattctaattaaaaaagaacaccgttttacaatcgcttatactcgacacacacacatttcaagattccatctttaaaacattttgaatatgaattgaattttacttgctaaaaattatatcattgaattgccatttgaatttactttcatatgttcataattttgttaatatataataaaaaattataagataaccgtatcaatcttaaccctgtcttatattatgggacataataataataaaaaaaaatcccctcttgtgtcttgtctcgaccgacttgtagcagtagtagtatttgtaaccgccttcttcatcgtctccttctcctaatcctcttctgagagactcctcctcgggtgctgacgtggcaccccggccgacgcggcctcccctatatatagcgccccacccccacgcggctgccgagtgtggctgtgcgtgtctgattcgtgttcgcttctccgactcgactcgatcgactcctccctcctcgccgtggtgcggcggcggcggcggcgaagcgcattggtggtccactccggcggcggggggagtgagaagtcaccagtaaggaggagtagagg

SEQ ID NO: 5685 - DNA, 2000 bp, Oryza sativa
ttcatgtgccatatctatctcccctcttctgtactgtagtagtgtgtaatttgagctatggattcagaatcatcaaacagtcggcaatggttgttgagcaatcgcgactacaggccgttattttatccccatattagaactatagaatagaataaacacgcacgtacttttcattgtaaactgtagcatcacggtcctaccaatattctactcctaatcacgaaatctaccaatattctaactcctaatcacgaaatccaggatctgaaactctgaatccagcaacaataatgaaatctcaagctctgaactctgaagcagatgtggagaaaagccagctcgatgtgtgtacgtactcctatgtaggagtatcaaatgtatgattgattgaagccgtgttctttgttcttatcctcttctttcgatggagtgcatattcggacattcagtttgatgtcacgggtgggcctctttttcgctttggaattgcatcaaccagctcagaatctgaacgaaacatgccaagaagaagcaggcgcatattacaaatggatggcgattttctctgaatctgccgcaactttgaggcccggtttagttaccaactttttctttaaactttcaacttttctattacattgaaattttcctacacacaaatttctaatttttccatcacatcgttttaatttcaatcaaacttctaattttggcgtgaactaaacacaccctgaacagctgaactgaattcgcgctcgtagagagagagagagagagaggggcacatggaagcaacatgtgccaaccattgcatcctatggtgagttaggtttagattgttactaatgtaagactcggttgattttattaccgttttcaaactagagttggacaaccgggcgaatcttttttgtagttgtatgcagcaattcttggagagatatacaaatatttgtgttgaactttgtttgtttatagcgttgtgctttgggtactacattttcctcttgtttcatcctaacacacttatgataagatcctttataatgtagtaagattttttaaagcaattttaacgggaactgaatcagtattgtgaatttttttgccataccactcctgtgtttcaagggaaaattaagatctatactatatttaaatgcatccccttgcagagtcaagtgtccctaaagtccattttcagcacttgaagtttttaatagcagatcagatgtagcttctgttggtgattactccctcagtcccataaaaaacaaatctagggctggatgtgatatattctagtacgatgaatctggacatatgtatgtccagattagtagtattaggatgtgtcaaatcccgtaataggttggttttttataggacggagggagtacgcattgtgtgtttttttctaccctgtaatttcaattcataagctgcaaattgacctaaacatatgctttcctctgttataaatatttaacgttcaagataagaattattcaaaatattaacatttcaaccataaaaaatatctcacatgtttagctcaaaaaaaaaataaactgcatataattacctcgaaaaatgctatcataacagtatcatgaactttactatactccctctgtttcaggttataaaatgttttgattttggtcaaaattaaattgtttcaaatttgtctaagtttatagacaaatatagtaatatttataatactaaattagtttcaccaaatcaataattgaatatattttcataacaaatttttgttatgaaaatatattcaattattctactttttctacgtgttgaaaatgttactactttttttctacaaacttttttgacgcgcttttttctacaaacttggtagaatttaaagcggcttgactttgactaaactcaaaacgtcttataacctgaaatggagggattacaagattaatggtaaaaataatcttaaagatttgagccaatcttgttccaag

SEQ ID NO: 5686 - DNA, 2000 bp, Oryza sativa
tctaataatatagccggtagttggctgcaaaaatctacacatcgactattagagttaaccacaaaaatagatatatacaatagcttgttcatcgtttttctctacacgactgcctatgctttatttatactttgatttaatgatgcatgtcatcagcttactcaattcctaacccattcagtctttgtaacatgggtccacagataatcttgcacctttggttcaatgtaagcatgtgacagagcattgtttattgtgttagcgctagcgcttaaataagcgtccggttggctctctcttcccccctctctctcttccacgggaagattttaattacgtggatgattttgccgccagctgactaggcttattgtactctctctaccagcactgctcctagccgcagtgctgctacatacccaacccagaaccagaagcttcacccgttcgccgtccacgcctgtctcctcatgaccaaacccgacgaccacgacgcacgcgctcacgacgcgtcgtgtgttgtgtacttgcaccgcgtggttgagcgctgtgatggcggcacgtacgcgagcggacgaacggcacgcgggtgccggactgccggtggtgtacgctgccgcacggacgcggagccgctcgcggatctatccgcgcgcgagccaatcggtcgcttggtgtagtgcactgagctatacgcatcttctagcaggacgtctcgtatttcgtacttcctcgacctaaaatataaaaatctaaaatcgaacattttatactacgaccagatagacagtttaggctgtgtttacaatcttgtgtttacatcatgcacggtacgcacgaaaaacggagtggtctattagcacgtaattaattaagtattagctttttttaaaaaaaagattaatataatttttttaagcaactttcatatagaaactttttacaaaaaacacaccgtttagcagtttcagaagcgtgcacgtaaaatacgatggagaggggttgggaacctagaattacaaacacagtactaggatggtctttatattttgcgatggagaaaatattaagtttatttttagaaaacgaatagatgatgagataaaatacatttcaggattatgaatttaaatgtatttatcacataagttactgtatttttaggacacctgttcgtttcctcttaaattaaatttgagaataaacttttggattaaaatgacacgctttttaaactgctaaacggtatatttcgtgcgaaaactttttatataaaagttgttctaaaatacacaatccatctacttttgatagtaatatttccaaacctgaaatttttatttttgataggtatattttattttaacaacctatcatcttaatgacttttttggatttaatgcatgactctttattcttccatacaagattggctacatgggcatcgagaaatgtaaatattaatgaatcgcttgtttacgagaaatgactagtagtatatttaaatggatgataagtagaattatttatctttggtctatgtgtcaagatgaaatatgaatattaaaagtagatggagaagagtatcatattaatcccattttttaagtttataatgattaaaacttaatttatcacatgttattaccacctcgtttttcgtagaaaacttaatattcaccttcatctccctattcagaagattcaaacaccaccattctgacaccgcgacgtgatcccagctgaaaaactagtaaacccccctgtccaactgctccacctcccacttccaccagtccaccaccctgcggcatacggcgcgtcacgagcatcggcggcggaagcgtcgccgtcgttgttgccttgcctcgcgacgccgctcccgtccctctcactctcccgtggaccgtgcgcgctctagctcgtgccttcttgcggagtttgcagtgcgcgcgtttcgtttgcccgcaacagcaaggcgaaggggggagagagcaagg

SEQ ID NO: 5687 - DNA, 2000 bp, Oryza sativa
cctacgtacaccctgtccatgcgaacgtccatcgccgcatggggccaacacagtgtgctaatgtacaacggcttcattttcacgtggcaaagcaaaggtggctcttttatttcttttgtgaaaactccaaatgtattgttatggaggtgtcattactaaagaaaaaagaaattatcaaataccttaaaatatacatcgatcgtagtagcatgacttaaaataaggggacggtaatgataaggggcataataaccgcaccaagcttaaaataaacttaaacaaagattttttaaaaaaattgtcgggttttcttactatttcacctgctagggtacagtaaccccttatctccttaaggtttaaagaagacacatacaacgttatgagcatgaaggagtattatcttttgccgatctagatttgaggattgggtagtagaccgtgaggttatcttgggtttctccacaggcaaagacaacctctatttgcgacatagtgaatcgcttatgtattgaaaactgcgttgagtttcctaacatgtattacctgtctcgttattttcttattagctcattagctacaaccaaaaattaaaatttaaaacttgattttggatttgattttcatcccagtctatttttaactggtttttggacatctaatgatacatgtgctaaaattttatgtataaattatttttaatatttatttatttatatcatgtcttacatgtcgtagctagaatgacaagagtctaaattaacttgacttcgggataaaccctacattcccctccttcctcttttcggttggtgatcagttgagtagtggtttgggatctaggagaggtgttagattgtgagaagagtcaaaaagacagatgagctaatggtaatagatgataccgagaatcgtactgttagaatgaaaaacgtgtctattttttctatgctcaaaagctttacacgtgaatatttaggagaaaaaagaatacatctataacatgacagttgttatagacaacataaactcctagagaacaagaaaaactatcaatggagatgactagacatatctatgctccttaaaaaaagagagtaatagcggtgatggcgccaccaccctgtcactaactccctattttctttgagggaaaaaaaagacatgtcagattagagaatccacgacttctcttttttttaaaggaaaatgaacaatattagattaaagtgtcgacacattagagcaaatttaatagtatagcccactactaactccaaatcatctatagccaatgtaatagccaattcatacaatagttgcttactatactattaatacctggtcccacctgtcatatgcatattacgttttagagtccgtgctgcagctggctacagatatgtagcccgctgctctcctctctctttctttatttctttaaaatatatttatagttgtcttataacctgctactgtatctgctcttagtagcgaatatatgatataattaagatatgatatatgcaggaagtaatagtaataacaggtcaacgatattttttttaagttgaaatccctatcaacgcacgctagtaacaagagaaataccctcggtataccgtggtgttacgctactcgtgcagtagtgcctcatcatgggctcgtcgaagcaaaaagctccgagtctccagcaacgtttgccgcggaccaggtccacggagccgcaccgccgcgagccccgccccgtctcctcgtaccgagcgccgcaacgttccgacgcgcacgcgtcgcgccatcactggccgcctccccagcatcccatgtcgctttcccacctctgcccaccctcacatgccccgttaaccagacctcactctcctcagctcagctcaggctcagctcctctattaattcctccccgaccacacagcaccaaccaactaaaccaccaccaccaccaccccccgccgagacagtgacactctccttccgcggca

SEQ ID NO: 5688 - DNA, 2000 bp, Oryza sativa
acggtggcgaactcaatgttcctctgtctctgttgttgccgtcggatggatccagaagggtgcggcgttttcctccggcaggtgccatcttgcttctccggcaagggacgcggcgaggcgcgaggatgcgacggctaggactagcaagcggcggtgtggcggcgtggacacgtggttgcggcggtggcggtcaccggaggtagaggcggcacagagctgtgcgacagtgtgagacagcgagagtcgcgagacagggagagtatgagaaggataagtgacacgccggctgacgccctagggtttttcttcccagcctaaatgcctaatgggctgctcctgctccagctatacaggcccagccggcttccttctttagaagtttgtcgaaaatttgacggaaattaccgataaaaatggttaccgacaaaacggtcggaaaaaagcccatatcatttctactaccattttcggaagagattactgttttcatttccgataccgacaattactgataccgactgaaacagtcggtgcaaaccggaaacggtagccggaattctcggatatttctgtgccgttttcacccctaatctatacgatagttgattccttagttctacttaaacaaggggatatctgaaggtataaatacaaggccccctagaaagagagggacgaaatgaaggcatatctacataaatccaatgtagaagccacaaaaaccgacatgagggatttagagctaccttcaatctcgccgagttcatattagaggaagaagactacactagccatcaaccacatgtgagagctccatgccgctaggccgatagggattagattaggtcatcccatattctgtactcgtgagatattaatatacaaaggcaacattggctttgcccaacaggaacagggctattacccatcaagtagtgggtccgaacctatataaaaatccatgtctaatgtcttttttacctcaatctcacgtataccctaacaccaacgatcaccattctctttgaataccataggcgggcatagtctgtcagcaataacttgtatgtaactaacaaataatggcgggtatccgatttgctagcagctttgcactgaaaaatctcaaggtcgtgcgcttgaatcctcttgcctgcgcaataaatctagcaaaaaccatttgataaacctggctaacatgcataaattgcatatgatgtatctaatacattttgttttattttccacatattcgttttggaggaattttaaaaaatttaaatttctaaagattaattcctataaatgctgttcggttcataaaaatgttgacatagaaaaaccaaaagaaaaattcctttcctacaagttgtacagaaaaactataggaaggttttcatccactcaaacctcttgaaaattttctatgggttgaagtgtgcatacattgttgatctttttttttctccaattcctttggaacgacttggcccttgctagccaagtcactttgacaccttgacccgattcaaacaagggttaattggatacatgccattaaaaatttgctggttttaaaatataccactagtattcatgtatttgaaaatatgccattgtaatttcacacatattcaaaagataccactacttacctcttggatgcatttccagaaaaaaaatagaccaaactgccccttttcccttcttctttcttcccctttctccttcctcctctcttccttctcagcggcgcgttggcggcagcagcagcagatgcggcgcggcgacgacagcagcagcagtagcagcatcgatgcggtggtgcggcgacgagcggcggcagcagcagcggcktggcacagcagcagtggcggccgcggcggcagcagctgcaacaaaaggcggcacggcgacgagtggtggcagtagcagtagcaacatcgacgcggcggcgcggcracgagcggtggtagcagcaacagcggaaccagttggcc

SEQ ID NO: 5689 - DNA, 1537 bp, Oryza sativa
gtgacaaaggaaaacgcaaagaaaaagaaagcaaagtcagcgatagcaagacaagcgtcccagcgagaccagcggcgtggcgtcatctcattctaagggcctatttgtaaaacttctgccagtggaagattcttctattagttacaactgccactaataaataatttaaaatttcaccaaaattctaagaaattataattataaaatccagaaaataaactaagaactgaaaactaagtttaccagcttctctaaattcttatgagtatctaagagcctgttgggggagcttctagctgctgcaacttcttccagaagtagaagctccccaaaaccgttcagcttttggtccaaattttaagaagctgtagttgtataattcagaaaataatttaaaagccagaagctgaaaaacctattttttaaaatttttaaaaactagttattaaattagttgtttctcagtattttaagctcccaaccagtaccttcgtttcttacaccgcatatcccgtaagttaagtcaccaacgacccaccaccagccgaggtcaacagtcatcctgacacctgggcccaacctgccagcgaccccacacctcccccccaacatcgcatcggcacctgccgccgttgcgctgttctcatcagccgcctcgtcgaaagcaacaacaaaagcctccctctctctctctctctctcttgcggcttcagcgcggccagccgagagggaagaagaatttggtactctttgccctcgatcgaagctaccacccatcccaccttgcccttccttcgccgccgattccgatctgggccgccggcgacggcgaaacacaggcaaagcmaagataaaggttcttttcttgcaatctttctcttctccgtcgcttggcggatagtgggtgggattggattgttgttcttggtcacgattcacctcgtatccgcttgtttyctttttggtggattaattcttgggagatgtgtgtggtgtggggggagctgagtagctgggtgcctgggtgtatgataaggttgaaggaaaggggcttccggttttcttcatggcgcacagggattcgatggatttccttataccttatctttgtttccatgtactctccttgttgatctttgttyccatgwactctccttgttgttttctgcactgttcttgcactgttcatgatggtgaaccctctctgtctgtagttgattgttacgagtatatggtagcgatcagaccgtctcttcttctagtgtaaagaaaagagtaaaattcgtattattctgaatttaatcagactaggtgagttggtactttagtttggttctggcccttcatgctgattgcttgattgtgtcggctgctgctacaacttgcacaatttatattatcatgctgttctgaaccagtttgccaacttgtcccatgcatgagagatgagatgagccacaactatttgttaattttgtttcaggtacaactgttgtttggtgcttgtccagctaggacagccgagtgaagtgccagc

SEQ ID NO: 5690 - DNA, 2000 bp, Oryza sativa
atgaacataaatataaatacctatagccatattttaccgaaacgggggatatgctagctaaaccttcaaatatccgtacctataaatccgatgccctggtgctaaccaataataaattctctgtttagaaaataggattaattaagcaaagagtatgttttacattatactgtgtataggccaaggctatagccacttttcacttaatgcaacatattttacaatttattgtaaaattatccttattcacgctgtggatgatgatcccctatccacatcagaagaactatcaactacccatagatctaatgtgctcctctaaattaaaaaaaaagaacattaaatgactaataacagctgtagttatatggtacaatataaacatgtggatgatcgaggaagctaacattgtaactatatattgtgtgtttaaacttacgaaatcattgcatgcatcctgatgaattactctgatttctttacgaagtataaaaacataatttcaacacctcaaacgtgtgtcgcatcgccgtcatgagcacggatattttagggggsyataattaccwtsgacgwtcttcaagggaggaaaccagtttgttcagctagatcactgaaggagaggatgtaaaacgtacaaaaacagaatgagaatgtcatggaacatattagaacgcgttggagtcaatccaaaattagggcctcgtacagtcgggcaccccacacttgtccacgtagcatattgtgtactccctccgtactcgtaaagaaattcgttttggacagcgacacggtcttcaaaacacaactttgacatcttatttctataaaaatatttattcaaaagtgatacatgtatatttttatgaaagtatttttcaaaacaaatctattcatataatttttacattttcaaactcaacaacttgagcattatttatgatttatatttccaatgtttgacttaaacattatcctaaacgaattcctttacaagtatggagggagtatcatttatactcctttaaaagcctttagtagtggtggcagcgaatctaccaccctattagtgcttttgaattattttttttacaaattgcccccataatattttaaatattatagaatagtacaatattatgatatgacatattatgaattttttttcttctgcctatagcaaagcttgtagatgtgtgttagtggatacattcgtggatatttatatgtggtgtgtgtaactacgccgatgttatgcagctacattatctcgagggggaaaaaacctcctaactattggtagataatcaaattaagaccccatcttgttcttataaaaagaccaaaaaaaaccatccagaaagagaaaattctcatctagaagccagtcagtctacatccatgcagctttgatcatttcaatcaggtgattcagaccaaagtcgagcagccaactcgacgactattctaacacacctacccatcaattaattaattaattaactacactttcacacgagtctagtcaaacacatattgaccaaccaacccctgcattgacctcacctcacctcactcatccctgccaatccacgcgcttaattagcttaatgcattaaagcaagtttaatagtatagctaattaataactctaaattatatcaatctaataattaatttatacaataattaactataaatatataatacatcattaataattggtctacctgttatacacatataacattttaaagtctgtactacagctagttataaatctgtatagtcttctcttttctttcgtctctcatctcttctatatgtgattatagctgatttataatctgtattatatatgttcttagcttaagctaattaatcacccatcacctatatatacacatacttcccatcgtctccttgccatctcatttcttgcatcatctcctcccaattccaagctccatcgatctcctcgatcgtcgatcgtcgcggcc

SEQ ID NO: 5691 - DNA, 845 bp, Oryza sativa
gtaacatccgataaatttaatccgtttccgaaccgattccacagtgactccgcaccatttccgacatccmaaacaatccgctccacatccatatccttatactatccaacacccgcaccaaacccgcttaaaaaatatagtttaggatataatatgactactgtccgtccgaatccgctccgatttcacccttactgattggacggtcccgcgcataagcatgcgcacgaagtataaaaatcataaactgtgcttgcacaggaagatgcaactaacagtgaagtgatggcatcagctggcggcctggcgctctgtctgtgtgcgccacgtacgttatcgtcgaccgatcgatcacttctgacccattcaagctcaagccggcaggttagatctatattttccagccagatttcccaatttatttacatgtatgcactgacaccacaagttaactactccctctattccatatgatgagttgttttaatttttttctaattaaaatttaaggctacattaaatttataaaaaataacaacaacatttttaacccaaaataaacatattgtgaaaatatattcaatgctatatttaataaaattaatttgatattgctataacttttttttaaacatggtcaatataatgaaatttgattaggaaaaatgccaaagtacctcataatataaaacggagggagtacctataaatttcacacgcaatatctatcacacgtgtcagtgatgcatctcatgtcttctataaatttaaacacaaattgtagtacttgcaaaggcattgactgtactacagcatcaatcaaattcaagctagtcacaacaata

SEQ ID NO: 5692 - DNA, 1923 bp, Oryza sativa
  misc_feature (1)...(1923): n = A,T,C or G
ccttkccscgggccttccttgccggcntgttacagtagcctkccctgccatgccggcccgcgggtttggmaagcggcccaagcacggaaggaaaatcgtgccgtgccggcacggcacgttactgtagcaggccgtgccgggccgtgcctgctacaggttcggccgtgccccgggcggcccgtttggcccggcccgtttggccacctctgctgcaattatttccctacacatctcaacttggagaccgcgacgcctatgcacgcgtggcaatcagcagcggtggctgcgacggtcagcagcggcggcggcggcggcgagcttccgctccggcaaggcaggcactgaccgaaccgggctaatccgcaaaaatcaccatccaaacccgcagcttaattgggactaataaaatgaaaaactaaatgacagctgctattactcctaccagtggtaaattcccggtgctttagcagcaaaagtgtagtaaaccctgtctctccacctttccacctcactcctctcccaccatcattcacagccgtgcttcgctcctccaaacccaaaaaatttctcctgcttttgtttcctgcacaccggctagatctcgccaagaactcggtaatcccaagccctgggtgagtgagatccagcttcgcaagaaggtgataagagtgattctgctcttgctacgcttgtcagttaaaggcccctttttttkgggtttttgggtggtttctgcttgatgcggagatgggaaaggagggatttttagggcctctctcctgtgattcttgcctgcgttggtgtgattatgggtgttgtgtgtttgtgttcttgcgaggatttgtgatttgggagtgttgctaatattgtggagttgggggttttttggtgaggcaagaagggggaaggaacagttttttgttctgttcttgaaattattttctatctttttcttcggttagtgtttctttcaagtagttttagccctttgcttgcgcggaagcacgggaatttactgatttttcagtgaatgcttggaatctttaagtggttttgagaggtttcttgctataaaatacatgtgaacaggaaaaatgtgagatgttaggtttgctttttgttcagattggatagctcgaactagttcggttggtggtaattggtgaggttttaggggtttaagggggttgctttctcatgtgcaaaggggaatgtgggataatcatctgaaacacgcaggcagcgtgcataccttaaaatgcaagttacacatgttttataaaccagcaagaaaccaaaagscaaagttgtttgtwatatgtgctacatagtgtaagctataggctcaagatttcgtcttactgtggcttaatctgtgggctgaagatctgcaactcttcttgcagagttttctgtgcaatgatcaaaccctagattaatcctttgctttgtctgctagaacattagtcaatggtcaatgacagttttaggcatacattttcttccttttcacctaaggaataaggtctgctctcgaaaacaaaggagttgcatcttattcatctgagtcaccacaacttctgtaaaagaaccttgttccattatcgagcatatgcccataactttcatagaaagaaacacgagaattatagacaaatgctgagttgacatcatttttaggattaaagctgtttcataatctatacatttcccttatcattcggtccatattgttaaccagaatatgaaaaatgctgattgaaatcattaagctgcaattctcattccccatgtttttcaggttttgggggttcttgggcagttctgccaggagagtgacactggatgattgcataaatgaagcttgctgaatgtagattgtgaagttctcctttcctgcgtacggccatatacacttttatc

SEQ ID NO: 5693 - DNA, 2000 bp, Oryza sativa
ctcacttttgagttgtgacttgtcacctctagagaatcgctgaactgcagaagttattagtaggcacgaatctcctttacccttttcctctcttttggccaaacacgaaaagatgcaacacccccattgtacttacaactggacgatgcagacttgaagcaggcacgaatctataggccacgcaaaagaaactcctccaaaaaaaaagaaaaaccgcgcatctttcaactgcaaatctgaaaattccagaggatgatcattgatcaagaagctcctcatcaagatcaaagattctcactcgtgcaagaatccatcagtagtactacctccgtcccaaaataagtgcagctgtggatattcgtgcccaacgtttgatcgtccgtcttatttgaaaaatttgtaaaaattttgaaaatatttagtcacacataaagtaatattcacgttttatcatctaatagcaataaaaatattaatcataaaaaatttttaaataagacaaacggtcaaacgttgaacatgaatgtgcaaaactgcacttattttgggatggagggagtagattcgacccgttacattccaaccagaggcctctgccgctcgatcttgctacactgatactgacatggatttggatgcttgacgcgttctccgcctaatcttccccccggcagattgatgaggcggtaggcatcactgatgctgtgctccctgttggaagtgaaagcggaccggagaaccaattccacaggggcagctgctgctggaccactcgaggtagaggtttcatctcgttctaacagtagagtgatggacaggaggaggcagggacagctcgacaaatcattgctctttcctctctcccgagaaacgatagaatttatagttataccctggttgcataattggaagctcgccgttgatgaggaagaaagggacgccgacgatggggacgccgcagcccggcggctcagttcggtcggcttatcaactgggccgcctggtccgtgtcggggacggcgcgatgggcttcctcaacggcccaagtcacccagatgggcctatgaaagtagcccatttgggtcacttcgatcgtcagatcggatcgagactactcatcttttcgcttatacttatacgagcaaagttttaaaattttaattttagatttagagttaattttaaagttttttgtcgttgtttgttttccagtatttgcttttagatcgctaaaaacacatactgtgttcattttttaatagatgacgccgttaactttttctcacatatttgactatttgtcttattcaaaaaatttacgtaattataatttattttgttatgagttgttttatcacttatagtattttaaatgtgatttatatcttatacatttgcataaaaattttgaataagacgaatggtcaaacatgtgagaaaaagtcaataacgtcatctataaaaaaaaaacggaggcagtatatttttcgtttgtaaaatatgtagtttgagtcctaccgctcttccctgattctggcggcacgcagcgccgcctccgccgtctctattttcttttctagttgaatctctagtcgacgtagaagaattcttctatactttctggttgaatgtctagttgacgcagaagaatccttgtattccaaaattttcatggagctttctcgcagagaagagagtacattgacccctccaagaaaatggcgggagcgtccgagaatggcggccattgttgcatgccaaagcttctaaacatagcttccacaatcgtctccgggcccttcttttttcccgggaagcgtcagcgcggccacatgaatgaaccctcgttctccaatgcctccggccttcttcctcctccgtcctctctgccaatggtgatgtcaggcagagagtgtgagagagaaagaagaagcagtcaataaggaggaggagaaagaggagtkggggaagaagagaagagctagggatagattccggcc

SEQ ID NO: 5694 - DNA, 583 bp, Oryza sativa
  misc_feature (1)...(583): n = A,T,C or G
awwwaaaawaaaaaaaaaaaaaatasaatttactgtttnttattawaaaatttaagnnmacntttgttgtatntattnaaawaaaawawwttcttttttttttttaataaataaaaaaattgctgttgtnttttttwttwtwwwtaaatggtgtnaatmaaaataaatattgtstttatawmwtawaaattctaaaawcwmtrwctttrrraaawmwkkttttkawaadaaawmtttkkwttwtwaatrmwaagaamwrkkkggatttaaaanywawkttgganwtatrtraaaaaawatrnatrtataatttganttayrrttttakgttttkaaanactwtgggcttgtgatggatntnnttntgntnggttwaanwngtrnaagtnanattgagggganagytactatgtttaatgagttgcttanatatgntgataccaaagttgagacaaggcatcctattcggctgtattctcggtatgtcgacaaggtgcatataatgttccgctttactcacgaggaagcacgcgatttaattcagcgttatttgactgagcatcctgatcctaataatgagaac

SEQ ID NO: 5695 - DNA, 2000 bp, Oryza sativa
tgggaccagatattaatagtgtaccatgtaactattgtataaatgaactattagattggctatatataaattggagctagtagttggctatactattaaacttgctctaaaagtcttcagtagctaccacgtaatactacagtactacaaggtaccatatacagctgagctacgtccacgctctgctttctataattcgcatttatgcgccattaagtccatcagatctctcacactgctcttgttcaaaactaagatcgtcattggccccatgcttaaccaacgccattaacacgctatatatgtctagcatgctcctttcatttaggcattcaaaatgataagaagctacgtacgttctgggccaggaacctatcggctaattggctagcgattaatggtgatgctgatgagctaatgtccatggtagaatttcgtggggaaagaaaagagggagatcgagaagctaagtacgtgaccgtatagcttaagcagttaagcttaattagcatgctgctggcgtcgacaccgacacatctttaaacataataaacttactccaccctttataaattaccagtcatacgtagtactacgatttagctagctttatcctaattaactcaaacattactatttcactgttgattttttttaaaaatatatatagtttaatattatacaatttatatttttcgattcaccatcagaaatgctattatatagttcacatattgatgaagtatgtgaatttataaatatattgatggtcaaagtaatgaatatttcattttgaataatactaaatcgtcttgcaatttaaaacgaagagagttcgatcgaacaacatgacaaagctaatgtgtcttcttcttttcttttcttctatattcactgggtcaatcaaccaaatgcattatattttctcccttacggctccacgtccaagttatgtgtatgtaaaaatacctattttctataagccactatattattgcgtagatagaggcaagtctagaaacgcccgtataaacaggttactgtgaaaatgttgtgtgtactatagtagtacgtacaactaatctatgcaatcgccaactatttggacagttggactgctccctaacgacgtacgcagggttcccactcttgcatgcagaggacgacggtcccgtacatgcatatgcatgttggccttaattctattgcttatacaccaatgcatgtagctgcaacaacaacattaattatttctaacatgagaaatgtaaagtgcaaaccatatatgtaatgaaaacctaaaaacaatcattgaattaaaaaaatgaagatttaagatttatccatgttatcaagagcagtaaaatttttacttatggttaattcagaaataattttttactctggataatgtggataaatatcaaatgtacttttatccaacgatagttttcaagttttcgctatatatgtgatttgcaccgtacattttttttccttctactaacaatgaccacgatgcatacgcatggagaatatactactccctccatcctaaaatataaggcataaccactcaaaaaaaaaataaagaaaacatttaatcatcttcttagttagatcaccttgatacatgcaaacaatgtgattggaaggtttgataatataagatttaaaacaaatcaattttatagaaccaagagatgctagttaatgtatgtatgtgtgttttatattatgagacattaaaaaaagtggttatatattatattttgggatggagggaatacagagtttaacgacacggacaccgaggaaatgctgacctcgacgtttggcctgtgaataatttgatgtgagtcgtcgacgaccaatcaacgcagctctcgtctcctctgtttatataaatcccaaaggcctcattcgctgcagctcacacacaacctcttcaatactctcactgcaatttctggagctcacactgcatgcgccggccaata

SEQ ID NO: 5696 - DNA, 2000 bp, Oryza sativa
atattatttgccgattggtttatactggattatattgttattttattatatcatcattagccgattgctttttatatcattatctacatgggacatatagccgattgcttaaatcccatcgctatcggctggtattggtatcggcatcagctattatcggctatcggctggaactactccatcggcttgtcagccgatcggctgttttgatctactatttgcatatcttgtcagttgcaggatcaaactgactggcatgcccacatctcaccaaaatttggacttgcactggagctaagcagatctcccaggccggtgtgttcgattttttcgtcaacagtgattgtgcctcgcgccggctctggtgccaccctccttccacatttgttgcgttgttgtcactctttctccgcccagatcccctcttccctatcaaacacgccctccatctccttccccgatccctatccccaacccctaggtgaggcagcaagaaacccataatcacacacccctaggtgagggctatcatatctgttacgaccacgacaatgacagctaagagctgcagcaatcagatataccgctgcttgcaaccgtaagtatgtaacatgtgagcaacccttaaatttacaagctataatattatctaataataacatggcacgccatttttcatatcaccacaaaagagttctttcattgccttaaattgttctttattgaaaaacatttttcctactactgtaactcttcccatctttctttctcgtaataaacgtggagaggagtaatggatgacgaggttgacgctaagagctggtacaattgtagactataagccagctataaacacatatcgaggagattaaagtagagagagatgagcagcaggctacagatttgtagccagctgtagcacggactataagacgtaatgtgtgtatgacaggtgtgatcagatattagaactcttatatatttgtaggttactattgtatgaattggttattgaatcaactatagatgatttgaagctaatagttggttatactattaaactgagatttgctccgatccaaaaaaatacctcgaggtaacggtacctcacggtaccaaattattttcgatcattggatctaacaatgcccatcctgctcagctagatcaaacgatcggaaacaatttggtaccgtaaggtaccggtacatcgaggtactttttgatggaccggagcaaatctctattaaacttgctctaattttataactatctattttattatctgcttgctctaattgctgcagcttctcccagaattagaagctcccccaaacagttcaacttttggtccagattctgagaagctgtagttataaaatccagaaaatgaactgggaaccagaagttggaaaacccaggttttccagaaaatgaatttgaagtcagaagttgagaaacccatctcctccgattatcagcttctgagaatcttaacctccttaacctccccagacaggcctttagcaaacccgtctctatcttcaaaacctgatcccaaccctatcttcgaaacctgatcccagtcccagccctgatattagaggaaagaaacacgttgtttccaaactggaacccggaagaacaaccataaataagcaaatcaataatcccttcccttggtcccctgtctctctacccaagtactcagtcggcgcaacgcaacacagtcagagtgatcgccagtggggaaggctaccagcagcaatccaatctaatccacctccactcccccgccgccgccgcacctggactgcccggatccgccgccgccgcctcctctggggttgattgatggccacgccgttccacagcccgccctgcccaacagccgagcttctcctccaccgtctctagaagcttcacccccccccccccccacgtcgccgcttcccaaaccctagcgtagcgcctcgtcgagggtgagaaggagggtgggc

SEQ ID NO: 5697 - DNA, 2000 bp, Oryza sativa
ttatagtctgctattgtacctgctcttgtacatacatctcgaagcttgtgctactgctcacaaatttgtagcctatttttcttccctcttcttcacttaaatataaatctaataaatctaatgtgctaatttttggagccctattaattatatgatttattatactcgttcttatgtaagcatatatagttcattatttatcataatcccgggttctctaatactcctttgtcataaatatcccttgcttcgaccttttttagtcattaatttttttacgagtgatctatccattctaaaatataagttaccattaacatttaaattttattttaaaatacagctattcaattcacatgttccccattttaaccaatcagaactatctcttgtttattttctctagctatttcttatctcaaatcaacaaccatatcgacaagtaattccacctaatacaaatttcttaattcccgaggatagtttcaaagatatttatgatggaggggtaattttcaaggcaaatatatataagcacataccttttcacgagttaagcatttcagatattattaatgatgaaagtctaaattttgttggccaaatcttatcaccaaggggagaattttcaaagtaaattacatgaagttaatatattcttatcagctaaaaatagagtccaatagaatcaatactacggtactattccacttccaccctacttagaactcgagccatggatattccaccaagagtcgctctcctataaaccaggacgtcagaaaaacacatgcctggaaaaaacatgcaccgttcaacggaaccgttgctcaccattcacagaagtccaggtgtcatctcgcagactcgcactgatttgaggatagctgatcagctactttatcaatgacgtacgaccaaaataatgtttgacaagctggagatattagtcggcaaataaagctggatagattcaggatcagtttgagaactcgttaggttttgcaactccaatgaacattcttaacgaactgttaaataactttttacaaaactacagatgttttaacaaaattatcacagaactatagagttagaaaataaatttgtcatcaaactatagatataagataaactatcacaaaactatatatttagtaataaaataacaaaattacaagtttaacataaatatgtaatcacaaaactacaacatatacaacttgaaaacaatattagtgcggagaatttaaactataaaatttctattttcgtgacaacattaatattaaatctacagttttatgttacttgatattaaatatgtagttttgtgataagttaaaacggatgttaaatccgtagttttgcaatagaatatcttagatctctagtttttgtagttttttttgatagtttgatgagagaaaatatgtagttttgcaagatttactcaattttctatatatacaaaagttttgttaaaaatttaaataagctcactttaaaggtttgcaatagttaataatatataggttaatgatatttctcgttttgcgcgcgtgcggatatataaaaggtaagctaaacagttctttcgaacaaaacaaaaggataaattcacaggcatctttccaagcgtgcgtgcttggacctatgtcacagggatgcaatgcacttatgcaggttatgatccagtttggtatgcaaaatacatggtataggtcaaaggcatgcttggactggacctaccaggctgctactatattttttttgaagacggaatctgcgacgaaagcggccgaccatgctcagatctcgtatgtcccagcgtccacgtatacgttacgttccagagctagcacgttggaaaactgaacatcgatatatcgtccaaagctatataaatacaaagccatatgcttgcatcgggcctgcaacattgttagttagatcaggttaattattaacatcacccatttcaatccaacctcgtgcca

SEQ ID NO: 5698 - DNA, 2000 bp, Oryza sativa
aaatccaggattgaataaawtaccacaaataaaatatatccctagcttgaccttacttttttattgtcccttcttctaccatgatgaaagggttgaaagccaaacaaaaaagaagtcctttaagctaaagttaaagaacaaagtggatcgcattgcatggccccccttgacacatcactttcgttcctctatttcttcagacatatcatcacttgtatcaggtttgctgcatacatgcaggagaggatttggtggagaaagtgaaagtggaagaaaaacattcttgcacgagcagagcacactactgcctgatgagtgttctttgcgatccaactttgtagaattgtaggtcaccacagacgctttacgcacatgtgttgttgcacgcgatgtcgcatgctttgatccagacatgaggagacgaaatgcgtccatccaaatttctggcaaaagtgtcgagggaagcatcgaagtttcaccatagtttacttgaagtttcgcaaattaactagctagaccttgcactttacagtgctgaaaaagttgtaaaactcgcagcggcttcacaattcagttaggaaaaatgaaaccggatatataggggctgttcagattgatactattttcaaacattctatttttttttgttaaagttgcaaaaaaatgtctacatctagtttgttttcaaatttgataaatacatatgaattccagccaaaattttgacaatattgacatattcggtattgccaaaaattagtaagatttatttggctacaatctaaacagatcttattttttggcccatgttatcaaaccggcccattccatttccgaagtagtatcacgtcatttctctcttaatatacaacaattgtgctttttctgcagctccgtcacctccctgtcactgaagttccaaagtaggaggctaggtgcagataacttgtgtcttgcaagtgtcatagatattgtcatatattcaaacaaaataattttcagttcacattttctcagtgctgcaaaaaatgtaaaactcgcagcggcttcacaattcagttaggaaaaatgaaacagaatatatagaggctgttcagattgatgccattttcaaacataccatttttttaaaagttgtaaaaaaatatctacatctaatttgttgccaaatttaataaatacatatgaattccagtcaaaattttgataatatcgacatcttcggtattgccaaaatttggtaaggtttatttgctacgatctgaacagaccttattttttggcctatgttatcaaaccggcccattccatttccgaaatagtatcacgtcatttctctcttaatatacaacaattgtgctttgtctgcagctccgtcactgaagttccaaagtaggagcagagaacttgtgtcttgcaagtgtcatagatattgtcatatactcgaacaaaataattttcagttcacatttttttgtggctgaaatctcaacggatgaattcccagaaattcggacaataacacaccattgtcccctgcaaacttctaagcaaagctctatgacttgacagttcgtgaaactcgtcctaaaatccaaaaccggccggaaattccaaagggggatttgacaggagtgataggcctacatgagcccaaatgcaaaaaggccccacaaataaattcagcctaagcccactaaaattctgtggataaaatcgcatctccgccgtgtgacactgacaccctgacccaccagtggggcccactagccagcggcaacgacctcctcccccctcttcggcttcaccgaccaaaccaacacaatcgcgcggatcaacagactcgagtaggggagagagagagagagagagagagagagagagagagagagagagagaaggcacgcggcaatcgatctgcccgcctcacctccggccaccgaccaccgccgcctccgcgtccctctgcctcacctcgacgccggctagcatcgccggcg

SEQ ID NO: 5699 - DNA, 2000 bp, Oryza sativa
acgatggaagcaattgctacggcggtgccaatggttgcgatgcctcagtcagcggaccaaccgactatagcgaagtacgtggaaaccgcatgggagattggtgtgagggcacaactagatgagaaaggctctgtcacgaaggaggargtggagatatccatcaagaaagtgatggatgggaagagggcagtggagtacaagaggaatgcagctaagtggatgcmaaaagccaaggaagcagcacaagtaggcgggagctcagacaagaacattgctgaatttgtagcmaaatatttatcaaattagtatagctttgtatacatctggtttcttcatgtaaggatcttgtaacaccagcatgtaaaaaaaaattaaatagcagacgacaagatggagttagttttaatgtgtctacaaagattttggtagtataaaactaaatgagtggaaatttggtggtatgagacaaattttcccttcccaaagaccactaaaaatataaaaatataaagtaattaaacgagaaatcatcagtctacagatggtttgcgagttctacggaaaattaaaactcaatcggagatggattttcatctgtctaggagatattagctcgtttcttgcatgtcagcatgtcacttaaatagtttaaattttttaaaaagtaataaggtaggttaatataaaatatatcatttcataaagcatgttatgtaaaattcgacttccacaagttataaaaaataacaaattaaacagaaacttgttttcgtaccttcatagttatgtttgttatatttttttatctaaattcgtatttgtatagtgatatatcacatattaatctatatttattaatgttttgataacttaggtaataagtaattcaagaaacagggaattttccctcgacggaagaaaatcgttcccactacaatcttctgaaacatatacctacaggctcgaacattttctgtacgcaattccgtgcgttccatagcacaaaatttgtattgtttagattaacatgtgtagcattaccgctgtcaatagcatgttctgtctctgtgctctgttctgcatgtatcggtgttgccaaaggaagcagagtggaagggggtcgccgtgagcccgtgactggaggggaaagggaaagagaaattttctttcacacccctaattttttagtcgatgctttctatgtccctaaattttcttcattccctttatgtttctcaattttgatttgcatcttttccataacattgccgaattggccattagttcgtttaataggtgtggagaagtctgttttaccattcaatatgtgagtaatatatagaaatttatcgactatattgatttggatcgatgttgaagtattgttgcactttgtctatattattcatcgaactttatcatatcattaatcatcatataatggtgttatgtggagtgtgatgatgtaagaatgaagttatagagttatattcatgcatagttaaatgtgtaattatgccacacacggttgtttttcatatgaagttccgatcaatattagtagattccatttcaatagtcccgtttccgatttaccgacgttaccgatatcgttaccgttttcgggtctacagttccgattccgttttcgagaaaaaaaatatgaaaataaaaatgccaaatggttttaatttccaaccttttccgaccgttttcatcctagatacgtgtctacatccacgggttttgtagagagccaaaaacaaacgtgtgatacaacacgtgcaacatgtcctttacttgcaaatcaagtccaattcctgtttcatgccaggttcgctgtcccgggccgacacatccctgaaacagtccaccgcaaattctgacccatacagaaagcaatcttgggcgccactcctacttatccgtctcgatcaaacacactcacatcagccagccagcagtaggcccagcacacacccacagtcctctatcacatc

SEQ ID NO: 5700 - DNA, 2000 bp, Oryza sativa
aaacaaaatctataataacccctcatctataaatatatggattaaaattttagagggggtattataggggctctaatggtatattaggggctaggagggtctaaagaccccccttgccccacgctttctccgtccctagcgagcgcatctttgtcgctgcggagggcatcgtggcaggagaggtgcactgcgaagttggtgctcaatctgcttcgccttccacctcacgcgcggttctagaaccaaacggcgacctggcgagggtggagacccatacccaccgaccggtggcgaggatccagatcaacaacgtcgctccaatagagacccgtcctcacaggcaggctccaccacctcctccggcagtcagccgcgcctctcccagtcctcctattccctggccttctcctcaaggtgtcgtccccgtcagatagatagccggcaacatcagattggggagaggccgcagctgttgagtaccggggcgctgttgagctcattgttgcctctctagctccctcccggagttcgccactcccacctttgcgtcccgcgccacgcccgccgcctgcctctgtgtgctatcgtgcgcgtcgaccgcccgcgccgctgcttgaccaatgcccaatgacgcccgagagagaggatgaggggaaaaaaatttatgacgggactaccacgtagtatcaaaaccaccgcggattaaactggggttaagggcaaagaatgtctggttttgtagtttaaggtataattgaatctcgttacagtttagagagataatttatacttttttcatctgtaaaatactcaatacaaacacgtcatattcaatactaacacatgcgtatctagctttatgattggtttttttgaacgactagtagagagtactactcctatcctcaattagtttactgtagacgtactgtactactagtagtagtgtactgtacacaggtgatgcgtggctcaaagtgtaggcgtcctgctcaccgatgtggctctagctgccaccgcgacgtggcacccggggcggccgcttccggaaggcacgagatcgacggagacgcgcgccacggagactccctctttctggctcgatcgctagctagctaacggcacgcgcgtcgcgaaaccggcgcgagctcgggcggcgcggccagcaagccagccacgtaacgttggcgaaggggcgacgcaatataatttagctggtgtacggtgcgcccggtcgacgggtcgaggcagcgtgtcgagctgaccgagggggcctgctctcagagcaggtagcaggctataaattatgagagcaaagagcaacgggctacagatttataaccagctacagtataaactacaagacgcagtgtgtgtatgacaggtgagaccagttattaatagtttagtatgtaactattatatgaatgagctattagattggctatagataaattgaagctagtaattggctatactattaaacctcctctccgctctctccacctgatcgcatcccgaattttttaaatagcactattttaataaaaaattaattataaaatagtgattacataattgaaatcgcaattttaggtgcgatatgtgcgatacaattttgtgccctgttaaattatggttgttcgttagggtaaaataaaatatatgcaggcaagtgtaaaccggatgcatatatctgagatgaggttcatccatctttggtaggttgataggtgcgagggcatcagcgaggcccattgatgtcgacgagctcgactctacggcgcagatccgtggcagtgagctcatctcaaggacggcaacgaggtgctgatccaccggtagcactagcagtagcgataagattggggatgggaacaatgcgagtagatccatgatgacgagcttgaggaaggcaatgagttgcgggtctaccaatggtgctagcagtagcggtgagtttggcgatgcgaacaacacgagcaagctcggggaaggca

SEQ ID NO: 5701 - DNA, 2000 bp, Oryza sativa
aatttctcctagataagttatcctttagttagaacaacccctttaaataggtatccacataaaaatcttaagtcttgagagacatcttaagtctctcatataatcttattcctctcaatattgccattattaattaaagctaagtgagcatagaccgaactgatgaatacaccatctttgatgaaaattcacatctgaaaaatgatcattcacctctgaagcaaatgaattatgaacaattgaagcacataaattatgccaattgtttaaattatgttatactaaagctctcactgaaacagaagacatatcatgtgaaacacaagacataacatttgcgaattgaagcatatcctcctacgatactatagcatataatgatggatacctttctttaaagctagagtacactagaccgaaccgagaacacactattttgatggataattcacatctgaaaaatgatcattcacctctgaaacaaatgaattatgaacaattgaaacacataaattatgccaattgtttaaattatgtcctactaaagctctcctaaaagaaacattcagtggaacagaagacataacatttgcaattgaagcattcctcctatgaactatagcatataacgccggatacctttctcttaaagaataattccctacccatttatcctcccaaaatctcacttgtacgccattattaataatccaggaacccatatgtagaaacttactcttaactttcataaaaccagactaaaaatgggaatccccttgtttcttctcaatctgacttaaggattgattataaagatattttcttttcaatagatcctgccactcggcttgctcatttatgagcctaaacaatcatttactcaaaagacattgattttgaatttcaagattatgaactccaagaccaccctgatctttgggttaacaaatcatatcccatttagtaagtctattatacttcttcttgtgctcatcaccttaccaaaagaaacatgatttataataatcaattttttttgaagaacttcttttggaatcttaaaaaagaaattcataaacattgctaaactagaaaacacagaattaatcaacaccaacctcccccaactgatatatgtttacctttccaactattaagtttcttttcaattcttttctcaactgttttccaatccttgttactaagttttctaaaatgcataggaatactaagatatttcacagggaaatttctaagcttacaaccaaaaatagtagaataaaactctttgatattcctttgcttgaccaacacaaaataattcacttttatatgaaaatgtaaataaccttttgtcatggtaggtccaaatattcatgtttttttttatttgttcatcctccgtatcaaaatataactgctgatcatttaattttgatttggctgatgaaaagacctccatgaaaaacacttgcatcggttccatcgccgacgctttgttcatgtaggaaaccgtagtcgcagcaattgatcgatggacatagatacatacatcacgatgaagcctaattagctacgcaaaatatcccgtatatattcccattcccatgtactccttccgttctaaaataagtgtatttttacattgttcatatctaacatttgacgttccgtcttatttaaatttttttattagtactttgttgtttttatgattaatattttattgttattagatgaaaacatgaatgactctttttaaaaaaaattataaattttaaaaataaaatggacggtcaaacgctagacacgaatatccacggccgcacttattttaggacaaatgtagtactcatcaacaaagtttctccctagataagttcggccaagaccaatgtaattaacacactcttggaggccacgcctactgtgtatgtatctctgtattttataagaacccataatcacccaaatcgctttggccactagctatcaaccaa

SEQ ID NO: 5702 - DNA, 2000 bp, Oryza sativa
acgtgtcagcggcagggacacgtggggcccacgtcctacgtggcacgggtaaacgaggtggtcgccgccgccgccgtgctgtgaatagtccgctatgaggtgggcccggtggggcccactttgaggagaccccagctctactccacggatcggctgatgggcccaccagccgcacgaggccacgggccgagccacggacggaggcccatggataaaaaggtaaacgggcacgcggatggtgggtccgccgtttttccggttgtgagtgaggtggtgaaaagtcgctgtcctggtgacctgtctaaccaaccgtctccacaaagattcaaaatttagatttgaagttgtttgtttttatcaattttgggataatatatacagacaattttttacaacgaatatgtcttatataaatagagtatatatagccatagtaagtatgcacctgcccatgctcgtaaagatccttggtgcttgacaattttcgagcgtatcttcaattagggagaacatgctgagttgcagaggctgagattttaatatgttgggcatgtttactttgatgttattttcaaccttaccaaattttggtaaagttactaaaaaagttgctacatttagtttgttgccaaattttgataactaaataagaaatcctgtcaaaattttggtaaggttttttttgacatcaaagtgaacaggcccgttatcttcaaaaagatgaacatgctaaatgaaaagtgaattcttctcttgtaacaggctctgtctaaatgatattttttcatgaagcattacttatgaaatgttttattattcattttggtatcaagttatctcatgtaaaattataaattaactcttatctcttttactcgttggttacgatatatacacagtttttccctcaaaaaaatatatacacagtttgaaatttacgtgcttgaacatgattgtttccaattgtgtatttgtaataaattacaatgacatggttttttatgatatctttattccttttgtatgtttgattgcatttactgtgtcccatgagaggtagaggaagaggtagataacaatctactccctccattacaaaatataaggcacaaccaaccttaatccaaagaccaagaaataattattatcatcttgtagtttggatcatcctaataaatataatgcatgcatccaatagaattagaggatgtgagagtgaaggatttaaagaattaataatttaatggagaaaatgtcatagttaattgtatgcatgcatgtatgtcttatatcatggaacattaaaaaagtggttgtgccttatattatggaatggaaagaatagctttattcatttgagcatgttattttaacaagtcagcttgcattaatgaaaacttctgtatggaaagttttattgaaaatgcacaatttaaaactaatcatgcattaatgaaactgtctcgatttgtggaccgctaataagctaagccgaaacttaaattcgaataaagcattgcaagattcattagcagctgatgcatatacttatcaatcaaaaaattaaatttttaattttaaatttggagctgattttaggggttttcatcaaagtttattttttatcatttgtttttaaatcactaagaacacgtatataaaaattttatttacagattactttttatttgcaaatatccaccgataagtgaaacgatggggcatatattttgggatgtatctagtctttttttttggttgacccctaaatggacatatacatacaaggtagtataaaggggttacaaagacaccttcaactactcttcacataatcacatttcggaaaaaaaaaaaggaaaagggcaacaactcttgaagctagcggcaactgtcaaacacacaaactccagtgtctccccactccatagtgacactgcgcctgcctgcgagatccaaaatccgaccagccagcgttagctcggagaggcgaggcgaga

SEQ ID NO: 5703 - DNA, 462 bp, Oryza sativa
  misc_feature (1)...(462): n = A,T,C or G
gnngggggcctggaatttggatccgcgaagctgtgcctgcgggtggtgcgttkgcgtggccttgagggaggtgaggtggatcgggggcgcagatctggagggcgcatgaggaggcggcgccggagaggaggaggaggaggaggaggagggagagggtggtgtagtgggagcggccgagatggggcgtcgacggggtggtgatcctggaggctgtggtggcgagtgaggcggcggcggtggtggtggtgggggtgggggaggagggggctgggatggaggacgtggcggtggcggcggcgctcgctcctgcgccggcgacggctccggtttttagccccgccgcggcggggctcacgctgatcgccgccgcggccgcggacccgatcgcggccgtggtggcgggggccatggacggggtggtgaccgtgccgccggtcaggacggcgtcggcggtggaggacg

SEQ ID NO: 5704 - DNA, 2000 bp, Oryza sativa
ttcatggccaactgggccatcacattttattctcgaatcggccaagttgccgctacacaaaccattggatatttggatatgtaggtcagggagagaaaaggaaagaaagaaaggcattagcttttcacgttatccgaataaaatcgaggggatatgctgcttctgaaattgttgctgaaattgcaacgaggagttggttaggtggtcggtgcacctcaagcccttaattgcacatcaagctttgctttcttctwaccccctttttttttttttggawgcytkamygttagagcaagttcaatagtatagcctactactagcttcaattcagctataaccaatctaatagccaatttatacaatagttgcttactatactattaatatatggtctcacctattatacatatactgcgtcttgaagtccgtgttgcagctgactacagatctgtagcccgttactcttctctctcatcttctatctcattaaaatatgtttatagctggctaatattctgctgttgtacctgctgtcatggaggatgaggagagtattagcaacgctgtcttgaaaggtggaaaagaaaaacgaaaggaaaacacaacgctgtcttggttagggatggtgtgctgactagacgcttactaggcaagcggctggcgtggcgtggacggtcgtggtcatccacgtcatctgcggcagacagcttgaggacggcccacgtggcctcgatgagtcaaccatgcaattaatgtggataaggagttgttttttcttttcaagaaatgtggataaggttttccaataattaggctatggtgaaacattttctcaaatattatttctgttatgagagtatttttttattatacgtgagagattttggaagaagttataactgggcagaagctactttactcgctactttactataaggctgtattctttcttccacttttccaacttctactccattatttgtcgaactgttaaacgatgtgttttttttttacaaaaatcttctatagaaaagttgcttttaaaatcatattacttttaagtttttattaattaataatacttaattgatcacatattaatgggcaacgctgttttccatgcccggagagaggttctcgaacacaacctaactagggcttaaatccataccacttaataatattctgcgataattttttgcttgtgttaatacttgaaattcgaaccaattcatcgcattccaaaatttcgaatcgcaatggatacgcttaacaacatatgacgtggcacccaccgctaccggacacgtgtttcacgccctgcaaaagcgcccctcgttttgctgctgttgtttggcgttcgttcgttcacccgggggaagaaagaagaaaaggacgacccagacctctcataaaccgccgggcaattcaattcaaagcctctcgtgaggaatttcccaaaatacccctccccccactgtaggtatggatgggttgctcggtccacctcgtccgtccatcgcgtgggccccaccccgaccgaacgctatcccgtacgtccatccggtgggccccgcggtgtcaggtggcagcgtgacgccagctggcaccggggtgtggggcgccccccctcccccctccccactacctatcctcttttcccgatgcagcatcacctccctaggcccggtccacggtggacccagcggctcaccggcatgcggggccccgcactgtcggtgggtctacggggggaggcgccgtggaccgggtccacccgccccgagggagaggaatataccgcgtgtgtgcgcgtgtgttgtgcgggctcgtcttcctcgccgctcgctcgctcgcctcctccatttttttttycttctcttcttcttacgaactcgaaacgcgaaaaagggagtagatcagatcaaagacgcggaggaggaggaggaggaggagagctagggtttggatcgggagagagggctagggtttcagccatg

SEQ ID NO: 5705 - DNA, 590 bp, Oryza sativa
  misc_feature (1)...(590): n = A,T,C or G
aargkttanmaawacagrancccgattgaccncggccttttgacacswccatgactcgacaakctgacstgcacacaacatcktgamagcgccgtgtrcgcmcttttgcscttagccccttggccgcccttaaakgcmatttttgccctaccaaaaaaacaatttgctagttctttttacatcttagccccytgccgcttttgcgaattttgcacgtagaccccttgccgcccagacagtgggcggcaagggggccacaaaattycgcagccccccaaaacgaccgtcatgcgtctgtgtgccacgtsggcttggygcccaaatggagggcggcagggtcyaattttataaatcttttcgccgatataataattttggaaatatttaaaaaataaattttaaaattcaaaactcgggtccatagaaagttgggctgggccktaggccaactcggccacaaaaaccaccgcctcgtctcgtcgcctcgcctccgcttcgttcgccacccttccttcgattcgcgccgccgagagttctgtgtctctctcttcttctccttccctacttcgccgccacgccgtgcaggtgga

SEQ ID NO: 5706 - DNA, 2000 bp, Oryza sativa
cctttttcgggcagctttttatcctaatcctcgatcgacaagcacttctctggctaagacagaagtaacggcgcgttcaaacttcatgcattcaccactgaactggttggattatgtcaataattcaacttggtattcattagttagtcttcccaaaaaggcaaaaacgtgcagaaatggtctaaagttgttaccaatgtgggcttagctagttatcgagagttatttgatcgtcatgcttatctttgtataccgcaatatatatgctaagaaatctaataaaacctagtgtagaactggtaatccttttcttccttagaagtttgtcacgtgcaaacactgatgaggtctacttggacattacgtatatgacattttaatataggttgaagttttgcgccgggccgatatatagctaggttgaagttttgcgatgtgtacctttgaacacgataattttctgtacgagatgtcttcatgaaaattagaatactaaatatcggaaagtcaagatacatacgtaatacgctctaacatatcgatgtcagtttattctacttttagcaatgactcgtgagccagcagaatttgcttcaatgtactaggcagctgccaaggatgcaaaagtgcaattcattttgaaatttagaattcaattataaaattaattctagtcaggtttttcacttatttattttcatgaatgctaagaaaacaactataaaaaagccacacatttaaaacttttgtttttttttaaaaaaaaaacagaacctaaaagtattttcctattttgaagctcccaaggactaaatgagggctacccttatttttcgagtcctcaaattatgaccccagattcagttgtagccccccattgtcagcacatatatattttctttatcttctatttccatatgcaccacatgtttatttcttgtttttcacaccatcgtaattcaaacataaatataacacttaaggccatattttcggacatggaaatggcatatctagtttatagtactatcaacgccatgttccagcagtgttgtgctagggttgcttacttcaagcggtgccgggacggaggaggggcgatgacacggtacgggagatagtgtgcttggtggcacaaggatagaggagctcgctatcggtgtgaaaccttatgaaggaggttggcgacttgtgaacaatggatgttgaggagagttgcggtcttcttattttagggctttagtgttgtatttctttccttgtcttcaaaaattatttaggagctatgtttaggatattactcaagttaagtctagaatcatttattgaatccctcgtaccatgataatagtatggtgcgcaagaaggaaggaagccactagtacatcatttgtatatggttcacawtaagattataaatatgtactctagcacacatgtttaaatgttttcgtcttttagaatataagagctctgctcagtttagcatttatgtagtcatttgaaattatatcgtagcacacgacattctagctacagtgttggattaatctacaccatccgatctccaatctcacagctagtactccactatacaaaccgacactcgtggggtacgtcactgcaatactgcatcctccattcctccgatgcatcatgcctgtaccctacaacgtacaagtcgcacaaacaaaaatcccccttgattaaagaaaaacgaacaaagcaacacggactcgatcagagccaataaaaaaacaatgaagaaatccccatgcgtctatgcgaggctgcgacgaagctgccccaattgaccacgttcgctgtagccgcgccccgcgcataaataccccgccgcttcccccctcccattccgcagcatcacacagacgacgcagcatcagcaacacacacacacaccgagcaatcaatccatcacacacaaacacaaacaaacgcacagggcgcgagagctcgaacgagaggaggaaaggtcggca

SEQ ID NO: 5707 - DNA, 2000 bp, Oryza sativa
aactaatggtcatggatgcgtactaggtaccttttatataattttacaataagatttctaaatttacttttagatttgaacatggctagatcattattattggggtgacatgacatccaatttttaaattttaagatggagaaagcatatcttagttttattaattaaaattgcatacatcttacatttaatagatctaaagatactatgattaaaaaatgtaaatattaatttagtagatttagggctcctttaaaatcaaggattgccatagaaattttgtaaattcggtttccttgcgagtttttccactagagcaatttgattagtaggaaatgatatgaaatttttcataggattgtattcctatggcccaatttcataggaaaataagcaagaagtctaaccaactggaaaactttcatttgattttgctttgttaattttctatgatgttatgaaaggactatatatttatgttttctatgtttttcattcctatagaacaaaagaaaatgctacgttaattattatgtttttatttctatatttttcttatccgacgttccaaagggctcttaaccattgaaagatgaagacaggggacaaacctcccgtaatgatttcgcttgccgcgcgaaatgagcgtagctcaactggttaggtttcttgtggtggaaccagcctagtcgggttcatgttctagattcgacacatgtgcttgtatttacaccttattattcttttaatgatagtcgatatatctgtcaacagcgagatatctgtggtgacttcgtcaatcttaagatataccagtctagtctttgaaggttcttataggagtacgtttatagcgatgagtatgcgcgcttgatgaactgttttttttaaatatatatggcatggttcaaattgtctcttttttaaataattttgtttgcggcggcaccacctcagagtggctggcacgtacagcaacaaacagctgcgctacctaggcccagggatccgaaccgaaccccaacccccaagcaaaagcaaagcatagcatagcatagcatagcagtaaggcgcgtaggccaattacatatgccgacgcgtatattagagtagagacaatagcagactattagccagctataaatatattttaataagataaaagataacacagaagagcaacgggctatagatctatagtcagttgcagcacggacttcaagacacaatgtgtgtataatatgtgggacaatatattaatagtatagtaagcaactattatatgaattagctattagattagatatagatgaattgttgatagtagtggactatactattaaacttctctaagagaaagtttaatagtatagccaactgttggcttcaaaatcatataatagttcactataaatatatactacataattaatatctagtcccaactatcatacatatatgtatcttaaagtcagtagctaacctagtgcgctccttttccctcttctcttttaccctttcgaaatgtgtttaaggcacagaaaaaaccaaccgagacggcgcggtccagccgagcgcagcgacccgcgggttcgggtggtggtggtgccccgccacgaacccaccccacggaaccgacaaacaaagcctccaccgcagccgctgcccggtgggcccccacgccgccgcgccactagcgcacacacagctcataaccatsgccacccctccccttccccaactcctcttccctgaatccctcctcctactcttctcctccccacattcccaaagagaagcttcgcggcctcctcctcctccacctcctccgcatcctcctccgagcccccagatccgccgcgcgtgctctcgcgggtggtggtgcttctggtcttgggggaggggaggggcgcgagcgagcgagcgaacgagcgagagagagagagagagagagaggaaggggagggagagggaggtgtgtgtgtgtgagagagagagag

SEQ ID NO: 5708 - DNA, 2000 bp, Oryza sativa
tcgccatggccggccggcatactgcaacacgtaccaggcaaaaatgcatgcaaacaatgacccagaaaagggcccgatcgaggtagacgtcaaaatctacagggatacgcaggcatagatacgacggacggaattttattggtttctaaaacattttatttcaaaaataaatattttcttaaacttttttcaaaatctaaacattttaaccaaccaacccatctcgtatagaaaaataacactattacaccacccgtaatatgtgtaacaatttttttccccaccaccctttaagaatattattacgtcagtcagaccggcgtgtctaaataaagctgttttgacacaagttgaatcttgaaaataaatattgaaaggatttattttaaaattaataataaaaaatgcgaaacgaaatccaacaggaacgggcgttggaagcgtggagcggagccggcgatcgaaaaggcctgtggtacgtcaacggagacacgcgctggcatcggcgtgcagtgatgagaggggaaagggggagggatgcaggattacacagggtgcagcctttttgtcaaacagtagcgagtagtttccacgccaaccggggggcagagcgtacggggaggcaaagctgcaggcagttaaggggtggtgcggctgcatgcatgccatcggctccgctctggcgagcgcggcagctgcctgccatggctggctgcccgcagtcgcagtggcaggaggaggggcagtggccgcaggggcatttttccgtgcgatgggccgcagtttgggtgcagtttctggcgaggaaggaattggctggaggacgaggccgaggatgggggacccgggcggggcgcggcgcggcgtgtggtgccgtcatccgtgcgaggtggcaccggcggggggcgtcgtcgtacgggttttctcgcgcgggcgggcgtcaacgccagccaggtgatggggatgggcgatgcatgcacggctggaggaggtgcacgagtccatcagtaattcctcctccacctcgcgtcgatctcttttttacaactggactttcagatgccactacatcaatccgtacgtattgagatgtacttcctctgttctcaaaaacaaaactaaaattggatacgacataagtcggtttagatttgttgtactgtaatactttcttcataaagaaacgacacacggactccaaaacacaactccgactttttatttctataaaaatattattgaaaagtgatatatatatacttttataaaagtatttttcaagacaaatctatattaatgatttatattcgtaaggtttgacttaaacattgtcctaaataactttttacgagtacaggagaaatatgttacatccaattttagttttgttttttttcataacggagggagtatccgtgtatctcgggattcgcttgaaacagattttgaattttactagtttcaaactgaagcaggaagttgttctggcttccgtatatcgttggctgtttgctttgtcactgtactctgtactacacgtaacgagacaaccgagggccgaggctgctagtgttagctctggtgtggcaactggcacgccctctgcagccatgggccgcgcggggggagctgttttaacccatcgcgccactggcctggcctgtggtggtggtggtagtaaaacgaacgaggcggcccccacgagtacgtaccgtgtggcccgcccccgggacacaaccgggacgcagcgcggggcgcggccacgtcgcgggcgcgataaacaaaggccggcaccgaatcctgttgacttcgccggcctcgcgccccccctttataaccctttccccacctcgcccccacacctctccctcgtcgaaccgatccatccgtctcctgctcccgccgctcttcacacggctaacgcctgcttggctgcgagacaaaccgaaccttttgctcttgcaccgcctgctagcgaactacgtgtgctcccgtgatcg

SEQ ID NO: 5709 - DNA, 2000 bp, Oryza sativa
tatgtacgagttctagaatcaaatccatcgattcatggtataccacaacaaaccgcagagtataactactgccaaacgatgtgatcagaaagcactgacggaggccgccaccgagcaggtaggggtagggcgaccatccaggctccgccgctgccaccgctaccctttttactaataaatattattaatatatagtataaaacttgatcgatcaccgtgaaacaccgtgctggctccaccaggaccatcactgccaagaagaagaggagagtgatagaaagagaaagcgagggaggagagagagagacatgaaggaagctcagagagagagaggccctgtttggcacagctccagagctcagccaaacagtttcagctccaccaaaactgggagtggagttgggtggagctctctcacaaaatgtactagagtttttggagctgggttttaggcagctccacaacttccactccaaacttaactcctggagttatatttaggagttggagttataccaaactggcccagagagagagagagttttgcatttgcaactctctcctgtacttctctctctatacaacaactactcctcgactggactcggtccaagagaccacatacccccaacgaccctccttcccttccccctcctctccccctcgccgagatatattttcccctcggcggcgactcctccttcacctcgtgagctcgccttcggccgccgcctttgcgcctcgcagatccccacccgcgaccgagcgagctggtgccgcatcggtatcgcatcccggtgagcagcgtccacctgacacgattttcctccagttttgctcgcgttaatttctcttctagaccttggatgggagccctttttctcttaatttgtgacagccttgttccacccccaaaaggcgcttggcatgttagatccgtcgtccctggctgactatatgattctttctgtgattcttgattggaactgtgattagtgtaaaatatgccattcttggcttgtttgaattgcctgttctttgcattgaatgatgattctaatcattgtgattgattgatgcatgatggttcattgattctgctgcagttcatcttctggctggacgaattcaattcacggacggtggtggtggtggtgttgactagggatttatttttttaccattggcggctcggctgcatccccaagtgaagaagagaattcgtacatgattccgctaaacaggagggcgagtcagactaggggtggtagatctcgatgccctttctttctctttggttatttactgttgctttagatatatgtatatgcgtctaaataatgttgttgcctttttgatcccctttggcccttgagcatgtgtaccaaccaatagtggcattttttttaatgtttagtttgtccatctaatctatgtgccccatgaaggaaactgttttttttttaagaattgctccacctgaaaaagctgtccttttttctttgccatgggattcacttggtgtacaagcacatgaacacctttcagaggtcatttcacatgcatatgtatgggctagatatttcatatggcaagcagtagtgtgtcttttgatggtatgcactattgccagcagtgaagaatttcttagcaaaaattcctttttcagtagatgatcccagcccatttcttctgccttaagtaatgcttgttatgtgcacattaagatttcagtcactacacagataggcaagttgaactaaagctattaggtgcaatatttcaactgaagtcaactaagacatgcaaccatatcgatcttgtttttggtagataaatctttaagcaagcagttgccactttgctgatatcgcatttcaagtcaaagccagagtttgcttgctgtgtagtttcattatcaatgaggactggttcatttgtttgtgcggaacaggggatccatatatctgacattaattaggttgctcttttgtttgacc

SEQ ID NO: 5710 - DNA, 2000 bp, Oryza sativa
cccgttataatatgaatcactgcccctccgtttcaggttataagacgttttgactttggtaaaagtcaaactgtttcaaatttaatcaagtttatagacaaatactatagtaatatttgtaatactaaattagtttcatcaaaccaataattgaatatattttcataataaatttgtcttggttgaaaatgttactacttttttctacaaatttggtcaaacttaaagcagtttaactttgatcaaaattaaaacgttttataacctgaaatggagggagtatatacgaatatatgatcgatggcatagatctctctttttgtttgagtaatctggtaattcctataacctccagatcaaatagtgatgactcattttatacttctcttagtaatatagttgatatatagatccttgggttgattatgtacattgggcgggtgatatatatgtagcttcctttttcacgatacgtgtgaataataaaagagaagatttccttttcttcacggaagcgagaaaggttgatgttgtgaaaagactagatcattaaaccatgatgaccagattgctcaattcacaaattgattggaaaatacaagcatccatttcaaggacctggaagcggcaaccgcccaaacttgtactcttcttggccagtctctttcccctccttaactccaccacttctcatcagtctctttccttgctcttggaggaggacccatagggtcctctacaatgatacatggtccacctagctacaaccgcgtagcttttgttctagcaatttcttctaaattaagaagtcattgatcagtacatatattgtttcttttggccaattagatatggttcctatttctccatcttatgtttcatgctatatatatatatatatatcaagggtttgattctattgcaacccaacttagcttttatattgataaaatctccatgaatttcttgtagtttgctttatagtttaggtgtaatatatataatatgtgtaccataactagctggaaactaagatattaggtctttggtccgtttgcgctgtaccgcaatattaaacgatacctatatgctgaagaagttttaatttctctgttaaaagaacaacataaaaagggttggaactcaagttgatctgttgcagctcacaatgtgactgatgacggctctagtttatctaataaactttggatctactccctctgtttcacaatataagtcattctagcatttcccacattcatattgatgttaataaatctatatagatatatgtctagattcattagtatcaatatgaatatggtaaatgctagaatgacttacattgtgaaacggaggaagcaaggaattcctgaaattaaagccagcaaacttttgcaaagcaacaagctatacatcacatcaatgcttgctaccataaaaaaaacagtcattagcaaattatcctcctcttattaggactgttgaacacatgcattgatgttttattctacttattactccatatactagctagcatcatgatgcattacacaaaagcagatcatgaatatataataagcatacaattcattattagcatctttacttgtgcatatatacacctgaactcaggagagtcaggattgataccccaaacaccatggttaatcttttattgtgcacaagactagctaatgaccttgtagtgtagatatcaccaagtaatatattagtaacaaataagtggagtaattagctaaataatctatactagtaaccaggatcattaaccaaaagcctccactccggtacatagtatatcaagcgtgaaaacaccaacctcttatcctctcttccccacccacttgcatttgctcccccccaaattctcttctcctcctgcttttccagctatagctagctcgccgtcgctgccgccgccgcgccacagcgcacgctatgccggtgacgaccgcgagggagaggaggagggagcc

SEQ ID NO: 5711 - DNA, 1635 bp, Oryza sativa
gggcgtaaagaacctgggggggggggggctcacttctccccttcctcctccccttcttttcctactacagtataccaaaaaaaatttaaaaaaaacaaaaagttagaaaatttatctataaaaaatttgaattcaaatttaaatttgaatcgggtatgtaaacttttgacttataaactttgtgtctataaactttagatgtatagaaatactatatatagaaaatatttgaattcaaattcaattttgaatcggatataattcaaatttgaatcgggtatataaactttagatgtatagaaatactatatatgaaaaatatttgaattcaaattcaaatttgaatcggatataattcaaattcaaatttgaatcggatatataaactttaggtgtatagaaatactatatataaaaaaacaattgaatttaaattcaaatttgaatcggatatataaacttttggtctgaggtgtataaactttagttgtataaatgtaataaaataggaaaataacgcggtgtcaaaaaaagtaaggtagagggagggggaggcctacccgatcgctctgggctagcatttccggtactacagtgcatttctcgtttccctgtacagctcattcttccattcagtaaggtggtgacaggcaatactgggccacaatcatcctcgggccttcactaaatcctcctacatgtacacaaatatgagtttgtttttgtacatccctgtaccaccaatgattcggtgaacccgtgccccatgcgttgtttctgtaccacgcgagaaaccgatgttggctcagctactcacctctctctttctcacttttgatgaaagtgtgaaacacacacaaagagatgatgaactgacggagaatgaaaatgaacacttgtatttcacgctgcaaaccagcgcgcacaacataaacacttgggggctgttcactttgatgaaaaaaaaaccttattaaattttggtattattaaaattttggtatagttgccaaaattttcgcaacttaccaaaattttggtatgatttcttatatagttgtcaaattttggcaacaaactaaatatagcaactttttgataattttatcaaaatttggtaagattgaaaataacatcacagtgaacaggctcttgtatttcacttttggcaccacaccacatacaccaccactccgtcctgttcggctgcacgacccggccaagacggtctgcaaccatgtcttcaccctcatgcgaggcaaatattactgcatgaagagctccactaactgacgcgcatacaggcaagattttctccaattaatcctgcttgactgctcttatctgatgaccacgcacaacacctgctagttgatccactcttcacgccatgcatccgtgcttcacttggccacagtgtcaagccaacgtgcacctacgggctgccggcatgcactctaatcaaactaacttatgcacacacgtacactacggaataactcacacagtaaacaacaagattaagtctaacaaccgaaacagaaagaacacgcccatatatcccacgccgcccaccgaaactcggacacccactccgccaccgccaccgcctcatccatggcactggctggctcc

SEQ ID NO: 5712 - DNA, 2000 bp, Oryza sativa
ctgataaagcaatttccatcgtcccggttaacctgaggtaaaaaagggggctgctatataacggaatcccgttttcgaacaggatgatcccgagtaggtatcaggtgtgatacctatcaggtatcagacgattctacacaacaggatgatcctgagtaggtatcagacgattctacacacgtttcaggtgatacttgcaagtatcatgtgatacttatcaggtatcatgcgatttctaccacatattgcgtgatactcgcgagatatcatgtgaaacctgtcaggtatcagacgatttcaatcacgtatcgcgtgatactcacgaggtatcatgtgatacctgtcatgtatcagatgatttctaccacgtatagcgtgatactcgcgaggtatcatgtgatacttgtcaagtatcagacgatttctaccatatatcgcgtgatacttgcgaggtattggatgatacctaccaggtatcaggtgattcctactagatatagctgggcatcccgttggggaaggagcatctcgacacgcgcagtcggtcccctgcagccgtcccttgcagacgaggacggagacggcggcggcggcggcggcgggggacaggcgcggcgacggcgggggacagcaacggcggcggtkggggatgggcgcggtggcggtggcggtgtcgacgggggatgggcgcggtggtggcagggtacagcaacggcggcggtgtgggatgggcgtggcggcgatggcgacgcggaacggcaacggcagcgagtgagcaggaattgcgttggaagaggagctatcccgttgggggatggtatcccgtcccctggcattcccgtttatgataggtacccaaatgataccttgcatgtatcgtgatgatatctaggagatatcagtgagtgatgatacttgtacttatccgggatgatacttatagggtagtagtgtatcgacgatttattttcatgtacacaaatgatacctgataggtatcgtgatgatacttacaaggtatcaatgatggataatacttgtaggtataagtgatgaaaaatatttcagagtaaattttcaaagttacactaaatgaagcaatcaagcaaatttaactaaaaaagattaaaaggaaaaaagaaaaaaaagattgccaagcatggcttagtcaacatgtcattgcctagtttaccatgccatgcaacataacaatcgtactagtactacacacaaaccacaagatgatgccatcgggattcgaaagggtgcaacgtgtaggcgtggcatgggcggggccagcattgagtaagcaacgtcgtcttgtgatcgtgataaagcgaatactagtcaagcatgcgcgtgtgtgtcgtacggatagtgcaatggggatgatcccgttccgatcactaccaacggtataccggtctctagcatttccgggtaaaaaaacatagtcccggttaacatgagtgggaaaaaaaacacagtttcaacaaggtaaagtcaaatttgagccttaatttattttttcgttaaaaaaaaaagaaactgacgccctcaccaaaccggcgatgaatgagtgggggtgttgtcgttccttaagggctaagctgttggaaacaaacaatgcaagaaaactgccatttggtaatattatgtatatagtccaaaatgcaattaaactaacaaaaaaatatttaattggatttagtagggatgattgatggatgacccaaggaaagaagggaggaaggaaggagcgaagagcgaaggttgaggtgagcaagcattgacaagtggaagcaggcccacgctgcagtcggtcaaacatggcagctcctccaccagccaaatcgcgtccagtcaccacctcttgttcggttcttccccatcaggccatcacccacccacgcgcctcgctgacctgccctcctgacttgccttaccattaaaaagcaaggggagcacaagcattattacacaaagcaaaagcactagcc

SEQ ID NO: 5713 - DNA, 495 bp, Oryza sativa
agaggatttttagggtttggattgtctgcacgaatcttaaagcaatcgggtggtctaaaatttgcaagatttgtaagggggttttttgtcaaatgatctttagacagtccctaaattaatatcctactttgattcggtcgtctttagtacgtttctccataggaattaataatctaactcatgtagtcagaaaataactaactcacgcaagaattatataaaaaaatctttgtactaaatgaactctaaataatatgcatatgtactattaaactaactggcacgcaaagtggcgtcccgattttctatttgcttccaacgctgaatgtacgtatctgtcagatcttccaatagcaatggatgttgagagaccagaaacacatgtaaataggccctttgggagtttaggttgagagacgagaaaaatactagggcaatccatttgagagagagctttgagccaaaagcaccccacgcactagccggaccggcgaa

SEQ ID NO: 5714 - DNA, 2000 bp, Oryza sativa
tgccttttcttctctttctcgtgttgctcaggcgtgggttgcttcccagaccggcttgtttgttgctcacgaggcgcgcggataatcgcgaaggccaatgctagtatgcatgactaaaatagtctaacggccatggaaattaacggttagatttaactcatactactctactgccatataggagtactccaatagtggaaggtaccgtagaagtgcacataatatacgcagtttagcatggcagttgttccaccacaatctgcaatattatttgagtttactgaaccatatataggtggtgttgggattcagggactaaactttagtctttgtcacatcggatgtttaacattaattagaagtattaaatatagactacttacaaaactaatagcatgaataagagctaattcgcatgacaaattttttaaacctaattaatctataattagcacatgtttactgtagcatcacataggctaatcatggattaattaggctcaatagattcgtctcgcgaattagtccagagttataaaataggttttatcagtagtctatgtttaatacttctaattagtgtccaaccattcaatgatgtgacaaggactaaaaatttttagtcccatccaaaaacaaccccatattacacctttcgtctcaaaatatagtaatgatgggatgagacctatcttagaactacgaatctggacatgaggcatgtccagattcatagtgttaggatgagttaggttgctacattttgggacggaggtagtatttgagacttgctctggtcaaataaaaagtacctcaagataccagtacttcacgctaccaaattgtttccgatagttatgtttagctagacaggatggacattgttagatccaaccatccgaaacaatacggtaccggtacctcgaggtactttctgttggacaggagcaaatttcatattatttgggtttgctcaattcctaaaaacagttcaagtcgaacgactagcatgaggtcgatctagtatagtgggccactgtatcggtttaaaacctggatgagatggtttgcggctagctagttatggtcggcttacttaggtgttggctcgataagattgaaggtggcttgaattgtgttgtctcgggttgaaatccctcactcacatcccctcccggtgaagctttatatttataccctcatatacccttatttaagtaaaagtaaagagacaaatgtagattttgaatcgttttaatcagtgacagatttatgtgtaggttgtggggtcagcccagcgttttcactatcatccagtgagtcttaaattttctatataaatctattcaaatctgcataaatgacctcaccaaaatatgaagtaataataattaaccccaccgagtaaatttcctagcttcgccactggttttagtaggaaccaaatagaactatgtctttctttcatcatctcctcccggctttacatatgtttgggtttgttttcatataggagtcagtgatatatggtattccgtcgaggtaagtatacgtctaactacatattaagttcaaactcaatctacaccagggtttgaaatttcggttcgaaatttcgccccccaccgaaatgctcacatctcacccgaaaattttgttttttgcaatattttgtgaatttggtcaaatttattcaaaatcagtcaaattttcaaaaaaaaaatcgtacaaaaaaaattcggaaaattcggttctttcgcccacctgtggtagaaatcttagtttcgaaattttaaaccctgaactacacattaaggggggaaatctaagaatagactcaagattttatggaacaagtcaagtaattgaaacgatttccccccctataaatacgctctttgttgagagtccagaagagcataagtgagacagtctgagcaagagctcgagccttcagtatcccacgcactatgggaaccagaactaacccgcccggctca

SEQ ID NO: 5715 - DNA, 2000 bp, Oryza sativa
catagtccatatagaaatacaatttagaaatagctgaaattcgaaattaaaaaaaataatgaatattgtaagaggagactagagtacatatagaaatataattaaaaaataaaagaaattcggaattaaaaataaggaatagtagaagaaaagcatagagtccatataggaatttagaatgtactaaaaggaataaaattaataaaattaaaattagagcttagagtccatatagaaatacaatttacaaacaactaaaattcaaaataaaaaaaatagcaagaagagactagagtccatataggaatacaatttagaagaaactaaaattcgaaattaaaaaaataaagaatattgaaagatgagtttagagtttacatagaaataccaattagaaataatgagaattccagaattagaaataaataatattgaagagaagcctagagtctatatagaaataccaattttacaaattaatgaaagttcgaaaaaaaaagaaatattggaagacggagtcctacaatgccatataggaatataatttagaaacaactaaaatttgatattaaaaataattattaagtatcacgtatataaaatacagtatgaatattacatatttgtagttttggtaaagttagtataaaatttaaaattatatttgaatatattttaataataaattggggaaaaaatatatatgctattatattagatagaatatattagatagaatataatgatcctagccgcgcaatttacgcggaccaccatactagtttatatgtaaacaatatttttaaatacttttcatattcctggtgaatagtacggacgcacacggatatttattgggttttttctccgttgaacagtagtacatatttatacaaacacgtgaatttttttttcagttttttccgatgaatagtatacatgcgtagttttctctcgtagcgcacgggagataagatgggacgactaatcatcttttttttaatcatttttgttcgaaaaggacatcgtattccgcgcgcacgcttcccaaactactaaacgatgtattttttgtaaaaattttctataggaaagttgctttaaaaaatcatattaatccatttctaaaatttaaaatagttaatactcaattaatcatacgctaatggctcacctcgttttgcgtatcttcccaatcttctcaatccccctctcctcaaactcacccctaagtactatttacggcagattttttttattcggtacgaggttgtttcttaataaatctaatctaatagtttaaaataatggatcaccgatttaattaaaaattaaggttaaatttttttattgaaatttgtgtaagatttctcttatttattagagcgacacgtgacatcgctaatctagctagaagcgtttatagaagtgtcatatgatggtttaagaagcgttcataggagtgtcatatgatggtttaagagcttttgtacgtggtttaatggatttttagtatataatagttgatagatagttggagaaaaagaaaaagaaaaagattaaaggcaatcttatagtctatctattataggcatgttagctttaatataggcttatagatagtagctctactaagtattaaacttgctctaagagcaaggtcaatagtttagtaggctactggcttcaatatttatccaggtcatttatatatagctattaagagagagagcttgtataaaagcaaggttaataagagagcctgttgttggcgcttcaattgatagccatgttatctatagttaaccctatagtcaatgtgttcaatagatgtattgtataacacgaatatttggatggtgtttgaataaactgatgggacgtacgttgcccgccggattgaaatagttttcctataaatacgtatacgcgcatgtccagtagaacataagtgcaactgtctgagcaggagctcgagagccttcagcaccccacgcact

SEQ ID NO: 5716 - DNA, 2000 bp, Oryza sativa
ctacatttaaacaccccctaagtaagtgagaaagcacaaatcaatcacctctcctctcccaaccctctttctatgagctccatctttgttgaccaatgtggcaccggccatgcagcagtagcactatgtttaaatccctatttgcttcatgcacaacatgttgatcgaatagcctatttaggctatttttaatcctgtcattgttaattggagtttgagagtgattgtttagtcttaattagattatctaatgttattagatcttgttgcaatgtacggaattttttttagtcatgaatatttcaatttggccagaattcagaatttagacatgactggtcaacagcatggatgaaacaatttcgcattagtgacctaatcgatcggagcacagaatcaagcttatcccttcctgaaagtagaactcaattcatttccagatgcttttctagaactcgggatcacaagctagccgagctgaaggcgacacacgaaacaaagtgatcaagtagatgcatgtgaagaaattacaagaaagcattggacacgaggtcgaccagatctctgagttaggcttcctgcaagccataagctcccaggaagtccgtgataaaggcagggaaaactgaagccaaagcaatctgtgtacatttcttcacgtcctcctgacaacaagatgtttctttttcactaattgtcacatccagttccatgatctctctggaccctgcaaagtcagaaacaagatgacacgtgaaatgatccaaattagccgtgagttcttcgtttgcagccaaaattaacaaacaaacctaagagcctggtgaatgtttagatagcttggggatcaatagatagttaatactgatgacaagctttcgctattctcaaaaaattaaccaaaaaaaatctcttttactgtcttgtacatgtttagatggctcgaggatcatacataatgatactgatggcaagctttcgctgttctcgaaaatggccagagagacatttaatagacttatcaactgatcagaagatgtacagtacagcttcactggcaaaatgcagtcattgaactaagagttgcaacttgcaatgacatttaaactcttcgtgctgtaatgtcgacatcttctcaaaatagtacaaaattataaaggaaaactggttaaataagcacttctgcaaacgagaatcaatgagataattcaatacccttggccatcccatatttacgaaaggtccaactggaatgaaccttcagatgccaggaggttttccagttaaattcacacgtaattttgcacctcaaaaagcatgctctatgcgactatgcagacagcaaagattatgaattatggatattaggagagaactgggatagttcggggtatacaaggagtccctggaaacaacatgcacgaactaatgaaaacagagtgatatttctgctcttcttgctataatatagaatcagctgaagctgggtccgtttcaggggggaaaaacagttcattttctataaaaaaaagttcaaaattttcttaatctccgattgctacaatgtagaactctgcaaaggctgcccatcatatctaaaaagtgatacttggcaggcgtcgtctccaaatacctgaccacttggtacaccaaaacatttacaactcattcatagctaaccaaccaaatcacgagcaataagaccagaccacttggttttattttcctttttgaaagaaatacttgattttatttcacatagaaataacaaaaccaaataaaacaatattttccaaataattcattgtttcctccatcttctttcctgaagccaaaccaaacccttatttatgctgcattcacagctaccacttcacactcagctagtcaagattacctggcacactcagaaatgtaccaccaacatgtcagtaataaaaacagcctctaggaactaagatctcgacttaggcacctcccacttctaactagacactcca

SEQ ID NO: 5717 - DNA, 2000 bp, Oryza sativa
cataaattatggagtatattttactttgcctgactcctctgaaatccaatggctaaactagagtactttgtactgttcaacttttcaaactctggtggagttatatttgatgtctttttccattaaaaaatattttttctgtgtttagaaacatcaattgttaataactttaaaaatttttaattaaaaacatcatctcaaggatgtactacactaagacatgatgtatgtattagtcttaaaatgtacttaagttaaatgtttacctattttttataatttataataaaaaccatatataaagatcatatcattatataaaataaaacattaagaattactccctcgttcccaaaataattatcatatatgtttatgcactaagaccaagtataatttaaatcacatcaatcaagacactatgtacacatttttccataatgcatgtatcgattaaacacactatgccaattacaccttagcatgcacatattttctcatgatgtattaattgtattattataaaattcatatccatacggttatatgatgatcaatttgagaaattttgattctattatatgatgatcaatttaagaaggagggagtatggaaccaactatacatactactacttgagtactcggtataagaattgtgtagcccgttcggctagtttagactaggggaaccttaattttcactcctgcagaacataaccaaaattaacctagctcawtccttgcataggttgatgactaattactctcctwaaagtcgtaaaccatgggtaattaagacggtagtaatacaagagatagggtagatgagtagacgagggaccgtgcgaccatccaacacatgagaccgtacgtattcatacacacatgttgacatgtatggatggatggatcggggttggcaaaggcatggggcgtgacgtcagcggatctctccccgggattttggtggggtccaccatgagaggggtgtggaccggaagagaagaacccctgtgttgtgtttgctccgttccgttttgaagccgtgtacggcgttggacgctaacccccgttccgtacgatttacgttacaaaactgcaccgattttgtatacaccaaattcaaatcatctactactactactattgtttctgtgcaaatacagtgcaaaattacttcatgtgtttgatcaatcagctccaaactttcgttatttatttactactactactactacaggaattattcagaaaatcccatgtcgtcgcagacattattgccagaaaacagtggtcattaaaatcgcggggtcgttgtcactgtcacgcactaatccgctgttttctccggccgttcgcctgtttttgttcgtgtgatagctatcatcaatccgctaattaactgacaacgcatattggaggacgattgcacggccagcaacaagcaaatcttcgcaaccaaaaaaccatgggctgatgggctcccctctcctacgtggcgcccttgcacgaatctcaaaggcctcgtcaccgtccgatcggagcagcacgagctactaaaatcagcagcttagcttcttctccctctcgctcgcattgccatccaccaaagccaagagcagctcaagcccaccggaggagagagagaaaagaggaaatcatggaggcgatttgctgtggagattcgggtgtgtgatctggtcggatcttgctttcctgggaggaggaagaagaagaggtggaggtggccgcggtgtgatgcggtgggtagtttgcttatatcctcgagatgccgcattagccaagccagccacacccatcatcatcagcttcctctccctagctccattgccgcggcagcaagaaagaaatcaccaggagaagacttcttggtggtttgatatgctttgattgagcccctggagaagagaggaacagaggcttttttctctgcgggttcttcaattattcagggtttcttctggttcttgtctcgcc

SEQ ID NO: 5718 - DNA, 2000 bp, Oryza sativa
tgccgctacatttcaaaccttggtgggacctagcgatatcccaacaaccaaagcaaataattctcttgttgtgtgtatatagttgggcaacgtatcctatgcacacaggccttcacgtgtacacaagtgtacaccaactaaaaaatatcaccaaaaaatctagaaaaaatcatatacatactttcaattgtattacacctagggttaaaatcttaacgttaaattcattatattttagccgtaacaaaaaaacmaaaaatctgacagttttaaggttgtaattttgtcagaattttatctttttggttattatctatgtagaatgaatttgaagatgtgactttgcacgtacatgtatgaattttcctagaattttttgtgataatttttaattggtttacacgcgagagcctgtgtgcataggatacgctcccatatagttgagtaactatgttaagcatcccacttgccaaatgacatcttaggagtactaatctattggcgctgtagcagtaccacagaaacatgaaaccgtgtgcttatcatggctaaataatgctctaacgctctgttggaatatatgattgttgaaagcaaaacataggagatttttttaaggtctagtggcaaaaacaggagtttttcagctgttagagatcaaataaaaaactttcctatatatacggtgtacttatcacagttagtccatctaggaaaaaattacatggaaatcatttggacagatgcgccaaacaacccgatagatcgacagcagatgaacggcaagcaatgcgagtctatcaaccctaaccttgatattaccagaccctctgccacaagaagaagaatcgccacaaagatactaaccttgataagatgtccgaacgccacgctgatttgacacgcaatttcggtcgtttttgtggctaagcaacctggtagtagtagtagatcaagcacgcagcctttgcctccaatccatagacagcgatggctgcagtgaaacttcgcaagtagagtagtagcagtagaaagaatcgcgctttgctgaaaggctgaaagcaatgtgggagaaggggaggagagaggggaagggaagggacaagtatcgcggaacctgacccaccaaatagaagttgcatagtggtgggtggtggccgcgctgctgcgcggtgggtcgcatctgttgcaccggaaaaggcacccacacggggaagatccgggaaagctctcgttaaacgccgcccggccatcacctcaccgtctagacactgtgtgataaaaagccgaacaaccgagacgagaagttaaccgtgtttggttgggtagataactagattgagtctgtttggccggtttttgcactaagctaatcacggtttaaaacagacggggttggcttgtgccctaacggcgtgagaggcgtgacgggcggcgccgtcgtcgtcgtgttcggccgcatccggtggagggcgcttccggatctgagaggccattataagcggtcgcccccacgagtaatctcctcttccccttttctcccacctcgccgcgcacccctcccctccccatgtcctcgccttcctccccgcgctcttgctcccgcagcttcacgcttcccccgcactagtacagactcctgatggtggtggaggtaaacctcggcggctaacccatcgtccaccgcgcgcggcggctctgtttttggtttgggcggcattttggtctccttgggggtgtggatttgggttgggggggaggagacctgggtgaagatttgtggcggaaactgttgggggggaattgatggtgggattcatggagtgcgtgcacgattggttgctgtgggacgccgtcctggaatgcggagggatccggaggccaccgattagatagcggccgggggaggagggagaggagaggagagaggagcaggcggtggcagaggcggaggccgtcgccattagcaccagtcaccccgaggcgcgagtcaccaagcc

SEQ ID NO: 5719 - DNA, 1256 bp, Oryza sativa
gccattacgacgcatatagcatcgcaagggagaaaatatgttgctgcctcgtccaccaaccttgaattcaaactctactattgcctccgcaaaactttgcctcctcgagctttgtcgtttgcaacgggacacagctcgagtagaagatggaggaagccgatctcgatagcaaggcggtgtagttgcggaggaagcgaatctcaatgctgcagcgataaagaaggtggagctcgagctcgactacgagcgatgtgatccctgatgctcactgtcgaggtggttcttttttaacttaggggtgatggatatggttatccctaagctcgaatatcctgagctagaggcatcatgatcaatgatgcgccattgacaagatccctgctaagggaggtgtctaagctagagtctactggaatcatttggacaagaagactctcgtatgcaagatgctaggttatgtgtcgtcctagaagccaatactatccgcggtgtcgtattgaggtttaacctagtgctactgtactcattgttgctgcagagtttggcaaaatacagaaaaggaccgaatgccatggagcttcttaaggagacaaaggaatatacccgtcatggcttgccgaaaagattggaagaaataaagaagagagacgagaaaattggcatatggggccatgggtattacttacttttcatacaatttttcttatggacgtggcaacaacaaatagccataatttaactattaaacgtgtttttttctcaagattgacgtttactatattggagctaaaactatataagttacgatgcgctgatgttgtaaaagatattaccatattttataggctgagattagaacatcatgtacattttaatactaaaatttacaaagtttgaccgctcttcaacttcattttaactagacaaaaaaaattcaaacgatactgtggtactacagtaatatatacctactacaaagtataccaagtaccaacacgaatagcaaactcatgtttgcttattgcattgcacgtgccacaagaacaaaagaacaatatcccccatgaggtcgactcgctgtcactgacactgtgggcccaccaggargcgccggtcggctcggcatccaccacaccactcctcctctcgtattaataccgacccaaacacaaacaccggctcacacgctcgctcctcctctatccccgactcgaccaccacgccgcgcgcgccatcgccgtcgaccaccaccaccc

SEQ ID NO: 5720 - DNA, 2000 bp, Oryza sativa
ggaaattcgtataaagtaggaatcgaagaaaaggggtcctgaggaacgtaaatctgaataaatggagttgggtttagactcaaatttggtgttcaaaagattcaaggacagcacgcaacattgcaatattctgaatgggtgttgggtctttgataagttccaaaggcattgcgatttatgtaatagatggggaaaggagaggacgaagaaaggatgtctaacggagggcatcctttagagttaaagcaatcgatttaatcgagatctttggcacaaaattaaacacactcaaataataacaaattctattatgcgggctgggctaggactttcaaagaggggaaaaagactttatctgagaaagacattttcttttaaaatagcctattatatttcacaaataaggtttttagtaaatactttattagtagctgttatttgcaaaataactctcattggacttaatccttttaaaggaaagtatttttaggaaataatcaaaatttgtcagggttacggataaggcatacctcttatcctatgacttatggaatacgcggatatagtataccttcacgtatacggatcgttttcgtatatgccgttggaatttgttgcaaattacggaaaatatctccacgagtcaagtgatttccaaagtcctactcggaaggaatagaatttctgttatacttggggatcaagatgatccacggtataaaagagacccctagggaggggtgcaaggcatcgaatttcatcacctacacacccacaatagttcaggaagccagagtacgcggagtcaagtcgccggcagatcttgttaagtacattgactatgatctcgttggtatcgtctgttttgtttacttcctttgtaatctgtggttcttcatcatcaatctcatatgggctattacctgataaggggcctgaaccagtataatccttgtctgttgtttgcttgatatcgtattacgtaaatcctcattccaacatacccaatacccaaatcatccggtctacgagcatcactcgtcgacaaaattatgtttctttgtaaaatagtatctgttttaatgaactaccccttagaggtttttcatccaaaattgtaatatataactttatttataaaacaaacaagtaagagaggttctaatacataaagggtttttaggaagggttttgtaaatactttcttacttaacatatttaataatcatggttctttcaataaataatattttcaaaccaaaatataagcatattacccttttagtcccaagcacagtaggaaaataggaaataaattccaacaaattctggcatgaacgaatttaaaaaaaaacatttttgattattttgaattttattttcgtgttccaaagtcaaaatttttaggtgttacagtttgccccaatgcctttggagggaatttaatttagtttttaatttaattaaatatcgaagtgatgtttgtattaataaaattagctattgagcttttagggtagactagaatgccacttgtgcaaggggttctatccatgttttcaaaaattagaggatgttggatatctgttttagagggtctttgggagagtttagcctctccctctaaactataagtctctaggggagggacttatgttttttagacataggctaaagtttaactcctctctcccaaacaccccttaaagattgaggtatatttttttagacaaagagttgagcggcgtaaaataataaaatagacttgtccccgagaccgaggaccttaactcgaaaccgatctcgtttaccacctatccaacgcaggtcgcaataaaaaccaaacctttctccgtctctgtctcgttctcccttctcgactcatctccttttccttctgatttcggtttccacgcccaataccgtgtgcacgccggcgctactcgctgcaatacaaaaccctctcgcctagactcgcccctcgatcgagtcatcgagcc

SEQ ID NO: 5721 - DNA, 2000 bp, Oryza sativa
atgtcttatacggaaacaagctttgaatataggaggagttccgcataaggaacgatgaatagagttctacatggaaaagacaagaaatactcggattgtatccatattggtttccctagttatacttggacaagggggcatctgtgggtataaatacaagcccccctaggaggagaagggagacacccaccatagatgcacaatacacagggggttgctaggcgcgcatgcgcgctaggaaagtagttggcgagcactccctccttccctttagtgttaactacctatattagttaatatacttaacgctaatgatagtaattaggaaaaattatggagattttttgggagatattttttactaacagactaaaatttttttaagttagatttgaaaactttcgatttaagtttaaattttaaagtcaaaatttaaaaactttcaactcagatttgaaaaatttcaacttaagatttgaaaactttcaactcagatttgaaaactttcaacttgagatttgaaaattttcaactcagattcgaaaactttcaactcgagaatcaagattcgaaaactttcaagtccagatttgaaaaatttgaaaactttcaatttgagattcgaaaactttcaactcgagattcgaaaactttcaaatccagatttgaaaaatttcaaatcgagatttgaaaaatttcaaatcgagatttgaaaactttcaagtcgagatttaaaaactttcaagttcagatttgaaaattttcaactcaaaattttaaaacttcagatttgaaaattttgaaaactttcaactcgaggttcgaaaactttcaaatccatatttgaaaaattttcaaatcgagatttgaaaactttcaagtcgagatttggaaactttcaagttcagatttgaaaactttcaactcaaaatttaaaaactttcaaactcaaaacatgctaaagataaaaaaatcagaaaaaagagagaaaaaaagggtaaaaaaacgaaaaaaaaccgtagaggagacgcgcgcgcgcggcggcgcggcggcgtttggcctcctgggcctgaaacgcgcgccgccggcgcacgtgcgctaactagcgtttccagccaatacgtcgctatatatcgacatcagagattagcctagccataccccgtccggtacctacaggggccggcatgagggatctagcgtcatctctgatctcgacgagttcgtgctcaaggaggaagactaccttgtcatcgactacgagttggttatctagccgtcaggttgacgacagttagataggctaccccaaatattgtactggtgtgattatggtgaataagagcaacgaccggcttcggtcaacaggagtagggttattacctgacaattcaggggcccgaacctgtataaaaatccttgtctctgtactaacgatctccataccatccaaataccgtagttgtgacatcaaacgtcgacaatttctatacttaatgtttatattattgcaagtatgaaaactactagataatttcttaggctgggattgccttaagagtacttgctgttcttgagggtgtgttctgtaactatatgtgtccaccttctaatctattgttttccacgcatgttgcatgttaaatataagcctacaattttcgttcaccataatatattttttttaaaaagtattaaatggttaaagctgtaatagtaccaatttaataataacacattttaattaaatggaaatggagagaataattaattggtaccatgttttatacataatttcacaccaatggaaaaaataataaaaaggaaaaaacagaaaaactccctagctggcatggataatacacaaaggaaactgaataaacagaagtttcctatttaactgagagttcacatcccaattttgaaggaatccaaggaccaaaatgtaaataatcgctaaataaatccggggtttaagcaaactgcctcctccaggagag

SEQ ID NO: 5722 - DNA, 2000 bp, Oryza sativa
tcgtgattgcgcttgggaagaggtcaagcctatatcatcatagatctagggacaaggccatcaacgctaggaacattaagggcatgtttggtagagttccaactcctaaatttagttataggagttggatctggagtgaagttgtagagttgtataaacccagctccatctttctagttcattttatgagagcacttctatcagttccgttctaatttttagtggagctgaaaaccatttggttggactccaactccaggaaaggtggagctgaagctggagttgtgccaaacatgccccaacatcagtgacgcttatggatgccacacaccttcctataggcaatgccattgacgtcttctatgccttaccatggacttctctagatatgttcggaatagcaatgacactatcctagataccatgaccaccttaggtgtgtattggaggttggtcggcttcgatggttatgggaaatgctcagttttaggcgaatgattgatttacaactcgattgctctttagctgatatgtgtgaaatttgatcgatataacgattggccactgatcttgaagattttattttcgattggaagaagacaacgactatatgtaagtcgttgggaagaaataatgttgtgcaaattctcacatatcacagatggaaaatttatgtcttggagaaggtattttgagtagttttgctatgattttatgattcgatgtcgttcgtcctacgacctctataataattatctatatctttttcgaaccaaggccaaaatgaattcaattaaatttaaaaaatgcatgtgcctataattcaaaggtgttaagtatgtgtaaataaggagtaaattggattcatggtacataaacgtggcaggtaagtgcaatttggtgcaaaaacttgagaagtgagcatccaagtgcaatagcttgacatgtgagtgcaatttgtgcaataacttaataagtgagcgcacgggtgcaattttgataaagtaacttaagaagtgatgcaacaacttaattatttcgagtatttttttctacacacattcagtttttaaatatttaatttgtcaatacacttccacatatttgtatttatgagcatacttataaatttgtaattttagtaattcgaagtcaaataaattttacaatgtagaaatgtttgtatttcggttgagatttgagaatgtgaagcaaattgttggtgcaaattggatgagcaacataatttcttattatagattgaattcaagattaattataagataatacccacatgattgctatttaatgtcatatcgacctcgtgaaaaaaactcacctaccactcgttaactaaaacaacacatacttaaccaagttgctaaactaaaatactaaattgttaagtccttactactagaacgcacctacttacaaggatgttcaattctcaagtattcatcccatgatagtaatttactcttaaaaagaaagtgtatgtgcatggatcatttggaggaacaaaaggaaggttttaactattttgctagaatgctattattgactctcccctagagaatataaatggacagtttattctcctgaaagtctaaacttgccatcatagtttaagatctagtgtgagctgtagggagaccctttagaggcctccaaaaatggcaaacccaagaacgaatgatgcgggagagaagcgcctcaaagccaaccaccccccctgcaccgccatttccttccatctctctctctcctcctcctctcttgccctagagagagagagagagagggagggggccgcaagagagagagagatcgatcaccggccgccctccggagctcgcgcgctcgttcgttcgttcgttcgatcattcgtacgtccacaacaattccggcgacgcgaccgtcgccgtacgtttgcggtggcgcggcagcgtcgtcggcggtgaagaagaagaagaagaagatcgaagaagaggaagagg

SEQ ID NO: 5723 - DNA, 2000 bp, Oryza sativa
aattagcatcccattatagaattccgggggatcatacttttcaaaaggatataatttgatcatttacttttattcccttatatcaagtataaacattagttaagggaaagaatagcatgaaatttatcaacatttgaacctatagatgttgaaaaaaaattagtatcataaattaaatgtagtggaacatagattaggtgaaattcaaacaatatcaaatatattgaatcaataaacttatacttgaaactggagaaataaaagtggatgaaatgcagacttaatctttcaacatcctcgaaattcagtccaataaatctcgtgtatacagtaaatcaaattcaataggtgaatgtgtataattgttcgctgcatgaatggtaaccaatccgatcatttattgtgttgacttgtctgcctctaaccatggatattaatgagtatcaagcataaacaaggttttgttggcatagtactgcccatagacattggaagggtaggattaatccaaactagatccaactgcataagagttaggactagtatgggattaggggtggtgtgaggactgaatgaggatgtcatgtggaaaaggtggaaagatttacctggagtagtggagcgaccagtagaagtactggcagatcttctcgaggatgggggtgctgatctcggggaacctaacctggccctcgcgcgtctcggagaagccgcctgtgttggatttggatttggtggataattcaaggcaatctagggtttgagaaagcaaagcgaatcggatcgatagatggggaaggagacgaaccgggggaggtgagcatgttgcggagcgtgttggagaccatggcggccttcttgtcgacgacgaactcgaagccctcggcgctgatgagcttgacgaagccggacggtgcgtcgtcgtcgtcgtcgccgtcgtccttgtgcaggtggggtggggtttggtgccccggcgcctctcccttccgcagcatcctagcttgcccccttcttcctccgattcttcttcttcttcttcttcttgtctccaggcgagacgcagccacgcaggaggaggaggaggagatcggagaagaagaagatgacggccaggcctggtcaggccttgtgtgttgggcctcatccaggcatatgggcccgtctccatgtataggcccaacggcccaagcgtagcggaggctcggcaccaaaactaaggggggaaatagtaaatttgacaaaagaaatacttttatcaaattattattggaaaattatagattcaagatttaacactaagtttattaagaaatgaggtttaaaacttaagtatcacaaaattatagatttaataataaagttatcactgattacatattatggggttataattatttaggctttgtgattaaattggtattaaacatgtaattttgtgataaatttatggctaatatatttgtagttttacaataatctgtattaaattttattaaaatatagcgaaatttactctaataaaagatgcgagcacccatcatttggttctagttaggcataccccatttggtactacttacttgttgctactagttaggcatttgatattaatagtagttaggtatcgcatcgtattcctaattgatattcctattgtacatcaagactagagcatcgtatcccttacgaaatgaaaatcaggctaacatgttatatatacactagtagagggaaggtatatgagtcgaatccgagtcatttgcattaccactagtctagtgatgtgcatccgagtcatggaacaaagcaaaaaaagatgtccaaactagcagaagataattaacctgctcatttttgtatgtgcagaaaaatcaaaacaccgaccaaaagcaaaaaaaccaataaataagggtgtagggagttgttgagttgggtccgcgaatcgtggtttcccactagcaagcgcaagcgcaggcgcaaacgcaaacgccgccgccggt

SEQ ID NO: 5724 - DNA, 2000 bp, Oryza sativa
tgacttgtgtgtccttcgtgatactgcccatctatgtgttgtatgatgctagtataccttattagaaattgacacttcaaaggaaggtagaggaaatgtggaggttaccaataaattatactccctccttggtgagactaaaacttaggatgggttcatggtaactccgtggtatgtaaaacgatactagccattagcgtataattagttgaatattaattattataaacccaaaaatatgtttatttgtctttataaggaacttctataaaaaaaaagtttattttaaaaaagaaagcacccaccatatatcagtttgagagtgtgctaaaggaaagcgatgaagttgcaacttccaaataaataaacaaacgggaccttaacgtatatatgatgataaatatacatggcttagtgcaatcaccatgatattcatatcctccatatcataaagaattagttgacgctacttttccagtgcaaacattactaatttatattcgaatctaatgatgctcctctttcataatgttttggatggtgtttagaaaccatttctcatataagacatggtttccttctctttcttaattacctcacttgtcacatcatgtttttttctgtagtaacttatttaattctatggacatgttgtattgtgaatgtccttagtatagtcgttttaatgtatagttaagatcaatatgccatttgaaaaggtcatccttatatgatggatattccaacgcaattaatgtggaaaacatgttacaattagtatgtatatatattggaattgttttcaaacattagggagaaaaagggcagcaggtagtatcaaatagtacatgtgcagcagcgagaaaaggacacaagttagagcagtgacacagaaattccatctcacagaagtgctagagtttttaaaattacaagtggaacatgtctgtttgatactctatactgctcaagatgccacatttgcaattgtaaacacttcccaaagagaaacaagaaaaagaaagaaatcagtcctattcataacaatcatacatctcaacagaaacctgtgacccaaataaatacagaggattgtgactaggtgatgaggacctgaggtgttgtggcgtccacactgcaaatgcatcgctctgaaagctgcgtgcagttggaggttttccaagctcgggcgacatcatcctgtgtgttactgtttctgcctgctgccctcgatccgacgctatccctacactggttggcaggacgcaggggaccagggatcaaatcctgagcgtccattcgaagcaaaatatggaaatcagaaaaaaaaaagagataaaagaaatcmccaaagaaaagtttgcttattggcaaaacggcagccggatgcatctgtcctgttgctgctatttttttgaaaaaaaattgggtcgtgtacattaaattgatccaaacctcatctccttgtaaggtgcaatcattagaaaaatgaagaggatcacgggtgtattactcagaagtcagaacatagtagattaatggttagcaaatggtgttgacgatgataggcaacattagacgctacactggatgagacagtcatcaacaaggcatgcgatgaaggcactaactaattggggggcaaaaaaaaaaatgaaattctcaggcgccactactgatgcgtcactgtcagtgtgggccccacctaacacaaataatgtgacagcaagtggttagcaataatacaaggcaacgagcacgagcgaaattgaaaaaggtggaggaaataattaattaatttaattaattgattgacacaagtagaagcagataaaaatggaaaaaaaggaaaatgaggaaaggaaaaaaaaattctgcagcgctggcttaatttaatcccctccattccggatgcctctccctccatttttttgccccctcgactgcagtctgcagccctactcccccacaagcgcgacgcaagcaaggtgtttgtcgaa

SEQ ID NO: 5725 - DNA, 2000 bp, Oryza sativa
aagtgaccaatgaagccacctaaagttgaaccgattttgctaaacatcacacgggtgattttttcgttgatatttgacagatttttgcccctacaattatgcgccgagatcagtacacgattctgcgtcgatgttgtcgtgaggtggagatgagacctcgtaggtcccacgtttgccgctgatcacgattcacaagaaatttacatcctagctacgtgtaaatatcctatatagctaaaataaaatataaaattacagtcctatttaactaaaattgtatatgtaaattcagttgatattaattacaatcctatttaactaaattcacatttgtaaattcagttgatttaacatgtaagtgcactgtaattttgataaaaatattgtgtaagtaaatatgtacttattattttctttmaaatataaaattacagtcctatataactaaaattacatwtgtaaatttagttgatwtgacatgtaagtrcactktaattttgataaaaatrwygtgtaagtaaatwtgtattagttattttattttctagtatgttggacgtaaatccaagggaagaaaaaatctgggtgaacccgagtgatgcataggcggtccctgaacaaagtgaacttaattctttggctatttcgcagggacaggctcatcttaattgggcctgcacattgttgagccggatgctaatggacggcccagcttataaacccaagaaacgggccaccaattttgctcgtgtgctgagctgaaaggcacacatgaattctcacatgaggcagcacagatgatcgcggtattgctgattgctaatccctccttgctttccggggagctgtctcggccatctccaatccaccggaattgagggggggaaaccaccaagggtcgccgcaaccgccacggcgcgtggcgagaggaacacgacgccgtccatcgtttagccccgcgggcacgcgcgtcctcgcgctcgactgcatgtatgaagccaaaacaactctcgccacttgtgccaaaaagccctgcgtcctacaggcacttagcccttgttttcctcctgcttctaggcacaaaagcacgaaatctgccgtcacctgagttcatccgtgcatactgcccctgatgcaactccccctgaccccctctataaattggctaagctactgctagtcgatagtacattgagcttgcgatcgacgtatatatatgttggtgtacttgtgcagggtggagaagcagggcacgtgagcggccatccagtgtagcttcgctgcgcgtccatggcggcgaacgcgcgtgatctggagtttggatggtcgttcatgtgtccgtcttctccaccgagcactggcatatccaagaccgagacagcgagactccgagagacattggtcgagcgagcgcgcgcggcaccgtatcctgcactgtctatgagttgacaacacagacagctgtgctttgactgtctatattcataacactgatctactacaagaaagtgtcatatcttatagtactatgttagtttattttaagatactgttacattttattttaaattggtatatctcatattaggttgatttattttgagagacgattacatcctattctggttggtttattttaggatagtactgtaataatatatcaatatctcatattaaattaatttattttaagactgttacataaaatttttgattgatttatttaagtacagagcgggtaagtaaacgtacacgttgccatgtcgttcacgtttgcaaccaaggcaacaactcgctacatggatcagctcatcagcccacggaaaagcggtgctgccgcgtgggctgctcgtgtagtaggcccagccccatgagttccaggaatcacccagccgtctctctccaaagcctctcaactccatcagcgaggcatccaccagcgagccctttcctaatccgacccgcgccgccgccacctcttcctccgctgcccaagagcg

SEQ ID NO: 5726 - DNA, 2000 bp, Oryza sativa
gaaatwtktaaataagatgaatggtcaaacatatactaaaaagtaacaataaatcaaatgatatgaaaagaataaataattacttaaatttttaaataagatgaatggtcaaacatatatcaaaaatttaacgatgtcaaatattttaaaacggaggaagtatatatcaacagcgagacatatatactactagctatatacgaatgaatatatgcagagatcaacaagagggcatatatatgcatagtcgtagtaggtagccatcgatcgatcagtctctctcatatcaggtaaggttaagttgcaggcagggcagggtatgtaggcccggccagggattcctacgtacatactacgtaacgtacgcatgcatcttattcatatatgtacactcctattactacacatgcacctccggaaattaactactgagatagatagctagcaccaagccaccaactaccacagactttttaaataatggactgtctattacacatctcatataaaatatctcttaaaatcttataatttttaaaccgttaaatcacattaagattcgtgcagacactcaaaccctaatctattcctcctctttttcgttttccctcagcaccacaccccagaacctttcgataccctactcggttaatctccgttgtcgctgcctcctttgccgccatcacctaatgccccgtcgcctagcctcgccggttggttggaaggtggttgacggtgttggcgagacccacctgactagcctcctctccccctctacttctcctcaagttgtcggtggtaaggtgccccgcctcatcgtccttcacatcactatcagctccccgccacctgatccgctcctatcggccatcaccgcctaacccgccgctccattttgcccctctgccaacatcggcccaccgttgactgttgaccctacgtctttggtagtggcaacgccaccttgccgcctgccagttccacctcctacgtccataattctaagcccaaccatcttctccttcttctccctccctcttcccaacccataccccaatacggaaccttaatgtgtagaccctctgctagatttaattttagggtgctatcgacactgaagaagaagagtaggtcgtcagagttgaaggaaaaggacctaaatcataaatcacaaagcatatttgttgatctaaattctataaaatttagggatgggttttctttcgattgaaggttggcaattccgtacgttttaacaatcacatctacacacatcttgttgcagtcgcatcttctgctggggcacgcatgcatcgcaatattatagttgccttgccggcagcctttgcaacctataactgcatgcctgccatccatctacttccactgtaaacgtacgtttcatttctcggacgacatctcaactaacgaaagggattatgtgttctactgtgctagctggagtagctgctagatcgaccagaaaaagtgtagggaagcagccacgcacatgcattttctgcgtagtacgtacgtactactagctatgttatcttagtttgcactgttcgtcatctttattaattaattcctgcaaaggaatcggaaaacttaattatgtatgtaatctctcccggccccacctaattttttctgatgctagctactatggtagtttgcatgtatgcaacgtgaaaaataacagcgtgtagggtaactttccatgacacagctgcagagctgctagcgtcgacagagctaattaattaagagttcaattagctggggctgtcatggaatgggcgcacacaagtgtatatataagaagcagcttccatccatctatctctcacactgatccaggctctctccactactatatgcaagttaagttagtgcactgaaggagagcctgagatacgtcgtcgtacacacttgattaattaatggcgtggaggaacagcgggcgggtgaaggtgatgaacaggaggagcagcagg

SEQ ID NO: 5727 - DNA, 2000 bp, Oryza sativa
ccgaaacaacatgttagtagaaaataggaacccgtcagctctgtaccatcttccaacggctcgtctgcttgtagaccagcctgcagatcaattcctacggaacaattgaatgggctgggcacggtcgggagggatgtgggccatgtgctgttaggcaacaacgggtatggcccaatgcaagtacacgagtgaaccttgaggttgtatggtccaatacgataagtggctgatggcccaagacttttgtagattcctcgaagtttttcttcgatttttccctgccagatcattctctctctctctctctctctctctctctctctcaggcgtgttcttagcwcaywcactgtgcaagtttcatgtgagtttaaatctcggtaaatgagatgccatatagactaaactgatgacatgccatgaattttattaaaagagataaagaatgracatataaacaaaactkggtwtatacagttacctatgcttraagaccgwataaamcccaattgggactgaattattttaycctatgccttaaaagatggaaatgaaaccccactgtgaccaaatagtttcataacaccattcaataattaaattatatgaatataaaatcacgaaaatgaaattatgcatttgagacatttgtttcatatttttagattatgtagcactataggaaaccacaagatgaaactcccactgaaaatggacatagtcagatttaatttacattgctgccaaataaggccatgtctgtttccgcttaaaattattgtaatctatattattgagctagattactataagctagattataatammccgatatagaataagttgttamctgttkgtttctctgaattattagttgtttgttagttgttagccacccaataatctaaaaaagcacctttagagtggattatcagattatagaaatcgtgcttatagattataataatctatcataataagctatttgtttgtttcaatttacttctaacaatccagattataataatcataaactgaatcaaacaggacctaaatctcttcaaatgacacgacatctttacaaatgagagacgtctaaaattgttcaattgcatggaaggcacatacacatatcccactatagatataaatcacgcccctctaaaaaatggaagccatatatactatttcttttattcttacactaaactatggtcgtaattttaaaatatgaataaaatcttatcataaatgacaaaatatctatgacagggagtattaggcaccagcattcaaatatttcccttctatatgacgaaacaaatttaaccgcatgtagaaagtaaaaaacattcgcaatatggcctcttgcattcaatttagattcaccactcctcaggttctcattcaatttcaaggagatcatggggtactctgacaggcatcccacgccgaattaaaaacccaccacatttatcttgtttcaccatatttcccagccacacccaccaccccctacacaaacaacgcaaacacctcactgacagctgggaccaccaccacgtgggggcccacactccagtgacgcatgaagccaaaccactcggtgccccgaaaccgccaggcaccgcagccagcccgggtcgctgtcgtcactccctgcccccggatcccaccaccggtttcgtgccccggttgctcacatcacaccacgcttgcttcgcttccccttgttccaactcgcgtactacccctcccacccccgtaattacgctcacattgcaggggtggaagagtaatttcaggggccgcaattaattaagtcaacacgaaccgcagcctcccagcccacgctaccttggctacaggacgaccccactttccccaaactgcccctcccctccccaccccgcaccatcgcctccaaaaccaccaccacctcaccctccttcctcttcactctcacgagacagcttcccacgcagcgcagcgcaaccgcagca

SEQ ID NO: 5728 - DNA, 1794 bp, Oryza sativa
tcgcttgtttgacgctgttttggagcggtgcaaggatttggctgcgtcattcgatcgatctcggccgttgatttgctagtgctcgcgtggtgcgggaagcacttgggcgtcgctcgagcgatctcggccgttgatttgctgcgctgttggatttgaaaacggcgttttaacacagctctagcttcagccccgtttagcacagctccagctcccaactctaacttacctggagctggagttgtgcccaacagtccaaatcctccgttttttggaccggaattggcagagctgctccaaaaaattgtactagggggttkarctgggtttttgctgctccatagctccactccaccccaaaggacccactactttttaatttttttagtgtatttacacaaaaatgccaatgaactacccctacccacctcctctcctccagttatctctcatcctcaaccatcctcccggaggcccaagtcccaacctgtggcggcgtcggcggtgacggcagcagcgacggcagcaaggcggcgagcacggggacaaggcgcaagaggcggccggccggcgggcagcgagcgcgacaatgaggcgcgagaggtggccagccggcggtgggcggcgcgcgcggcgacgacgtgcagccggcagcgaacggcgcagctgggattgggctgccggccggctagggttccccttttttttcaattttttttcattttttttccgatctatagctgaaatctagccaaacacttctcaacgattctctaactccaacaggagttagctcccactggagtaggagttggagtttagagccctaccaaacggggccgaatcatctccacctctccttagctagaaaccaacaaaacagtttcagctccatctaaaatataaagtggggctggttgaggtgctcttaccggatgaaagaggtggaactgagtttagacggttccacaagtccactccagattcaacttctagagttaaatttaagagtttgagccatacgaaacggccctgaagaaaaccgcattacctacaaatatttttacaaaagaaatgtttatcttggaaccaaatgctttgtcttagactccgttcgttctctcgatttggagagatattttcagcgcacgagaaaattaactaaatactattaactattataaaattgaaaaatcgatttatttgagtttttaaacaatttattacatagaaacatttttttgaaaatataacatttaacagattaaaaaacgtggtaataaaaaacgaagaaattgaagtttgtagttgagaaagaccagagcaaaataggacacagaggcccttgacgatttaccagagcgaaatggagaactcaaagcccaaatcaaagcaacattaaggctgtccagcccggggatgggccctatacgatttcagcccattatatgatcgtcggtcgcagcagctaatgggcctccatccggcaccttcccgttgtccgcctgcaacgtttttgcactaatttcgctgaaacccgagttccgagacgctcacaggtagtagggtactctactccgtaccgatcccgccggctgcacgacgccgacccgacacaccaccgtgtcaagccgcccgcgcgacacatcctcccggcgccgcccgtgccgcgcgcatgcaaagacgaacgccgcgacgcgacgcgtgccgaatgccgtggcgcgacgcgacgcgcccaataaatagcaggtctcggctctgctggtcatggctggctgccggcgaccgacgaccgag

SEQ ID NO: 5729 - DNA, 2000 bp, Oryza sativa
gatgagacatttcctagtactatgaatctagacatgtgttcagattcgtagtactaggaaatgttccatccagtcataaggttcttatattttagaacggatagagtaataagtttataatattataatactattttacgagacaaatctatgtacacccttgattttgtttttaaactaagcatttgtaaagtattgatgtttggaatttaaaagccggacaaagttgtgcggtaaagagaaacgaccaggggtcttccgactagctccacaaggtgatgagctagacggcctaggtttgaagcctcacacctcctaattatttgatattaggtcattccctaatattcgtgctaaatatctatgaccaaagggagtacaaagcattatgattgggaatatttgggaactgttgtgcaggtgtaaccgtgtatacacactagcagttgcataggtccttccctaatattcgcgctaaatgttaaatatctatgaccaaagggagtacaaaatattacgagcgttttttagtttgtgcgctaaatgttaattatctatgaccaaagggagtacaaagtattatgactgggaatatttgggaactgccgtggaggtgtaaccatgtatacacaccagtagtgccatcggttgaataagatcaggttcaggtcagctagttttcctcatctatcttcaaatcgatgcacccgtcagtgctgtaagacaaacaacaacaacaactagtgttttcttatctttatattgtacttatcacttaatgttgcgagtcttaggacgttaatacctttttccttatcgcttccgcaagaagcacgtgtaattcattgtggtctatgtgaagtgttttatatgtctgtagtggcagtccaaacatatcaaatttattgggctcagttcgtttgtgatggttcccaacctcccttctcgatttccgtacgcacgcttttcaaactactatttcggtgcgttttttgcgaaatgtttctatatgaaagttgtttaaaaaaatcatattgttccatttttttaaaaaaaattagctaatacttaattaatcacaccacttatgaacctttgtcgccaactgttagtcatgttcttcacgtgttaccggcttacagcacacatctcttttgtggttcccgtattcttctcaagcaaacactgaaaacactactccactatatgtcagtaggtcgcacatttacaacacattagttaatttcgtggatgaggtttagtaattattctctggatggatatatctaaaagctattttttctcaagtccaattatcacatagctaaaagttcagttgcctaactttctatagagtgcgttcttcaacaatgaacacttgttttttctttgaagaatctcgagatatattttaagcagtacatgttagaaatattaggtcaatagcatgactatctttctgaaattggggataattcaatggcaaaccatgagaataagatgttagccatttggtaccaatgctattgataactgcgaagatttgatgtaatcatgtagactaccatctccataaaacgaagcatgcttattttggagaactatgttcatgcgtccttctgcaacagtatggtggagcatgtggcttggctacgcgcaacatgatatctatcagtggaggattgagtagctgcagccatcttacatggaggaactaacattgaaagcaacacatgcgattcatacatgaagcctcccattttgacactgtaattcttgtgcaatttgatgatcagataaaatataaatttatatgcaaattgatatgctagctgtaatccacatatttcagtagtgcatgatccacttgctattccactaagattgcaaaaacactgagcaatcgggggatagcagaagttgagagcccctatataatgaacaataaggccacagggttgccacaattagagaagttcttgttaactccgattgagacc

SEQ ID NO: 5730 - DNA, 2000 bp, Oryza sativa
aaatcctggctggcacgcaattaaataaaataattgcagcccgctccaatattccacgcttgagacttgagggggtctcgcgtgagggggagtgtataaagtgaattgcccgcctttccctatcagcttaggctcacgtgagggggagtgttggagtgtataaagtgaattgcccgcctttccctatcagcttaggctcggcgtcgtcgccgacgtccgctccggccttccccccatcgttgcgctccgcgctgacatggacgccctccccgtccaggtcccacctcttcccctttctctgatttcggtctgggtgattgatgaatggtagttttagttcgtagttcactctaaatcgcttgttttgagggattgattagtactatgaccggtttttctctttgttcaattgacttcattcggttgtttgtgatggtaaaggaattagtggagtaggaacaccagatcaaggcggcggcggtggcgagttgggggagaaggaggcgccgcatttggacgtgcgtcgtcgtagctgagggcatgaggctgagctgtgctaggacgacgatggcagcggcattgctgttggcaccagtggtggtgctgtgctcgcgtccaacggctttcggtgcgaggcgacgtcgccggcgccgatgggggagaagactgcaagatggagaggcacgtcgatcrtctccagctcggggcattaagcgtgcaagatggagagtgtrccgycgtckyctccasctccggcgggaaggagaagaagaagagctcgtcaagaagctctaccgcgccaactctggcgacgatgaccgcccgcggtaccactcctctggtggtccatcccccgtcggcgaggtccccatcacgcactagctcatcaaggtggtggccgaggtcgacggaatccaccgcggcatcggtggcggcggcggcgttgctcctccacctcgtgcagctgaagacgagcaggtgcgacaactggtggcggtggtgggtgaggaggaagttgagggaggtggccaggcagcgccagtcgctgcacacaacgtcgtcgctcctccgcttcgctcgcttacagaagaggagatgaagagagggagagggaagaagaagatgagagagagaggggagaggggagagggaagagggaagaagggaggtgtgaagatggcatgtggggcccacgtgggtcccattgttttttattatttttccggtttacattgccacgtaagcgccacgtcaatgccacgtcagatgaagaccgagtcaaattagtcacgtaggcgccatgtcagccaaaaccgctatcaaaaccgccgagggaccgcctttgcccggttttcgtaagttgggggacgaattgtacctggttttgcggttttgggacgaaaattagactgagccacaaatagagggaccaacagtaaacttattcctcgcggaagaaaccgaactctacaaaagtggcaaggagaatcacagaaagccaagcggcgagaagttgtccgattggtcggtacacgtcacgaaatccccacacgtcacactgaccgtagggcccaacgataatccgccacgatacgcctccatccaccatgccggtccacgcgacttcctcacgcggaacgcgcgggacagtcgcccacgctgacaggtgggcccaaatacccgagcccacgtgtcagcctccttgcccattgctgcctgctccccccacgcatccgagctctccatgcacctggtccacaactcttcccttcgtaaaccggtacgcgggcccacctcgtcagtgagacggtcgccagcacccggtccaggtagctcgcgttccacgcgaacaccactcgagctaaagagagagagaaaataaaccgctcccatctttctccactgctgctgcttcgcttcgcctccgatctaaaccctcgcgccgccgccggagcagccagcgagcgaaggggagcgagcgctgcgccgcggtgggcgcg

SEQ ID NO: 5731 - DNA, 2000 bp, Oryza sativa
atctgtattagagtagaccttaattttgtgtgacaaaatttttcttccacgaacggccgtctagccgtccaggtccatgggattttattcgatagaaaaggacggggcaagaataatacaactgaatattcaaatacgtgttaacgtttcagactgttacagatatactttccatgcagcgatttccttcaaaaaaaaaaaactttccatgcagcgtgcatgctctctctttttttaatggtgcatgccaatttctttgttctgccgtgtgagtgtactccattttcttctgctgaaagtaagtgtcgatggagagtcagtttgacgatatckgtctttttttttggcaaaaaaattaatgcatgcccaaatggatggggttaatttctcaccaattacagaaagtcagaaacacatagctagtctggccaaacaaatctttgcgtctcacctgttactgatttttcttatcggcttaatttgtttgtcactagctgttctgtggacaatgctggtttatctttgtcaactagttagtgaaagcacgggagcagcggacagccggacaccgacactgctatcgatcaggtttttctttgtctgaaagtgccattgcatcatcctgaaagaactgcatttaaaattttcaatgatgtagcgtgaataaatggtaaaaatgctgaagctgagacaaggctgggtcattagccaaaagcccacgggtagtagtagaaaagcccgttgctacaattagtatcgtggatttggtcgagagaaaaatctgctcatgggccagcggctagtgttgtttattctggtccgtttgaacgaaacgctgcctctgaattttttgtttacagcaaagggatcgaaagcgagatttgatcggctgcatgaacaaaaaggattaaagcagtgggcagtcggcagcatgttcctgtgctcgtgtctctcctgcctgaatcctgaaaagctcgacaggtaatgcagcaatggaggaggacatcatcatcaattcatcatcattagaacgaccaaatccaaataaacatggcgcacgtactggccattatcttaacgaaactgcacggagagtggaagtagtgatgggaagagagtgattcactttggctgtgtcacgcagcggaagtttcgatcgatctgtttgggtttccatccgaaagataaaagatggaagccactatttctcgccatcatctgaatgaagcccttctttttttggcgggcctcatctgaatgaagctggtcggaaggagcaagatttgcagatccacgtatgtgcaaatcgcaccacgaatcctaatactccgacatgattttgcttgtgtcgtcacaccacaaactctatttttgagcttagtttgttaacatcacttgatcgctctcgcttgcgatctgtgaatctagtgcgtgcatactgtgcagttgaaaagtttgccgtcaagtgagcgtagctcaaatccaactcagatcgaagttataaagttgacacatatgctcgcttttacggttaattattctttcaacagtagacaatatagccgttgatagtaatgcactcgcaacaacttcatgaaactcaagatatgttaatccagatttctaaatgtgctaatagagataaaatgtgtgttcatatggagatatatcagttcagtttttttggaggtgtttataggagtacggcgcgtttaaaagtgtggtatgcatcgtgttgtgagtgtttgtgtgtttctttaaaaaaaaattgccatttgtcaattattgtggattttctgcaacttgttgtccaaagaaaaagaaaatagtttcggtcaacaactcaacatccatctgggggtatgaccgaccgagcgcggtggccgttgattggctcgtcgcctcctcccttctcggtctgacggtctgaccagtgccgggtaggaagcgtaattttgaggagagactccgacccgcgccgccgccgccgcagccaagcc

SEQ ID NO: 5732 - DNA, 2000 bp, Oryza sativa
gaatttgtaaaccacagacaaaaacgaggaagagattggtgatttgcgtatgatcagttattctaattttagaaatgactttatttcaattttttaaaggacacatcctttaatggtttgaaaaacgtgtccctttaaacaaagtactctcccaataagctcgggcacagcccacgtgaagtagaaatcggtgttggctgagagagacaggactcgatctgcggctctcccttcccaacccatcactattaaaaacttgttttctgcgtacgaccgaatctttattactagaaaaaaaaatattcgtgggttgcaacgagtgaaagaaatttttttttacaaaatcataagctgcaattaggagtctgatcgtctcaaattatcatgcaagtttgtttaaagatatttcttataaaacttttttggtatttctaaaagcgaacgatcttaaaaaaaccgaatcaaatacggatatgtaaagcgaatggacttaaaaactgactcaaacacagatgatgtaccaaaggactggcaaaaacatcttttataatagtagagaagtgattagatgaattgtacacccacgtgtgacgtgaacgtgacagaccaagcacgcactcttataatttgacacttgacccctacaactttatctttcaccaataaaaacttttatgttttggttagtctaagtaatatagttgtatttaggatgcaaaatgctttaataatatgatgtatttttaataaaagaaacgatgagggagttagggcggaactgggtctagggcagcttgggcctgagccctactcgtgagaaaaaaattagttgactagtacttataatttttttagattttcctaaccactcgtggcccagccctactcgtgtggcctagcctcacacatagcttttcctagcccaggtctcccagcccatcacaacccaataggcaatctaccctaatcccacttcctctcctcttcgacgccgcatcccaaaacatttacgccgcatcacgcattcacactcgtctcctctcagctcctctcctctcaccacatcgattatggttgcgggcctgcggcgcacatctgctatggcgtgtcttggtggcggtggcgacacgcatcgggcgcgcagagagtggcgtgcattagctgcggcagcaatgcgcatcaaccgtggtggcaacgacacgcagcgacgcgcatcgatgacgacgacaccgacgctacaaataatctagccccaagagcaatctggtccttttgaattgtttctctttccatctagcccaaaaatgataaaataatgatgaaagtgtctaacaacaaattacacatttttttaagtgtttctcagtcgtttcacgatcttgtggtgtcccttagctaattacacattttttttatgtcctgtagcaaattttgtcttttttaaggtaaaatttgattggaatcagcacgagactgtgctatcattaaataaaatgggagaaaaatacaacccctagggttagaaaaaagtaaagttgtacagagatgaaactcactagctttttaacaccagctagggtccaagttcaagtttcttccattawtttgttgaaacaacctagggcccaggggcccaaagtccttcctttgkttkragttctctccattccagatctcccaaataaccagtaggatcaaggtacgcaagcatttcttaggcgcatcttttttttttttggctagcatytcccaccatgccaatgggacgtcgtaacacggttcctattagcttgggtccagctgctaaaatatgaatgtcaaataaaaaaactgcaaacaattctactttgacatagttgttaattacatatgaaagcggcttaaatcagattcctgtcaccccgttacgaaagaagtatgcggatgcattctgtcggtctctctcaagtctcaacacataaaccctttcacactcatcgtcccagttagccatcgctgca

SEQ ID NO: 5733 - DNA, 2000 bp, Oryza sativa
tatacccattaccatattttttttgtttgacgttggttagctcaaaaccaaacgtcatacatttgtgtaaggaggtagtatatattaatggtgggaccagttttacaaagcttcagacaaacataagaagtacagacttcaaaaacaaagtgcaaagtacagaaaggtcttagactcttagttcagctcgatcatccatcatctgatgtgagcgcggtggctgctgtgtttgatgtttgcttcaaaatagctccagaagatgatcgaaagatgaacccatgcattcttttctttttctagttgatgaaaaagcatgcagtgcacttaacaaataattgtttttttatctgacaatgaattatttagtttgtacacaaaagaatattagcaatgcaagtattcagcacactgaaaatgcagagtatatacacaatacactcggaatgcacttgaggattggtcatcccacataatcatcatgtgacaatctccgaaagaacatcaagtgaataatctatgaatgaactgacaatcaagtgataatttttgtggcgcaagataaacaagaagactaaattgttttaaactttttttatataaagtaaaaattccatggtttaaagagtcaacaagcatgaatcaaatatacaagtatgaagatatatcagatttcaactataaattgctatccacatatataacgatgcggcgatcaaaaatttcaattggcaatgatcaaacttcaataggaaccgcgatgctatgcaatcctatatcaaattgaaaccccaaacacgcagtgcaagtatgcaatctttttcttgattacaccctccggccgttcttaaaaaaaaatcaaattctgaacatgtgcttcatagctaggatttttttttcttggacgaatggagtaactatgtagaatccgaataatggtttaccatctcttaccatcgcacaaaatctaccagaatccccataaactttcacaaattaaattaactgttcttttcctttatcttaacatgaaattaactgcgtgtgaatcaacgaataatcgacataacgatgataaatgaattctttcacctgtataatcaaaaccaaaataacaaaagcacaatggaatggagatcatcggcacggcaaagaagaggacacatcaacgatcgagcaggcatcaatctgactccacaattttgttttttccctatcaatttcttttctttcctcccaatcgacaaaaatttttggaaagagagaagaacacagccaattgccaaaaaaaattggtcaattgcggctaaattaatcacaagatcgagttatctgtcttctcttttcccaagaaaagggaggagaaaagccaagaaaccaacaaccgtgtgaaggagaagaagaagaagrrgggcggcggcggcggcgccgttggcggcgatcacctcctgtcctctcgttgtgaggggctcctccagaagccgccgccgtagaagctcgcccaaacctccttctccatgttcaacgaggtgttcggccttgggcstggccgggaaatcggcgtccaccttcctggccttggcggccgcggcggccagcgacctcggggaggcgatgtccatggcgcccgtctccttcggcttcgtggagcggacgcggcgtcggcgcccaccgcggacggcgcggcggcagagcgcggcgggagcgcggacggccgcgaggacgacgagctcgacgacggcgaaggggaagcagcagaacaccgcggcgcatccgccgccgtcccgcccgccaccttcccgcaccgcggctgctgctcccgcgcccgccgccgctcccgctcccgcctcatctccacggccggcgacctcctcaccctcctcgtcgccgacaacccgttccccgccgccgctaacgccgccggagacgccgccaacgcgcggcggtggtggtggtggtggtggtgcacccgcgcgggcatggcgatcggtgccactgcggcc

SEQ ID NO: 5734 - DNA, 1420 bp, Oryza sativa
amacaatgtagtgataagagaaggagatgcaaggaagaaggatataaagcatatgatatgtgaagcaatgccgtgctagcaaccaatatagcatagcaatgtgattctcaacatggataaaaccacaactaaaaacaatcatgggagaagtttgtctggtttcaaaagtttaggctgttttatagttcaaggtgaaagatgaactttgatggaagtttgaggcctaaaaatggactttaccctaaatgaactcggtagccacataggagcacattttgatgataataataccctacaaagtacaaatgtgcatatcccttcaaaaaattgcattgaagattgaaactttggaagaaaaattctatatttcacctgtcctgataaatttatgctggtactttttaatttcccccatgatgaattgaactctagtctctaggcagccgatgcgaaattcgatttcttctacaagaaacttataactatttcagttcaagttgcaacataagtagcaacacagatagttgagaccttgagcctccgtttggctacgcggtggattcagataatcccaatagctttacaaattttggtgtctggcaaactgatttttcctttagtttggtgttacaaagggtaatattattacagtttgaaaatataaaacaattgagggaattatgagggttagataacatattttaaaacaattcgatcggcaaaacaaacaaagaaagattgtaagttttagtttgcacagcaatttaaaaaaggataagcacagggcagcaaccacaaaccgagcctgggaattagatcgatctaaaggggggagaggcggcggattcaccgaacctgggcaatgtgcatgcggccggagggctcaaatccgtcgtagcagatggggacgggctttttctgcagcagattcatgagctcgtcctcctggatacactcctcgccgatgccccgcagcaactcgaaccggtcttggaggctcatggccgccatgcccggggcgaggtcctctacggcggaagaagaggaggacgccgaggcgtcggcggagctaccggacggcgccgaagggtccatgtcggcggcggcggcgggcctgcgtgggctggctgtgtccttccttcctgtagtatgtgcgaggcggcgggcggctaccactaggggcactagggtttttatctgtgagctccggacctggctcgcgtcaccgacaagtgggccccgcagtactcaccgtggcccaacgctaacggagctctccctccgacaagcgggcccagagcagattcttcgctgacctcatcattcgcctcgccgccgcccgcctgttttctcggtcgcgtgctagtcgccctgagaagaagacccgctacagtagggctccaaaatccaatcctccgat

SEQ ID NO: 5735 - DNA, 2000 bp, Oryza sativa
gttgggccgtagacgagtataatggtagcgtttgatgggacttctagaaattataaaaacgaaacccaacaagataataaactcaaaaaactataagatccaatttttattggtttcaaggaaaatgtacaaggaaacagatcaccagcagattaaacagaacatctacaaggaaacagatcaccagcagattaaatagtattttgtgaaagtgaaacgagtttagcactgtgcatttactattttgcatgctaatttgcatcaacttatgaattattgggttcatcatgaaggacaaccaaccggcccagtcttgcatgatgcaagctatgactgtagtgagtctgtgagttaaagattacagagtattagaattgagcttatggcactagggtaactttattggtgttaggaaacgagtgacaaagaaacgataaaaaacaatagataaatcacagaagacacaagatttaacgtgaaaaattctctcaaagcaggagagaaaaaaccacgggcgccgacgagcaatctattcaggatagcccactggcggtggaacaccaccaactccctaaattctgacatgtgggcccattattcatcccctcttcaaataggtgtgcagggtctgaaatttgaattagaaatagccagggtttgtgaatatgagtatttcttttctatttttagtggtagaccgagcaagcaaataaagaaggatatgacagaagtaagagggagcagctggtgtgacttttagaaactatataattagaaatatggtgatagctatttaataaatctcaagtaaaatcatacttaaaaatatatatgattttgtttaggtgctagctgcgcaaatgcgcgggccacccagctagttcctttcaaaagaaaagtattttcccaaggataacttcttcgccgaaaaatagaaggcaactgtattggttaatcgagtgagcaagtgcatgcatctcctcctcctggagtaaatattgcagcatcaacgtcactgcccgtgttggctcctggcagttggcacgaacgcacacatacatgcatctggtttcctgagcagaccgcggtcctgcgtctgaccgacgcggggccccgggatcgctgctcggcataggccgtatctcgcttatttggtcaagagacattagccgggtggtggtcatctgccaagatctgccggttacttgcactttgttcggctgcactgcactgcagtctgcacccaaccaaccagccggctatagccgctagcccactcgtcaagtggtcattcacacgaaaactatagcgcgttagttgtttgactcctattgatcctaccatcaacatgttgcaaacataatttggaacatgatggagttgaaaccacaagttgcctcgcgaccacacgcgccgaagaagtggcagctcccctcccattcccaattcgagccgagaatcatcgtgcacctcgtccataaaccaatccaaagcgacgtcaccacaccacacaagtacgccacatacaaggtagtaagtcgtgaaccaggcccacgttgttttttccgaggaaaagtccacgaggcttcgtggcttcgcgcttcgccttactacaagaggggaacgcgcacgaggcgagccacgcgattcccccatctctccgacagcgagcttcgtcgtcggctgtgcgcggccgcggcggcggcgctggtcgtgtgcttcccaaattctctcattccccagcgagcgatcaccatggggctccacaaggaggcgagctcgtcgtcgtcgcggctcgacgcggcgccgctgctgccgcaccacggccacggcggcggcggcgcggggcaccacctgtcgtcgcagcccaagacgttcgccaacgtgttcatcgcggtggtcgggtcgggcttctggggctcccctaaaccttttcccgcaccggctgggtggccgggtcggtcctcctccttgccgtggccgcgcttaccttccactgc

SEQ ID NO: 5736 - DNA, 2000 bp, Oryza sativa
agaaatgacaaaataaatcacaaaagagatgataggagagggaggggtgagtgggaggccgtcgttgctcctcgctgcctcaccggcatggaggtctcgagatcagggccagatcctaactcgccattgtgtcaggaagccaccgactcgctgctgcgccggggagatgccgagagggagagggaagagctagatcccgagccaccgtgcggccactgcaccagggagatgttgagagggaaagggatgaggaaggcaatgacgacaaggccgaggaggctggcggaggtaggtgggggggttggggggaggcggatgcggcaggtggtgggggtrgtggtgaggaagtgggcgtgcaactgggatctggttcatgtgcagtagctagtgtgactgcaagttaagcagtcacacaagcactactgggcttgaaatggatgactgtagcaagtattgtagcgctttactataaaaaatatatatatttctgaattcactatagcaagcgatttggaacattggatcaagaaatagagggctaattatatgtagttgctattgtgcagtcacaatagcaactgcactggacctcaatctgtgcagtggtggtggrtgggtgagagtggggcagtgggagcaactatggaggaggaggagatggtgktggaggaggtgtggggaatcggagataaggttgattggcttcgatcggttttttcataggcattagtttttaaaaaaccagcacctatagtataaatataagtgttggttcttaaaaaaattgggatcttaattatcggtgtcagttcttctgaaaagaccgacactaatattataggtgtcggttttaatttagacactaatattataggtgtcactagtccacgtagccagctcattcgacgggcgggctcacttacacataccatcacatttacacttttggtcatcgtttcgtgttaaagggttaactcaggaataatatggttggagggaagatgccctataagttggctccactattgctaaacaataaggtggtactaaacatacacacagctctcatggaccacacatgctatatcttaattaggccagaatgtcacataatgggttaggtcgagcggaaggaggtaggaagcaacggattaggctaggggccgggggttgaaaaggaatgaaggaatgctttcgacccaaaaccaatgaatgattttagttaattttttccaattaaagtgtatagtgataccaatgttttaattcgttgcttagctcttaatagctgttatagcattggaaaaagtcttgctcatttcaacgcacagacatttttagttaaactacaaaattagtgcatagtacaactttagagcagtgtagcacatgaactcaataaaattacaaaaggggattagtttggcttatatactaacaggatttccaaatgaataattactcaaccttcatttaagatctgttatagcatcggcgtcaagaatattctgcccgaatctgcattccacgatgagctagctggtcatcgccgtcgccgcacctatgccaaacttgggccccacctcacagtctcaccctcgtactcgtcgctgagcttgctccaccacccatctgacaaccacactgtcaccgacaagtgggccccgcagccattacctacaactgcccctcgctggaccaccgtgctcccggtccacccagcagctggcaagcgcgggcccagccaacgtcacagccaccaacacactgacatgttggtccacaaaatcagcggggcccacgtgtcattgagcatgcagactcggccggtgccagctcagctcggccgcgtcgctgcttaaaacctctctcccactctcacgctctcgccatcctcgagcactccgccgccgccgccgccgccgcctcgacgcatccgcttccccccacgcgagccgaagcttctagaaccttcgaggccgcggctcccacgggcggca

SEQ ID NO: 5737 - DNA, 2000 bp, Oryza sativa
tatctgtcaaaaatctccgttagccccaactgcacgtgggacctaagtgtctgtttcatcttcacctccctcccatcttttctctttcctcttcctctctctccaccactgtcgtcgaccaccactgtcactgccgccgtcatcgaccacctccgtgaaggcctcgggagccacagccgtcgccgatatcatcggccctatccacggcaggaggcttgggagccgtcgccgccgctgccatctgtagcaggaggctcgggagcagccgtcctcaacgccatccacgcgggagggctcggaacatgcagccgccgctatccttgacgccatccgcgtgggagggctcgggagccgccaccgccatctctgtcctcgatcgcatccacgatgggaggtcttgggtgccgtcgccgccaccatccttgacgccatccgcaatatcgtgaatagtagtggcatttttctaaaatggcatatttgtagtggcacaaaatataagtgattttggttgaattggatatcctattactacgaatctaaatccatgtccatgcatccaacaaaaatatcttatattttgggacgggggaatatgtattttctaattaagttcttattattttaatcttattaattagttttatgtgttttatattgtctagtgtaaactacgtgttgttaattacatggtttaaaaatctatgtgtttttccaattcaaaatgtgtgttgagtggccaatagctggtccaaagcaatgtatttcttttacttgttaaatacagttaatttgggatttgaattataagttttgttataaatgatctaatagtatacatggataaaaaaaattagctatatatatgatgtagatgttatagttgttcaagaaaaaatttacaacaaaatatgtttcaatctaataaggcatgaaaatagaaaagaggagatgcaccggccggttatgggtgtacgtatgtgcagtttgcagcacatgtacctgtacagggccttttcttttattattaaagtaaatgcaatgaaggaaaatagtgggtcctttgttaaataaaaaaattggtgggtccaccttatttaaaagtgccacgtgttgaatcaagagcgtttgtagaaagatatgtggcggcttaggagtgtttatatgaagtttaatgaacttttagtatataatagatagatgtatgtggacaatttttacatacaaatatattttagaaaacaaacaaatgcctttacattttgcgaaatggcctgtagcctagtggttacaagagcctcggtagcacctgaggtcttgggttcgactccccatgggagcgaattgactccccatgggagcgaattttctaggatttaacggcgctgtgctttcagtggtagacgaggcgctgtgctttcagtggtagacgaagcgaggcgcatgtggtgactttgtcaatctctccaggatttgccgatccagtcttcgaagatactcataaggttcatgggggtgagtgcgcgtgcgcatgtggtgactttgtcaatctctccaggatttgccgatccagtcttcgaagatactcataggattcataggggtgagtgcgcgtgcgttgtgagtgtctgcattgtactgtgtaattctaaaaaaaaaggcctttacattttagaatactgtcatacagcaacagagcgagaaaaaaccgggtcacttgcacacctttcaggccgagcccgatcgagacaccggagtgtctgcaaatgcgtctccgaatacgaatacgattacgaaatacgacgaaatggactcggaataccttctccgagacagacttgtacacgcacacacgtagtgcaagtcgaagtagacgaagtgaccgtatcgctataaattcaacgctcttccgcgcctcgtctcctcaacacaaaaccaaccacgtcctacgaattcgatcgcttcacaccaagaaaacctcgctagctagcttgtagctcgcc

SEQ ID NO: 5738 - DNA, 2000 bp, Oryza sativa
tgaaaatggactaatccttgtggaaacacaaacacatcacccttgttaagaaccttggtgaacaacttattctcggggttcgatatcacgaagccgacatagagagatccttcgagaacggtcgggatctcggtggcacgtggatgagtgtgaggcgggttgaggccgttgggcgcatagtcgatgcggacgagggagacgcccatggtgttcagacccgggatctgtgcaacgttgacggtggtaacgttggatccctgcttgttggtggtgttgccggccatgtggaggccggagaagaagaagtcgccggcgacaacgtccttggcgtccttgcaagggaacccatttacacgcactgcatatggatccgtgaacagaatcatcagtatggtcagtcacacaaaattacagtatatatatgcggagttcttgcagatcgagtaccttgagacatcttgtcgacgacgcagaagtcctgaagaaggccaggatcggaggcgatggcgccatgagagcaccacagagccaagagggcaacgacagcaagctgctggaggaagcaggcgccaacagcagccatagctggagcctggaggaggcagagagttctctatagaaaagaatacttatggtatagcagattgctctgatgatatatatattgtgatgaactgatgatgaagaatgtcatggattgagaggaaagctggtatttatagggggagttcaggtttcagaatagcctattgaactctgaaatctctggtaatgattgtgatgacagagaatattgtctgtctgtgcatgccatgcatgcgtcgtacagcaccaagaacgagtcactgctagctagtagctagataggaagaaggcgtcatacataaatacataatattgcgtggatgggcacctgcagtctgcagatacatatacctatctatcctgaaataaatcttattaatgttatcatacatgctttgtgcttgaagaagtctaagccatggatgagtactgtatctgcagacttagcagccgtggctattaatgttgtccaaggtggatatatggatcatattaattctttactggtttgctgtttgccggccggcctgatcatcgattgacaatggtccgatctccattgtaatattcttatctcatcatagcaattaaaattaacaccatatttgttccggagaaaaatgcacgtaaggaaataataatgcttgcttttcattgcttgcttccttccaagaagacgggattaaaactccttcgaccaaccgaaatgacagaggattgactacacgcctatactatctacaaaattatgcctaattaaacgttggatataagaggacggactcccatatcaaaatttattaagactctgcatgccttgaaaccgagtacatcgactaatccacaccttgttgtggtgctaactgctgcatgcctttctcaatgataatgatacctaattaaaacgtagttttcccaaacagaatttgttaaccgaacgacgaacgcgtaatgcatagccattattaaattgttgcttgacgtaatttgtttaagcaggtgccgttaccatcgagtccacctggagagagcacaatttacacatgatgaagaatcagtcagaagctatattagcttcttactgaatttgctgtagccgctgctgcaggcaggccacaacacgtttattcagacttgttccaaattaccagagaattggcgtagaccatttcttcaaacctcaatacatattaaacatccaattaactttctcaacacaaagcaagcacaagccagcttgatcctcctactctactccatctctatatatactgggtatctctcaccccgtttgaagcacacagcaaagcatcatcatcagttcatcacatcacaagaaactttgcgttgcatccttttgtttcctgctaaaattgacacgcacttgatttagtgattagtgtcctaaactccta

SEQ ID NO: 5739 - DNA, 2000 bp, Oryza sativa
cagttttctatagatctttgaacttcaaattgcgtgtgctgtaactcacagtagaaccctgcaaaaaacattgccatatgcatatagtcgacgccgaactactactacttgagttctctctgtcctcacatataaaaatcgacagcatcttcagctggttccatgaagaagacgacgcataatgtgttgcataattgcaagaagccatgagcaggcactgtacaaatcccagtgtgttacaggttggaaagctttggcctgtagtctgtagcagagcccctagttttcctctcccgggccaagacatccactgcacacagatcaacaagcgatgtgacggtgaagtgataacaggaggccggaaaaggcaagaacttttgattaactgacggaagtgccaatccaaaagaggacccggcaaacatctctgccagtatcgcctgtacttgttcactgatccactgtagctgttctattcgattcgattcagattttattataaactcctccatgattcgtgatgcatatcattgcgtggggtattttccgtgctactctgtctgtctcagtgcagagtatttggtttagctgtcagaggatcatcatagtgtgttaagcttcggttgttaacgtgggtactctggtgccgggacagaacgaccaccatgtcagctgggtggggtgggtacatactagcacatagagactgaatcagtttgatcttttctagtagcctgtttataattatcttggcaagaatgcaatatactatgaagagatgtatgctaggaaaacaccaccagggtagggtggtagagttctttttttcttttgaaggaaaggtgaaaactttgacattttcaatggtaaacaatgtatccgtcgttagcgatgtgtccgtaataacttcatcaatctcaaagatatgctaggtgtaggatatgtgtatgtacgtttataaaaaacatatgtgcgcttgtactgtgtttctaaaaaataaaaagcctcaacaagattcgctcaccaatgctaacatgcctttcttgaattggaggattttcatagtatttatagaggattcaatttcttgggatttttattcctatggtatacttcggattgaaacaatggaactttgaatatcctatgaatttggttgtttcaattccaaagaaaaataagtatgagctcaaactcttgtatgcattatattcctttctctatctagtctctcccctatccaaacaaatttcctgaaaagtttatattcctatgtttgattcgtattctcgtgacctaaaattctgcagacaagagcatagcattctattagtatgtttttttctttctctgttttataaatcttactctctttatttatgttttataaaccttactctcttcgtttcagattataagttgttttgactttggttacaatcaaaccgctttaaatttatctaagtttgtagaaaaaagtagtaacattttcaacccaatacaaataaactatgaaaatgtatttaattatagatttaataaaattaatctagtgttataaatattattatattgtttatacaaacttaattaaatttaaagtaatttgatttagagtaaagtaaaaataatttataatataaaacagagcgagtatttccaaagcattcctaaaatattcacagtgtagttgttttatttagccagtatttttttttgagggggggatgctcactcgtataaaactttgcattctacttttaacccgcagtataaaattaggacgccacatttgacactttgacataacaaccttcccataactcctgttttaacccgccgctgatcgcgagagtcctttcccattaaaacccccccgcccaccagcgccgagacacagacaccaaagccgtctctgagaagaagagagggagagagagagagagagagagagctcggtcggtggaggcgacgacgacgacgcgcgcactgcggccgcc

SEQ ID NO: 5740 - DNA, 899 bp, Oryza sativa
ggatttttttaatctttggatggattttgatgtataagaacccgaataaatttagaacaaggggaggcagwtaaggaawtaaataattcaaagggaaaawtcatattcactttcaaaatttcgaattgagtttgaggaatttctggaaaagttcaaagtacggatctattgtttatcaaaattttagtttgttctgttgcaacgcacatgcattttttctagttagtatttaaaacgtagcaatttcgagaatcaatccacacctattaagtaagtactccctccattcctaaatatttacgacgttgacttttttaaaaatgtttgaccattcgttttatttaaaaaattaagtaagtattaattcttttcctatcatttgattcattgttaaatatatttttatgtatacatatagttttacatatttcataaaagtttttgaacaagacaaacggtcaaacatgtttaaaaaagtcaataacgttaaatatttagggacggagggagtataaagttgaagctatatgagactgcgtttaggagtagctcaatgactcgatccaactctgtaaaccgttgagagtccgtaccggtccatgtacgaagatgaaaccgagtcggcaccgatacgctacgcgcgcacggccaccggcacactgtcattaacacgtctcacactctaccctgaccgtccgatcagatcaaccaacggcccagatcacgccgctgacgtgtactccctccgattggtcggcagcggcacacatcagatcggagtcgggctcggcctcggccgccgcacgctgtatatatatcgcgacgctcgtatcgacacaaaaccaaaagcgaagacgacgatcatggcgcggccgcggcgcgcttcgacggcaacgaca

SEQ ID NO: 5741 - DNA, 682 bp, Oryza sativa
atgcgtaactctccattctttcattggctacatgggcattgagaaatgtaaatattaatgaaccacttgtttacgaggaatactagtggcatgtttaaatggatgataagtagaattacttatccttattcagtgtggcaagatgaaatattactatcaaaaatagatgaagggactataaagtttttttttcgcgagaggagggactataaagttgaagccatatgggactagtttttaataaaaaaagacaccatatgggactctgcgtttagtactaattggagtagtattttgttagtgtaaacctcaatgacacacgatccaactctgtaaaccgttgagtccgtaccgatccgtgtacgaagatgaaaccgattcggcaccgatacgctacgcgcgcacggccaccggcacacgtcattaccacgtctcacaccctaccctgaccgtccgatcggatcaaccaacggcccagatcacgccactgacgtgtacgccctgccgtgagcgcctccgattgggcggcacagcgcacacaccagatcggagtckgcctcggcctcggccgccgcacgctatatatatatcgcgacgctcccccgcctcgtatatcgacacaaaaccaaaagcgaagacgacgatcatggcgcgrccgcggcgcgcttcgacggcaacgaca

SEQ ID NO: 5742 - DNA, 1538 bp, Oryza sativa
  misc_feature (1)...(1538): n = A,T,C or G
cggttgcctccccntcccgccagaatccggcggaggggagggtkccgccgccgcccgccgcctyccctctcgccagatccggtggaggggagagcgccgcctcccctcccgccggatcccgcggaggggagggtgctgcagccacccgtcggcgaggtgcgccgccgccgcccgtcacccgccgcctcccctcttgcgccgctgatccctcttccgagctgccgccgcgcgcgtgcgagagagagagagagagacggtgagagagatcgagagaaaggatagataaccgataaggataataaataaagggaggccaacgcttatagataaggccgacactatcggctcagtctcaataggtgcctttttaaaaaaaaaacgacacctataatatattaaatgtgctggttttttttaaaaaaatcgatatctataataaccggcacctatggttacttaaaggtgtcggttttaattgttccggcacctatattgccgatccgtatgagcttttttgtgctagtgaggagaggatgccgacgtagggatgccgatgctgatatcctcggctgaattttttttgtgaatttgacaaatcagtttcgaatttcaaatggtgaaattgcattatgaattttgcgaatcgggcgttatttggatctggactttgttttcttgcgccaaaaattgtttttaagtcacttaattatgcgctgatggggctcttagggtggcggcaaacaaaaatcatcgattttcacggaccttaaataacaagcaaagcgtttggtcacatgcaaaattatgttttgtcgtagtgagtgatacagtagtagagtcgtgggtgcacgactccatccaccgtgcggagttgaaaatcccaatgcccacgagtattacagactcatagatgctaattgttaggatgcatgagcatacgtgggtgttacacatgtagtggcgtgtgagtctaccatgtattccgaaagaaaacaatatttaccaaaaaatatttatttttgttttacatgttttcttgttgcacacaaaatacgggcgtaaaggttttgcgcgcgtataaaatttccacgatcccaggaaggcccttggagcacagaaaaaatacgggtgcggaagtttggcgagtgtataatgtttccaggtccaagcaagcacttagatcggctgaatttacgtggatgagctaattaggtccaggatattaaacgggttgattacgtcacccccataaaaatgccgattccgaatccgcagattaatggtctaattacgtcgaccgcattaatcttgctaactccgagtcggccggcttcagtgttcagttccatgacaccaatcggaatcggcgtccgaaactggacgtgatctgcagtggccacggctataaaggaacacaccctcgcagacgcagcaccaatgcaagaagcaaagaacatctgagatcagaagaactcgtgaaagcaaagaagacaatttcgatagtgagacgaagcaaagcaaggcgacgactttcattc

SEQ ID NO: 5743 - DNA, 2000 bp, Oryza sativa
  misc_feature (1)...(2000): n = A,T,C or G
atgtttattatttggtataaaaaatgtatttaacacttattgcaccctcgttataaaagtgtttattttttacatattccacgtactagaacaaaaccaaaaacaaccataatactcttactttttcaaatcccaatgcaattattccttgctaaggaagtaaatgtttttttgttccttgttaggaggttgtagtgctattgcctgataaatgttgcttagtacctccacaatgtttgtcgcttactacaccctcgtctgaatgcaatatactatctcctaaacagtgcttgtcaatggcaaaatttggcaatttccattagtcaaggccaaatcaaaggtagagttctaagctgaggaagtcatgttagaattggactcagttagtttctttttgctacatattagctgattagagtttgagttggagttgtataagtagtttcttgtttaggatagagtgctaagtcgatccgatcttagtataaccagacttagttttgcctatgggtataatatgtacacacatagggtttttgtaagataacaacagttcaaaacatatttttcggtgcatcgccaaccctattattagttttgacgagttcttgtttttaacatggtagagagctcttacataagggacttatttggcgaatagttgatggaaattcagttgatgtaatcaaggataactgggacaagaggaacagccttctcaaaccacttggttttatcaatgctttactattcatcattctatagttaaaattttacagttttctytaaaaaaatatactgcactcaagckyttattgagakrgatggkcaactmttatttctmaactctacaacttttcgcacaygkanggrgtgctacataaatatgtggcgcatataggggrtacacagatacatatgyatagakaaatctctaaaacactctmtaaaatcayaatatatatatatatatatatatatatagactggtgtccttgttcaaaacactaaggcctcctttaatggttgagctagtgcactagcaaaaagtctacctttttaatagattgtctcatagcacattgttcaaaatgctttgggttccacaatccctctcacatttttttaggagcttagctcttgaagaagagatagtgcattctctctccttatcttctctctcttccacatcatacaaaaactgatgtggagatttatgagctagctgactcacccttgttggaggaggcctaagtactaccaacctggagggagtaccgtgtttttttttaaaaaaaaactgcactaaaccatttagtaaaacaaatggccaactattattgcaaagctcaacaactttgtacatatggaggagtacataactttcaaaacggagggagtgggtacgcaatttctccctctaggtagataatacttaccattttggataaaactgatatcaaactttaaaatctttaactaagaataatttctaaaatatttcacttataagtattgagaccatatgtatagatttgtcttaaaaagcacttcaataaattcatatattcgttgatattactatatatatcataatataaaatagttgtcatagttattttttgaacatcatgcgtatccttatccaaaaggataagtactccaatctagaaggagtactgtgttctggttcatctatatattagaggcatggtgctatgcattcgcattcataaatatcaagccaatcggcaatcgctgagatttactagtacttactgtacctgcataaatacataaacacataccatattatggcctcgagtgatactcctacccatgaggaggcactcagttttgagccctcgatatggggcgacttctttatcaactacgaaccacaaccattgcaggcatcaccactactcattcctatgtgtacatctgcccttctaattttaattaatgccatgctaactagctaatagctagctaattcg

SEQ ID NO: 5744 - DNA, 2000 bp, Oryza sativa
gctgtgcaaactattcacagcattcatgtgtttcagaggctggaaaaaacttggcagccaagtttggtgctcacgtgccacgtactactcacgtccccatggtttcaggctttccagcctcagcctttggcattacaccggcaagttcactgaacaatgaacatggaccattttctttaatttccgatttcaattcacccaccaaaaaaatcagttcgcaattaaatccctcgcctaaagaacagcacgcgtccacactccacacaatacgcatgcacaacaacccgcgctcacgctcccccttcccttgccgtttaaagcatagcaatgcggccaatgcacatacgctagatacccgtccagggtagagccgtctcctagttacgtccagatacaatgaacccatttgggtaggaacycgaactactcctatacttatctaatactcctccttaattaccttttctcgcttgctcactaatcgctgatctaatcacgggcctcacgtggacgcgatcaaattcaataaccgtggagtaagtagctcgtacgcactaggcggcgctcctagaatttttttttaacctttttaattcttaattttaaaaataaatcttttaaagcttattttcttaagcttaatcttttgatcacatcaatccgcatgtcgtgcaaaataacactgacatgttacataacggatgtgatagttttgtcttcacatgtcaaccaggatggcgtaaccaaataacactaccacattgtgttgttttattacgtcggtatcttgaaaataagttttaaaaatacttttttccctaaaatttatataaaattaaaagattaataaaaaaatcgtgctgctaggggacatgacgtcaccgcctacgaaggccccacccgccagcgcggcgcacacatgggggagtggtggggcccaagacttcgcgaatcgcgcgagtacgcgtccacgttggggcggctggcccacctggccgtcatgtagtactccgccgccgtggacccggtcttcctacaccccagggatgataacgaagaatatgctcccccttgcctttgccaccgtgtcatgtagccgtatcacacgacacgatgtgtccacgcatgcatcctgttttattcgattttttttatatctatagtgaaacaaaagaggaaaaaagaaaagaaaggggaaaagatgcaggaagcttcggaggcaaggtttgctgctatagctgtggatgctgcatggcacttaagttgtatttatgtgtgtgtacagtcaccagtatttgtatttctttttgccgatttttggccgcattattattatcctgtgagctgaaaagatatatatgattcctcctcctcctccaggtataacctggattaataacgtggatattacgataagaacatggcgtagtacgagctagtatcttggtggattttacgtataatttgtgtacgtaattataacattcaatacttactatccctaatttgtgtactactcgtgatcgatccatttggccattaattacagctgggatggataatcatcgacgactcaaagtctttgaccgtcaaaaaatagaggagttttgatttaccaaccaacctaattaccacgagtcattagtcaattagtagatcaaaaaaattagtgaactgtttgcgaacaaagccagccacgtaatggcgtgagccggagtagcctatagcctgcttggttaaggacaaaagaggggctacctgcaggtgggccccatcgccgctggtgcgggccccactcgccaccgcgcgtgcgggcctatatattcgggcccaggtcgtcccatgcaccataaccgtttgctccaccactagtctttctctcctctcgtcgccaagcgaagcgagacagtctcgtgcgcctccggctttcctctccgacggcgacgcgccgacgtacgacgccgtggacgagcagcagcgctgtggatcgacgagcggcg

SEQ ID NO: 5745 - DNA, 2000 bp, Oryza sativa
  misc_feature (1)...(2000): n = A,T,C or G
catctccactctggccacccgtggccctccatcgctccggccctccccatgcttctccttcgctctcccctcgtgttcctgacgccaacgtctccccttcaaccgcgtcgccgccgccgcctcctgctctcgctgcgctgccatgtactcctcccacgggccattgtctcctcctcgcgctcttccgccgcgccatcctcctatcctctgtcctagtctcctcctcctcctccgccaccaccctcgccgccgttggacctcctccgctcccctccctcccctggcagcgtgcggtggaggaagccgccgccggcgactccgctcagcgaaaagaggcgaagaaaaaggccgccacagcggcggcaacaaagatacggacctcctcctctccccttccccaccagcggtcttccccacctgttggccgccctgccgcctgcccagatgagcacagtgagagaaagatgatgaagggagaggaggggaaataagagagaggtgatgatatggcatcctgacatgtggggcccacgtgggtcccatgctgactcagccgccacgtcggacaaaaccggagtcaaaaccatcgaaggacctaaagtgaatggttttgttaagttgagggatgtcatatatctagtcttgtggttggggaacgattttgtaactcgataacaagttgagggaccttcgatgtactttttcctaaaaagaaccaatagctaataatgctcatcatccatcgaacatattaattcggcagcggcaatgacctgggcagccggtggtcacccttatcgacctagctccttcctatctccctccaacctccaacctccagctctcaaccttagtttctaaaaccttttagacttgtatccctatattcttcttcaattccaccgtccaaacatttgaaagatgtaccgaatatactgtgtttgaaattggagcaaaaggctgttgacataaacttgagccgtagtttataagccaaaacaattgactaaatttgtgtatgtccaatgtttcttgttctttttcttttgagtacaatgcaccaacggtacttaaacttgtcaggaggtttcacttaggtccacgaatttgcaaagcgcacattgaggtccctaaacttgatttattgtatcatcccggtccaaagccgcgttnngctgtnttcttgtctacgtancacgccacgtgkacaatgacatggaattttttttatttttttctcccttcttccttcttttttctgtttcttccttcttttttctcggtggtgagagatggcacgaggggarggattgtcgcagtggtgaaaaaagaaggaagaagggagaaaaaaataataaaaaatccatgtcatcgttcacgtggcgtgttacgtaggcaagaccacggtcaaacgcggctttggaccgggatgatacaataagtttagggacctcgatgtgcgctttgcaagttcgtgaacctaagtaaaaccttccgacaagtttaagtaccgactgtgcattttactcttttcttttttttctttctataattgaaaacgggagactattggtgctgccgtagaaccaaatttgttttaaaatgatcttttatccgctgatctagaagctaccaaccgagaaagatcgccaaaaaggattcctcctgatccgtcatccgtgtcgtgtgtgtgtcgtgtcgtcccttccctcccaaactcgcaccaaccccamgcgcctcgcacatgggacctctcacctctctctctgcctcatcctgcgaaaataagaaggaaagaaaaaaaaattccgcaccgcacgtcacccaccccaccccgcttccaaatactcccagagtcccgcggccgcagcgcactactactactacttctgcttcactctctctctctccccgatcccaatctcggagagagagacgtcctcatccatccatcccatccactcgagttgatcgatcgcccggacgccgccgcaggggcc

SEQ ID NO: 5746 - DNA, 2000 bp, Oryza sativa
ttagatgagatttagctgcagatagtactgcactgccttaacacaggaccatttcacatgtgtggttgaacaggacagcatatatggcgtactaataatggaggctaacacatggcccgcttgtctatcacaaaacaggtgtgtgtgcacatcaacaaagttatgtgggcacgtgcaagcctggccgatttcactctcatgccgacctcaaaactggcccggattgaaaaatgtttatgcaattatacatattaaagttttcttttaatataaacctcagaaaaaaggctaaagtttttccatatatagaatcattgaaacaaaacgtttttgtagttgcaaatagtcgtggccaggaagcacccctgatgaccacgaagaatttcgacgttgctatagagactttattttcccctttatttgtctggactatatcacacgatatgttaaaggtctggattaattataaccggttgttctactctctttgtcaaccaactttttctttaaaaggtaaaataacttttatacacgattttgaatataacatgtgtgttagatttgtgtgtataaatgttgatttattttgaaacgatgtaagtatcctcggagtgtttacatagtgtttatctgaaagacgctaaggtcatttccaacccaatgactaggatagtgtccatagcattaaataagctgacacctaggattaaaaatgatgtggcaagtgaataaatgaggaaagaaaagaaaaccatatcttacatgagatatggtttctacacaacatctaagacatatatgagataaatagcattaaacttaagtataaaatagtggtacttgtattgaaaaagtaatatctagcactagtttcttgatgatttggagtttatgaaaactacgtctaatttcttaagttggaaatggcctaaaagaagaatctttcaaaaggaagagatgaggaatgaaaaagagtcaaagctcatgaagggactcaagccaacgcaaggaggccaagtgacagcagccggtagctgtccccatctctacaatatccagcacccagcaaaatcacacacgattctcagcttcttccccttccttcccaactcatctccatctttttatttacacgcacacttctcaaactcgcaaaacgatacggctgaaaaaaaattccctttataaaaattatttaaaagaacatattaatctattttttaaaaaataagataatacttaatcatgtactaataagttactttgttatacgtacctgaggattactccctctatctcaaaataaccaatctcgtataggatatgacacaatctagtactacaaatctgaatatcatatactacgaatccaaacataggtatgtttatatctgtaatactagaacatgtcacatcatataatgagatactctattcgtccgtaaaaaaccaacatagtatcggatgtgacacatcctaatactataaatttggacatacatatgtctagatttatcgtactaaaatatatcacatccagttttagattcgtttttcatgggatgaagggagcaggtttattttgaaacgaagagagtacaccacatgcctacgcagcctcatgtccagtcgagtgtaaccacaagcccacgggaatttgctgtccaatgaagaccccacaaaacgacaaactccaataccacacacctccgcttccctccaaatcgcaacagaaatccgaagcgaaatcgcgcacgcaccgtctcgcgatgccgtccccgtcgctccgcctcgccgtcgtcggcgcgggcgccgccggcctggtggcggcgcgggagctccgccgggagggccactcccccgtggtgttcgagcgcgccgcctccgtgggcggcacgtggctctacgacgccgcccccgccacctccgacccgcttgccgccggcgccgcccactccagcctytamgcctcgctccgcaccaacctgccgcgggaggtg

SEQ ID NO: 5747 - DNA, 2000 bp, Oryza sativa
gggtgaggatgatggtgagatgctgatataaaacaagtcaagacacttatccggttgctccttgtcaagtgctggagttttcttttccgacctacgggacgacgggaagcatgctgagctgctgctgatcagcgatcaattcagcatcgtcactatggtcgatcgaattatttgtttccgcgactccgaggacaggtcggaaccgaacctcccgatgagacgagaagaaaacggctccacgactgcaccacacatgccagtagccacgcgtccacgccagtgcacagtcccggagtacttgcctgctccgctccgtttcgtcggacgaacgtcggtctgtcacgctcgaaccggcgcgcgagtgcatcccctcgcgggcgcggtgaaaactgagcgcgaccggccctagagattcgtcactccgccaagcgatccagatacgcgcgctgccacgccgtaagcgtaacgtcgctgtacggcgttctcatccaagagttgcccgtccgcgcgcgcgcctggtatctctatcccctcggaaactcgtggccaagcgctgcgcgtacgtgcgagactcgccgtttcgccgtgtcgcattcaaacccggccgccttccgccccgcggaggcagagaggtgtcctcctgctccaagggcacgcgtkcacgcgagacccgcccggaatcagcgctgggtttccgcgggagcgcstagcgcgtcaacgtgccggggctgcgcgggtttggtgcgtgatttcccctgctgatcgatctgctcggttacgtgtgccttcccgtgtcgcggtggccggaacatcgcgcgaggtccggtcaatgttcggtaacaacagatcgacaaatcgtggaccggtcgatcattgcagtgcgaagctggcgtataagagcaagtttaatagtgtagccaattactaactccaagctataagctaactataaacatattttaaaaagataaataaagaaagagaagagcagcggactacatatctgtagccggctgcagcatggactccaaaacgtaatgtgtttatgacaggtgagaccagttattaatagtatagtaagcaactattgtataaattgactattatattagctatttagagactatactattaaacttgctctaaggggccggaccgccgatcgaatgttcatgagatatggggcctgttcactttgatgcaaaaaaaaccttaccaaattttgkcatcawagtgaacaggacccatatmtcatgaacattcgatcggccaaaattttggcatagttaacaaaattttggtaatttatatagttactaaaatttgacagcaaactaaatatagaaatttttggcaactttactaaaatttggtaagattgaaaatgacatcaaagtgaacaagtccataaaatatgaagccctgacgtggcagttcctcgtatttctcgattttcggggatagaaatagagttagttttggataatagtaacacacaacgtaaatatttagacatcctaattcaactaagcggaattgctagggctatggctatggcgaacctgcacgtcctggactccctcgacggatcgaggtgcatcatatacaccgacacccttttggaagcttgcaatcataatgctctgtgtctttcaccaagatagattatgttcgtctcatgtgccgtacgtgcagccacgcctcgccggatcacctgactttcacgcatcacttattcaaccaccatcgcagaccggggagaatcgatcggaggttgaaggtccgttctctctcttctttgctcattgatccagtgattcctaggtgtgtctgcttgactgcttctaggtccttgcttgttagtgatcgcctgacgttaattggcttacctacaccataaaaaacagtatacaacttaggctaattgggtcatatgtttagctttatcacttgtcgcactcaacagcgaatttgcatattaagaaaataatgggcagaac

SEQ ID NO: 5748 - DNA, 2000 bp, Oryza sativa
agcgtgtcgaacgcagccattcgacagggctctgtcgactgtccgtcgttcgataggtgccctatcgaattgcacccgttcgacagggacctactttcgcgattttccccggttggccactacttttgcgatttcccataaaaataatattaatcctcaaaaaaattcgaagccaacaagttgttatcaggaaatccatttcatcaagtacttgtgatcaggaaatccatttccagcatgaatgcatatttgcataactctgtagtatcattttttgtccagacaggaatatacatatagcgcaaaagattgtaggaaccaaatcgttgctcactccttcgtwatgttttkgtattagtcacagatgagaccaacaaggcacacaaggaaaatacaccacttgcatgttgtctactgcgtctaattttactccacttgacagtgaaaacaatagttttgattgtgaatgtctggttgtacatggacaaattgatctggggaacaaacaagagcgtgggatgggcagagtgacggtgaaacatgcagttttattcgcctagctagtttagtcaggttactattgtcaagatttggtacaggaaagcaacggcgccatgcagccatcacctcacgcacgtatacctgcccaagtctttacataccgagtagattcacctatttgctgtcccggccggtgtgtcagtgtgtggcaaagaacaacactactatttgctacgaacatctttatcaacccagccatatgtataggccatatgccaattttttcttttttgggggacaagttgatccaacaacggcttgaaaacgatttcttttaattttgagggaggaaacggtttcttatttttctgagagttgaaaaatgaaaaacgcccacgctacatgaatgggagaagtagtcaacactagaatcaaatatgttcatactattttttaactgaacagccatagtttaacattaacccaaaatatagcttcacacgctgtagtacaccaaatagtcatgaggtttggtttatatcggatagataaaacatwaaaaatatataaataaatataaacaacactaaacaagatcatggaagatgcaatactttaaatgatcatcaagtgcaatatacgaattggctgtgtgcatccgtctcaggatgtagaggccggttctcccattatcttaaaaaaaaaatgcaatatacaaaagattattccgatgattaaaaaagcatatgattaattgttaaagaaacaaaaatattcctcatttttttctaattaagatgcaaattttaccttggtttttgtcactcccttcatttcaggttataagacgttttaactttggtcaaagtcaaactgctttaagtttgaccaggtttgtagaaaaaagtaataacatttttaatccaagacaaatttattatgaaaatatattcaattattgatttgatgccactaattcagtattctaaatattattatatttgtttataaatttagtcaaacttaaaataatttatctttgaccaaagtcaaaacgtcttacaacccgaaacagagggagtagtatgcttttcaaaccgctaaatggtacatttcatgcaaaaattttctatatataagctgctttaaaatatcatataaatctatttcaaatttaaaataattgtacttaatttttcatattcatcaaattaaatggctggtaccgtggtacgccgttttccacaacgctgcaaatctgcaatggattgcctgagacctcgtttggatgggctgaaatcctggtccatctaaagggacctcgatgggctccaaaaagcccatttaataatcgaagggccgagaggcccacgcgaagatgactgacaatatgggacccggaagtcagtcaacggaggatagaaaatgaaagggcacgtctccggaacactcgccacaacgaacgaactagcaccaaccccacagcaccagccaccacc

SEQ ID NO: 5749 - DNA, 2000 bp, Oryza sativa
ttcgttctgacttaactccagtctcccgtaagaaagtgaaagggaaggtaaaagcagggataaaatggaaacctcattacctgttttgctttccagatagatgttgggagaccatcaagtcatcggtaaaacgtggaactgaccaacagtttctgttctgcctgttcatcattaaattgcttagttcaaattcacattggggatgcctgatcaacagataatctctccagtcgtttttctgcccattgaaaagaaaagtattctagatgtcacataccacatgtttaaaaggtaggactgccgtgatgctaccttaaaaaagaggcaattaattagaccacaagtactactatgcacgcatgaaaatggtaatctgatgggtaattacacttgtcctacttctatattgatctgcaatgctccatggatcctttgtaagtgtatcgaagatcctcggcaactttaagtccaaaaacatgtttaaaatctttaacaataagctgtttttcttaacagattagtcagacgaagatcatgctgcgccaacccttcagcaaacaaaagtgtgcaagtaaaatgaagatgtggccgcctttcccggaataatacagcaagattaaccagacgttactctctcttcttccttttcttaagaaggaataaattagggtttcatattactatcattcaactttataactataggttagcgcggtatctcgaagagaaacagaaaagaatgtagtacatgacaatgacatctttaattttggaattggtcgcaatctctatccgacaagcttataccaagtccaatattccattgatgtggacatcgtatatgatctagtccggtcacagtttcgagaggctcaacaatatataatcgcctaattaataagaccatgcagtgttacatattggtttagttaacatggtatcatttaattatatgatccgatgacaaggctgaagtttattgtggaattacagcagaaagtctaattaagtatgtagatatccagcttgttgaaattttgcatggtagatcctttatgagttttctaaaaaaaatccccactgatacaaacacaatacaattatgcaacgttcacacaccattgattacatgtagactatttatctacgtggacaaaatctcttatattttaatatggaggtagtagtaattaatgacaagttatgccaaaaaaatcccaaattaaattactcatttagacgatatcatggctaattacctccacctgttgagaaagttacattctcggacgacatgaacttcgtaaggaacacttaatttcttatgcgaatcacgaaaattctaaacgatcttaatcaagtagtaaaacatgaagaccaataaataaaccgagagaatgcctgcagaaatgattgcacttcaattattgagtaaaacagattatttgtaaaaaaaattatgtaaaacagatatcgttttcaaatttaaaactgtggaataactctcaccccagcagccaaattggagagttactcataaatattcggcacagcaaaagggaatgaataggccataatgccatatgtttcaggtgagtgaaaaatgagtcaatttgtgtgacctgacaagtctcctaatgcacactcacaaataagcaaaaccctccaaattaaatacagttaaataaattttactgttaagccgcccagattattttttactactactgaagccaagcactggagactgcactggtcgttgtcaccagtgctaagaaattgcgaccggttttctccatgaaaccgcgttaaagtattcaagcaatgcaatgcctttcttttctatataagctcgttgcctccacatccacaaccatctccacctcacctcgtccatcgtctccagtaaaaatcaagatcggcaagccaagtgcagaggcaaccaccaccaccacctggagcagagcgagcgagcgagcgagcagagcacactgtcatca

SEQ ID NO: 5750 - DNA, 2000 bp, Oryza sativa
ttttcagaactctgaactaacattggccgaacttatggagccagtttggcctaactgatttcgttgacacaaaattttggatttgcctgttttggtcacagactagactagacaagcacctgaatcagcccatgggcccaactacatggaatcgatgattgcttttcagttttcactacttggaagggtggtgatcattctcttaactgaacaaaaatcagagagaatcaaaacctctcctcctgtctcaatgcagcgaagaccaagtaactgaactccagatacttgcacaggatgacagaaacaacacaatcagaaagaaagaaatgataatggaactaatggaagtaatcctattccactagaagtgccaatgtacagtcttcatcaagtcgctcaaaaaaatcttaagccactgaactgaatgcaaatgtttttttttttggtctagttataactgtcagcttaattagtacaagttactagaaagacagagagatcagagatggactatgcatgattggaacttgtcatatacgtgacatataccgggtaggaattaagctcgccgttgttgcaaggctccatatctccagctttaattctctgacgtcgccactcatgttcgacgaccccagtcgcaccaagtttgacaatgcaaaatgcaatgctaaatgctaagaccactttacagcttttgttagctcatacatgcgtcactgcttttgtcttggactctctcttcatctagataatcaccttttctttcaaaaaatgggtgcatttttttttcaggaaaatatgtgtaggagataatcacatttccaatccttgtctcaactctcatcctcttttcctttttccaaaggcaaaaaacacattcatctttcccccgttcttgtcaaagagagatgattcaaatcgtagctaatttcagtttgcctcaatctcaagctgatcaggcatattctctaaaatgtaccaatgtaccattcctacatggttgcctctctactttctttctttgacttgtggcacacacctctatacaacatacgttaggggtactatgtatgcatggcaagtgagaaaatttcccaattaatggcattgttggctacttattaaatatcatagctgggatgcatgactaaataggtccatgttgtgtataagagactccaggttaggccgcttggatgatgcaatttcccccctgttatttaagcaagcattatatcgctttaatgcaccattgacttaaaaatgcaaaggagacaattcttttttttattgcttgccatagtgaattttagagtggcccacgtgtcatcgacaataaataagacataccacgtccgtcaaaaagacattatttataactacgcacgtgggcaagtacttatctagattcaatcagaaataaagtctatatgaacagagggtagtaagacaaatatttctatggatcaaaattgatgctcctataaaaaaaattactggtgctgttactaattgggtaacataacatacacatgagtccatgaaatgaattgctgtgatatatgtcaaagtgaaagtggtgaaatgcctcttgtgtcacaggtgatggtggtatcaaatccaaggattccccatccatggggaaaatggccaagtttatatgtgcctttgcctcattattgaacacccaccccccaccctacccccctttgtgtcacctttgattctcccctcctccaagttgcatctcacttttcctccttccccctaagctcacactagccctcttatatacacaccccaaaccctcctagctctccttgcaacaacaactaagttgttggatagtaaaacctagctttgctatagcaacaacaacaacaacaaaaaatctctctcacatggtggggatgcgtggagcttatggctacaatgacaacggcaacgagggtggcgtagtagttggagggggggaggcggaggcggagatcgcggcg

SEQ ID NO: 5751 - DNA, 2000 bp, Oryza sativa
acaacttcatggtcaaaactgtcctgcactcccttgctgtttgagtgaagcacacattttgagctaggtcaactaaaaatttctttacctgctgtgaatgtcttagacttgaattcttgaacaaccaaaagacatcacttttcagttactccaagagtaattgaatacattgcccaagccatgtggtagtgracacttaaaccattgttatctcctgtggtgcaggattttgacaataggggtgaagatgtaatgatgcactagtagatagtatggaatattgatagrgaaaattccatgattccattacaacagacagaaaaaaaaaacctgcattgattttttatagggcatctttaaatttcaaaatgtcaaattatgtatattttgacccgcatttagtcaaattagtatagttagtatatatttaatgtgaaatttgtgcccatagattcatatttcaaagtgcgttcacaaaatattggctttatagctattaagaatataattctgagaaatcaatggccaatgtttaatcttgaatttttgttttcaaattaaaatatgccctataaagaccaatggaatctaaaaaaataaagaaaaataaagtttgacatgtattacatacaaaatttttaacactttgggattcttatctaagtgcacattgtatacgtacatgtaatcctatatatttggtgttttttcaagttttaggggtgcatctgtacccccacgcactatggtgtccaccattggttctgttcactactcctgacttgttttcaccttttttttattattattctctggagagctcagcggaaggttatcttgagcccagcagttatttattaacttaaaggctgcaactaatatctgaccaatggaccgattttctcagtatgatagggattcactgaaggtttacttacacaaactcttgcattttttattcaaacatagagaatctttttccataacttgcacatcatgttctcatctttcttagagtgtttatatgcttgatcaaacctaaattttgcttcaaaatgaagtatctgcacattgcctgagatgcttctgcacccgtttggcattcaataattagctagcagtgatcatgttgattctcttctaacttttctcccttgatttgcttcattgacacgagcacaactgtcatgcaacctttttttttctcaacttaatttcaaaggaagaagattgatttcatcaaacaatgggttgttgctttgatattatttactttaactgactggtgccagttaagaaattattatgggcagttcctttagtgttcagatgcaatcccaagagaaactagcagtgataatgtcatagcgaggcaaccatattatattccctggttcccttaaatactaacaaaacaggaaatggattgtttttctttcttttccactttgcatgaacatacacaatttcctctggaacaaacgacaacggataaactgatatattatctcatatctttgaatccttctgaacttctttaccagaataaattcaacccatataatatttaaaataaaaaattagaacagctagagagtattaccttttagcaacatgtcgtgacctattcatcaatacaagagcctgtattactcacaagtgcacaagccacgaaggatgaccaccaccaactaattatgcaatattaccaggtaatactatctagatgcctgatccaagacttgcgtattcttcaattgaagtacatgcacacaactcatagggcttgtaaaatctcgatctccaagtcttagaccatctgcttgttgcattaggaaaaataaaatgaagctgtgggaaatggtttatgtcacttgtttactatagtacaacctaagcaactgagctataaagcaggctgcaagttataatttgcctcaacaatcatagaaggcaactctttcatcataggcagtggttccacagtagtcatgcacaac

SEQ ID NO: 5752 - DNA, 2000 bp, Oryza sativa
atcgacagaggatgtgaagaacaggtaaatcacgcagaagaacccatctctgatagcagctatcgattagaacaacgaatccatattgggtccgtgggaaatacttactgcacaggaaggggggcgatctgacgaggccccgccaccggcctcgacccgaggccgaggccgacgaagcgccggcgagtacggcgccgcggcggcctctgcccgtgccctctgcgcgtgggagggagaggccgcggtggtgggggcgcgcgcgcgcgcgcscatattkgtgcggcgcscgggggtcagccgcagagccggcggcracggaggactagggcgscgtcggacgysarmttscgatcgagttggkcwkatgcgcgagttgggcttagccaattaggtctcaacaatctattgggccgtaaaattcatgggccctggtttgtctaggcccaatatcccgttcatttcagcccacaaatatttccccagaggattattaaggcccacacgcagcttatagcagatcaagtacgatgtttcctgatcgttggatcggaaacgtacggtcttgatcaggcatgccgacttcgtcaaagagaggcggcatgacctgacgcggagttggttccgggcaccgtctggatggtcgtaccgggaccggacacgtgtcgcgcctccaactacatggacacgtgtggtgctgccattgggccgtacgcgtggcggtgaccgcaccggatgctgcctcgcaccgccttgcccacgctttatatagagaggttttctctccattaatcgcatagcgagtcgaatcgaccgaaggggagggggagcgaagctttgcgttctctaatcgcctcgtcaaggtaactaatcaatcacctcgtcctaatcctcgaatctctcgtggtgcccgtctaatctcgcgattttgatgctcgtggtggaaagcgtaggaggatcccgtgcgagttagtctcaatctctcagggtttcgtgcgattttagggtgatccacctcttaatcgagttacggtttcgtgcgattttagggtaatcctcttaatctctcattgatttagggtttcgtgagaatcgaggtagggatctgtgttatttatatcgatctaatagatggattggttttgagattgttctgtcagatggggattgtttcgatatattaccctaatgatgtgtcagatggggattgtttcgatatattaccctaatgatgtgtcagatggggattgtttcgatatattaccctaatgatggataataagagtagttcacagttatgttttgatcctgccacatagtttgagttttgtgatcagatttagttttacttatttgtgcttagttcggatgggattgttctgatattgttccaatagatgaatagctcgttaggttaaaatctttaggttgagttaggcgacacatagtttatttcctctggatttggattggaattgtgttcttagtttttttcccctggatttggattggaattgtgtggagctgggttagagaattacatctgtatcgtgtacacctacttgaactgtagagcttgggttctaaggtcaatttaatctgtattgtatctggctctttgcctagttgaactgtagtgctgatgttgtactgtgtttttttacccgttttatttgctttactcgtgcaaatcaaatctgtcagatgctagaactaggtggctttattckgtgttcttacatagatctgttgtcctgtagttacttatgtcagttttgttattatctgaagatatttttggttgttgcttgttgatgtggtgtgagctgtgagcagcgctcttatgattaatgatgctgtccaattgtagtgtagtatgatgtgattgatatgttcatctattttgagctgacagtaccgatatcgtaggatctggtgccaacttattctccagctgcttttttttacctatgttaattccaatcctttcttgcctcttccag

SEQ ID NO: 5753 - DNA, 294 bp, Oryza sativa
tatacttgcagtagtcagtactcagtacatatatgtgctgtccgagcgcgagcagagagagacttcaattcatttcccaccgtccaaataaaacactgaattcgaatattgaatgctctttcgcgtcgcggcatatatatatgaatctccgatcgatgcggctcgtcgtcgcagctagcagctagcacagctgagaagagatggatcagtgaagaagttaaaccatgagcaggctgtaatgacagtgggagagagcttgattagtttgcaggttaattggttggtgtagtagtc

SEQ ID NO: 5754 - DNA, 2000 bp, Oryza sativa
ttagcggtccgtctgtgaagataggttatgcagcaggcggagcacataagacgccgcctgcaagaatcagtctttgcacggtcgctgggatacccggtacccatgtttatgacatttaattatgagagaatgacgaccatttatcgatgtggagattatgggtaccccatacccacacggcatggttatctgactagttataggggataacttatatctatggaatatgtaacagatcatgacttgggtattacgtttccttgtatattacggaacggcctaaagtcctggtttgataatattggaaaccgataccgtattggttaaggtttctatcttgtaatcctgccctccatcctatataaggtgggcaggaggccctctagggggcatgagcacatatgatcgtcagatctatactacacctggcggattcaaatccctaaacaggagtagggtattacttctcatcgagagggcctgaacctgtctaaatcctttgtctccgcatccatccacttttaggtctcgtgtgctaccccttttattattgctgaattcatgtttcaacaatcgatatcatatttttcttttaatcgccgaatatccgaaacattaccagtcttaaccaatgtcgcagtcatgagtgatacatattattttattcggtacatgattctagtgaccactctgtcgattatgagatgaggggtgattgtgcggaaaactaagttaattgactatctcagtgatctagattaacagctggacaatcacaagctaaatatataaaaaaaaggtatgctgtaggattggatcgatcaatatcgagttatatactccctcctttcctaaatgtttaacgccattgactttttaaacatgtttgactgttcgtcttattcaaaaacttttgtgaaatgtgtaaaactatatgtatacgtaaaagtatacttaacaataaatcaaatgataggaaaagaattaataattacctaaattttttgaataagatggaacggtcaaatattttttaaaaagtcaacggcgtcaaatattttgagatggagggagtattaagatatgtaaactccacagcactagttgattctcctggaaactcattaatttgaaagggaagattaagctcaatgcaggagtgcagtgattgtgcagaaaaaataatttaacaaccccaagccagctatgtttggactacaatgatagctcgacgatcgcaagctgcatatgaaaatacgaattaatgctgaaatatttgggtacggtatcgcattctaaactagtttgctctacaatattatatgttagtatttattaattacatactctaatctatagtctatcgtgaaaataagatactatatatattgaacatggcagggatatttttcctgttatctaaaaataataacgcgcgatgcaatggaattaatcatgatagcagccaggtacgtagcagctccttctaatataataaagctcgtgtaaagattttgctcatttgatactttgcacgatgttagaggacatgaagtggaaaaagggtccttgatccagaccacagtagctgtggattgaatggcagacccaactttaattgtaaatttagagtttggaagatatgtcttttatagttctcttaatgtatgattttgttcatggccatgtgatcagggtgttactacatatattatggtattgagttatatatatatattatatgtggtctatagaagaaaaatatttctatttcatttcattaaacccacggaacatgtgacgattttttgagaatttctctaagccatttactaatgcagatagagttcgtggctacctagtgcctaggtagctgatatgcttagtataaaaacaccagagacagcagcaagaggctccatccatagacgcatcacataatcttctatctctctcaggctaactaatttcataagcacacatcttccatttccatcacc

SEQ ID NO: 5755 - DNA, 2000 bp, Oryza sativa
  misc_feature (1)...(2000): n = A,T,C or G
taatattcctgataagatctcagtctaattaagctgtgattctgcaactttttttttctgatatctgcctaatctcaagtcaactgtttctgtcatcccccatatatcaccagaaaacttgctgctccatctatcatctttctcgcaggtcagctttccagcctgccagttaatctgatcatcctgccacgctaaacagataatgcatttttaatccatccgcactgtactcatgcttgctgatgccaataaaaacggatgagcgcatgttccgtttctgaaacctccaccgtgtttctcttaagttcagcaatttaggttgtgttcttctccccattttcccaacccacctctctcgttttccccacacacaattttcaaactgttaaatggtgtgatttatgtaaaaaaagttgtttaaaaaaatcatatcaatcctttttttaaaaaataattaatacttaattaatcatacaataaaacaaacttcgttttgcgtgctaagcagcatgcgatcagtgcaccattaaactagtactaatttatttttgaagcgaaacaaagcattttgcaacctcaattacgtagcatatgcatatggtctaagttttaaaaaaaaaatggaaaagcgtatggtctgcggatacatccggacagctcaggatcagatcgatgtagaagtatgcatctggtgcgatcgtgatccggattttggcatgtggtactggttgtctgacgtggttagctcatcttatctcatccctatgaatcagaggcaagagcgagagaaacgacctgagctgtgaaagccgacagaactgttgaatcaacgtgcatatatcattcgtcccaagatgaattggtttcgataacaaatcaaaatgcataagttaattttgactataggtacgaacaacttattttgagacggtacaagagcagtgcaagatatacaatgcgtgcctctgccgcccgtctaaagctacgaaatcagtgtcagaccacgagctccacaacgcaagtgcgaggaatcgtttctttgatgtggcatgaagggacgagtcggagcaacaagtcccaaagcacctttctgttctgacgagacgaagaatgtgtctccttatgtgggggcgagagactcagtagggacgcgcgttttgtcaacacgtaggcgaatatactagccggcgatacgctataaaagctctaagaggatgcatgtctctcaactgcgtacaagttttaaaattagattttgaagttgaatttggtttcttttgcactagctttcacaaagttaaggaaagcagacatatgtaaacctttagctgtaaattatttttctattgttctatttattctttttcacggcgtagcttcacggatcaagggtkagatgaaacgtcaaacgtgccttgtgattatcttttctcgtactgcgtcgttggtagtacaggagttctcacttttttgggcccccacgcaaacagccaaaacctggttcacgagtcggatttcgcgacgtcctcgggtgcgtccggttcgtcgctttcttggcctctcggccggatcccacccacccgcccgcattatcgtccagatacgaagccccacgtcatcctgcccatacgcggtgggggccaggttcactctccctttcccacgtccttacccgcacgaatcgcgaagcgcgcatcgacggcgcacagaccgccacgtggcatccgtgggccatataagctcaccatctcagctccgaacatacgcccccctgttcttcttcttcctcytctcccttttcgccktgctggtggtaaktgaggcggcaagcggcragctcctccgktaatccraggttcgccggccggcaaragcttscctktttcggragtttttcagggtaatctgagagcacagcgasccnatggcggcggcggcaaacggggcggctttgctgcgttggcgcaacgggcccagggtacgcgacgccgctggaggcc

SEQ ID NO: 5756 - DNA, 1124 bp, Oryza sativa
cagagtttcttgagataaaaaatggcagagggggagggagagggcsgggagaagaagagtcagcgtcggcggctgaaggccgcsttsctgscgggccccggggtgcttcacgggtktcsgcsgccgacraggggccgtcgggctccggcggcsgargaagggggartargccggcgccgacgcatctggtcgtgacggtcaatgggatcgtcggcaggtgatccgtcttcctcgaccctctttcgctttgtgtcttttcttttgcgtttcgtttcaccaaccgtagcttcaaactatattcgctcaatgattaatctcgttaatttcaatgctaatatagttttaggattgtatttaatatttgaatgtatcgattccgttagctttgttactgtaccatttgctataataaaggaattagggaggatgcactgtcagacaaaatttatactcttgggactgaaagtgtcaatcaggctgggtggtttcagatgggtatccacactttggtgtagtggatgtggtagatcccaagacaacaccttgggaattgtcgagttgaggaattagcagcattctctgattaattttggatttgaaaaatcatctgcggctagtggtgctttcacatttcaaaacttgctctgaatcttttcgatgcttcacctgtaacaaatgtgaagtcgtgacttgtgagttgtgagcacttgcatcgtcaatggcatcaagaaaatggaaacacttttctccactaaaggttcttataacagtcactaactcactatagtgctcgtgccacctactagtgctcgtgacatgtattttgggacggaggtagtagtattcagtaagacgaacattagatatataataactacatgataatgtgattcatgcggctgcagtcttggcacatgctccttgagagtacaacatgaatccatgtgcaatgctggcaaccagctgtgtacacatgtaaacccccaaaatgactttttaggttataaccttcttagctatcatccaaatttcagtgtttagtagtatttattttagtaaatgcgccacacctttatgttcttgtttacccacaaacacaaaaggtgcttctaagtattcaagga

SEQ ID NO: 5757 - DNA, 2000 bp, Oryza sativa
acctaaaagaatttaaatgaaaaagttatcaactataaaattatatatctcattaagagctacgattttcatataaactttatcacaatctgagtacatataaaaaaattactcacccatctcagaatatagcaacctaggactggatgggacacatcctagtactataaatctgacaaggggcatgcccaaattcatattactagaataagtcccatccggttctagttactatatttgggacgaagggagtatgttcatatatccgtaattagcgctaagggcatatacaatggttgtcaatagtggtctcttagtgatgttaatttggaatacttgttgacatggaagaaatagaaagaggagagataaaacatcgttgtcatgcataacaacagcttaacaacgactcttaatcaatataatatagaaatatggttgcatgagggtaaaaaaaatggaaagaatattaacaaaaggaatattttttgagttaatgattagagactttgtcgtctctactattgtaaagattcggtctctaaataatcttgtattgcttaagagaccatactcgtctctaccattgaacatgccctaatatggtcagggtcacagatgaattttccaatcaaccgatcaataggtcaaccttcccactccaatcggctaaaactggcaccccgctccaatccacctaaaccggcattgattggttaatcattagttccgggtattcttataaccggcactgattatccgccaaagtaccggttcttaatatgacttggcactaatatcttctctagatagcgcaagagtgttttgtggagcaggaacatcatcaatgccggttttgttaaatcggtactggcgactacggttcaattgcacatatatccttagtgattaataaatatactccatccgtcttaaaatagaaaaacttctaacctttaaaatttattctaaaatataacaacttatgcattaacattttcttcctaaccaataacaacccttcaccattcaattttccctcctcttatccaatcataatctctcatcatttaattttacctactttcttaataactaataaccatattcaattataaaaatatttatattttaggattgagggagtatcttcatttacgggcattttaggtttttcacagggatatttcctcgacaacctcaacctcacgtcacgatcaacaggcaccggtgatccacagacacacagaacatatctttagtggtatacgctgccggtgcgtgaatgtcgtcgaccattcaaccgacggtatcatccaacggttgggatcgatttctaatttgcaaggactagggtctgattaaggcacagattttattagcatgtttataaaattattaatcggtgcattctatataaaaactttctacactttaaaatatcatataaattattttaaaaaattcaaaataattaaacttaatttattataatgctaatagtttttctctttgtgcccaaatacccatacttaggccgtgtttagttgttttgataaatttttttttatgtatacgatcacacatttgaattattaaatatagactagtaacaaaacaaattacagattctgcatgtaaattgcgagacgaatctattaagcctaattaatccatcattagcaaatgtttactgtagcaccacattgtcaaatcatggcgtaattaggctcgaaagatttgtctcgcaatttacaagcaaactgtgcagttggtttttttkgtctacatttaatactcaatgcatgtgtcaaatatttgatgtgatggaaaagttggaagtttgaggggaaaacacgttgaccttactaatccgagctagtctatgtcgaagtctcgttccctttataactagcttagcttgctcctttcatcaccttctcatatcatcaagaaacctcgcgacctccaccaactccgatcgaacagcccaatcgacc

SEQ ID NO: 5758 - DNA, 2000 bp, Oryza sativa
ccgggtttatatatactgcctaaaacccttctctgagtctcgctcttaattctgagagcatttgtacattttgtaggggctcaagctagggaaagtcttttttatcattcgattgatcattaactcgttccatgtacccaacttgtaagaaagtgtttttttttcactagaggaataatgtgcactcgttgtttcatgcatgcatgtcacctaaaaagttaaaaagttatagaaagctgataagatataccgatatgtgatatatcacttcacaaacatgtaaatttaaattcaacttacgcaaatagaaaaaaattagtataagtatagtaaataatacaaataaaagataaattatagtaactcattaaaaaaagagaagagatgaggacaatacatgaaaaaaataattttgtaaaacctggtcacatgcatgttggtgatagaccatattcgaaacaagtcacataggataacctacaactaaattcatgcgttaattaatgaatttagggagaggacacgtgtcaacttgtgaatatggtttctcaccaatgtgcttgagacaaggcctcataaaattatttttccacatgcatgttatttgacttttaagaggtctgcatgccctgcgctttttcctgacagaaagacaagcagaactatcaggtttggatctatttatagacattgtacaagtgtttgtcatgaataaaccagctaacgatctttatggggcgccgtatgtttatatttgtttttcttatcctcgccacctataaatacatatcttgttgcaacatctatcacccaactcatcgatccatccctctattatcaagaaacaaacaagattactccagctaactagctaccttggcaatggcctccttatcctccttcctgctcgccgcagcagtggcgacactgtttgtcgttggctcatacgccaccgagcttaccttcaaggttaatgagggctctagcgcaactagcctggaactcatcaccaacgtcgccatctctgaggtggagatcaaggagaagggtgccagcgactggacggcgctgaaggaatcatcgtctaacacctggacgatcaaaagcggctcgccactcaagggccccttctccgtccgcttcctcgtcaagaatggcgggtaccgcgtcgtcgacgatgtcatccccgaaagctttacggccggctctgtctacaagagtggtatccagctctaagtaacatacacgtatgctttttttttgttgagtcgcatgagaatttttagcctctaaataattctattttaagacagattgggccgcctgcgagcgagccaaaaaatatttttctgttgtcatttcatcggtaatagtccattgacaaaatggatctgtttgtcctttgtttttaaacggactgagtacttaaattgttgttaagattgtgttttatactatatcttctcaatttctactcaatcttttttacgcatatatacttattaaattgttaaagtatgttttttttaaaaaaaaatgtatataaaataatggctttaaaacatcgtactaattcaattttaactatttctttttactactccctccagactaataatacttgtcgttttagacaagagcgagatcaagctttagaatctttaattataattcatttttaaaatatttgtctctcaaatataatgactacatattagtcttagaaagtaatttaataaaatcatatatttgttaatacttttatacatattacaataaaaataatggtcaaagttatttttttagagactataatctcgctccaaacgacgagtattatcaacgaggactaattcattactcctgtacactaatccgtctctccacatgcgcctctatcaaatccatcgtcgtccacaaactaggcgacacctcccccgcaacggagtacggattccgatatacaatcaaaccccgaatcccgatatcacacgctcacc

SEQ ID NO: 5759 - DNA, 2000 bp, Oryza sativa
tagtgcaaattcagtaaaccgtgtgaagtgtaaggtacagttgtgtaatataaggagatggattttaatctatctacgggcatgtgccttaaatamcaaaaaggaaaaaaaatccaaataacccctataagtaactggtctttcaatctctcccaataacttaattttgkgcaacatatgctccctacaagtccattttcttcttctaacttcccacctctgtctagttttcactgatttctggccgcgcttagcaatttctcacatctttgtagatctcagcatggctagtgaagttgcttttgtcttctcttgttgggcataagattcaatacacatttttatgaaatgagataattatcatgtcttaccgtcacatagttggtggaattaaagtgtgtaaaagtgaaaggtaaaataatgctatggtacacacacctttggtggaaaggagcaactaccctcacagtgatggagggtcatagggtgtgagaaatagctagaaatggatagaggtgggaagatggaaaaaaaacaaacttattatgagtgttttgtatggaattaagttgcaaaggaagtttgaaaacactagtgacttgtaggaggtatttggatatttcaaaaaataaaaacaaaacactctgtatccatgcacaacatataagataaaattattagtccaattcaagagaggtctcacttttagtagtatgatttagtttttctgatttattgagggatatgtattatgctatatttcatacccaacattcttgaaacgtcctgtaagtccttatttcgaaataaaacaaattgtgtattttattcctagtactcttctttcaaattaacttataaatttgatgcatgtattaaaaaagtaggtggaattaaattggagaaaattgtgaatcatttaggagggggagtagccgagtagggctgaataagacccctatccagatctagaatgtagtactagttttctatatttaggcccggtttagttggcaaaaaaatatttgttttaaggtgtcacatcagatatatggatacacatttaaagtattaaacgttgtctaataacmaaataaattacagtttccgcctagaaactgtgagacgaatttattaatcctaagtaatccatcattagcaaatgtttactgtagcaccacattgtcaaatcatgacgcaattaggctcagaagattcgtctcgcaatttacacgcaaactgtgtaattggtttttttccacattaaatactccatgcatgtatcaaacattcatgtgatgggtgaaaaatttttgttttgggaactaaacagggcctaggacagagccagcgaaaaacttcctcacctgagggtttgtttagttcacgaaaaaaaaattttggctgtcacatcggatgtttgaccggatgtcggaaggggttttcgtacactaatgaaaaaattaatttcataactcgtctgaaaaccgtgagacgaatcttttgagccttattaatccgtaattagtacatgtgggttactgtatcacttatggttaatcatggactaattaggctcaaaagattcgtctcgtgattttctccctaactatgcaattagtttgtttaatctatatttaatgcttcatgcatatgtctaaagatttaatgtgtctaaaattttttggaaacattttcgagtaactaacccaggcctgaatcagtaatctcgtcagaaatcaagagattttccaccgtggctgtgtgtaggcccagtgatgtgcataccagagaaatctcccacagattcctgggcacgttgccttcctctggagacatcccttgccttctccacacctccactccattcgattcctcccgccctttcctccccgcttttcctacaaaaacccctgtgtcgctccaaaacctgagctcctctgttctgttcccttctccacctatcacctctcctcggatcgtcagcaacagcggcggcg

SEQ ID NO: 5760 - DNA, 1945 bp, Oryza sativa
  misc_feature (1)...(1945): n = A,T,C or G
cccaaccgtggsgcccggcggcgatkgccgcncccgccacgagcatggacgsgcgccggccgsgcctggcggtgacgtgcgaggcgaggaacgtggttgcgaggccggagacgtagagcgacgacgtgaaggcggtgagcagctggctgtcgaagcggcagtagttgctgacgcgctygccgccgccgtgcatccggcggtacacctccgggaagaagcgctccaagaaggcgtcatcgacgtgacgccgcctgcaccaccaattgtagcgcgtcgttcatggcgagctcgtcgtcgatgatgagtgggagggagggagggagagtggtgggtgggtggttttaccggagacgccgatgtcgtagccgaagaggatgccgccgaggcaggcggtgacgcaggagaggacgacgaaggaggtgacgcggccgtcgtaggggtggtggatgagctcctggatctcgggagcggcggcggagggcgccatggctgaggtcgagcacgccggccggcggccggcagcacggaagggtagtktagtctgctcgccttgttcggtgcttgcttatccactttttgtcattttcttctgttttcagagtagttgatggctgattgtgtggatgattgcagaattggcccacgggttctgatgtacatgccattgaaagaagagatttttacaagcctggaaaggcgatcgagagtactgtattcctttacacttacttcctcccgcccaaaaaaaaatattcctaacatcttaagatagaattagtgaagagtgagaatgactaaaatatctttaatcattgaaaaaatagtaagagtgataggcaggtaaagagtattgaagagataaaacttatcgtttttcatgatgaaggtaggtaggatgatagaaattgattttttaaacaaaatttaaactttagaatttaaatttttttttatggaggaagtacttaacagtgttcatcattagtgctcgctgccatcgtaaatattcaatgtttaagaaaaatatttaattacaattataaacgttttaaaaagatctcaactacttagctaaaaaaatggtttggggaatttgctttgaacaatacttttataagaataatgtgtatggacgatctttgtatgagtgtatgatatagtttcatgaacttttaaaatgtatttttagttgatgtcatgtatgctattccatacattgatgtggtacgctacggtggttcatatgtgtcaatgggacccacgtatcagtcacatatattttggggaaaaaattaaaacgtattttctccattctttaaaaatttaacttttaaaagatttacaaacatcttactctcctcttttaatttaaatttaattttttctatatgactgatatgtgggtttcactgacacctaggtgtcaacgtggcatctagcaacgcacttagtaggttggagtctgtttggatctatatgacattcatgataacttcaaagacaaaaataaaatgtattttgagagttcaggatatggcatattctaaatttactccttttataatgctaattaagttcgtgaatttgcgaatggaaaggggaaaaaaatcagttcttaacactaatccacgttggcaatccaccgtgtcacccaacgtaggtgaaagtggtaaaaaagaagaggaaaacttgtctgttcaatgacataaaaattaagtacgataataggagtgacatttgaagagtcgtcgtttataagagtagcaaattttccaggtcaaataaccatttatttccaagttaattccaatcgtgaagggcacggcgctccagcttacaacctataaaatcaccttaactgcttactaagttaccatactgacagtgcacctgcgcaacgacaagtactagatctacaaaatacaagtcaaccaagaagcgatcg

SEQ ID NO: 5761 - DNA, 2000 bp, Oryza sativa
ccaagtgcaccatggtcttcttgtctggcttcgatcgacttctttctcacgaatgagtacaaacttttgtgattttcagctgaatttcattccttcaatcacattaagaacatttatgcaaacctattttatatctgaattctgctcaccttgaagttcaacggtagagccttagagggttctgcaactggaagccagaaatgcaaacttaacaagaaaggtcagcatttctggtttccctgacaaatgagtgcagttgttagtgcacgaagcttattctgcagaggaactgtacatcaccacatctttatttggcttcaacaattagccttatctgttacctgatttgtttcttatcactgaacaaaatcagctagtagtagaaaatatgttgtcctttctttcctcaactactgttttgacaatgttatgcgagggaatgatgtgttaacatgagacagcatgatgaacttgatgcccctgtttwaatccaagtagaagtagctactgtggtccaagagacaagcaacaaccgctgaaaaaccattgtctaccgagtttgatgactaaactactttcttgtggagtcaggaacagggtttcaaaaaccsccgggggcccggttaccgccacccggcggtacggcggttaccggcggtaaccgcggtaaccgcgcaaaaccgcgacaaatttacaaatcgaaatttgaattcaaaaattcgggcaaaccacgcggtttgacgcggtaaccacgcggtttggcgcggttaccgcgcgatgtgtaatgggttgcacagtaacgggccggcccatttttttttctttttccaattttcaaatttattctccgttttgctctcaaatttgaataaatattactcttttttgagaaatttcttcaccataaaacactataaatcaagcactaccttcactattttttttgatttttttcyttttttttaaatttttgaatttggacgaattttattaaaccgtaccgcgcggtacgggtaaccgtacccccgcggtacgggcggtaaccgcggtaaccgcgcggttaccggcggtttttcacaccctggtcaggaagccactagcttggaacagactccccatttgttttgtttttttctttttcatttgcaagacagaatgtaaaaggtagtgcttcatccatttcaaaatataaatatttatagcacttatataccatagtctaaataacttatggaacactgattccaataaataaaaatccatacatttctggctaatcatattttatggtacaattataaataatctaaaatttgactattagtatgattaaaagagaacttttttaatcttaatattttgtaaataactttaaaacaaatatggcttaaaattgaggagtaattgaggctccatttttatatgacttttatacgactggttagatttctcgtggtggaaccagtccacccaaattcaaatcctagatttgacacgggtgcttgtatttatggctaattattatttcagtggtagccgatatacgcctagtcttttaaaggtgttcgtatgtgtagggtgtaagtgtacgcgcgctgaggacgcatatgtttaatactgtgtttctcacttctcagtaaaaaaaacgtccgttatatgaaaaaacacagtaattttgaagcaaaacatcgtgatttccaaggtatgtgcgttggcgttgctcacctcacctacccgttcgttactagtagttcgctgcttgcacgatttcccggtgcgccctggccgtccgatctcctcggcgcgggatttcgacggctcagatctcctccctcctcatcactgactcggtccctctccgccgcgaagcgtggcggccaccgtcgcggcgaccacttccacctccagctcgccgccgcagccgcctcctcctccatctccacctccacctcctcctcgcctccgttgggcgagagggagacggagaattctccgctgcc

SEQ ID NO: 5762 - DNA, 2000 bp, Oryza sativa
tatcaatagaagtggcggtgcaatgcaaggcgaaattgcgtacaaaccttgatcattcaaatcaagatattttttcacaatcttatccaagatgagttcaattcaagatgtgagagcccccatgtcctttctcccaatcagcccccaccaatggccacagttcagccaacaaagcccttgtcacacccactatgattgagccaatttgtgcccacaaggaaagcaaaagagctgtaaagccccatgcagctagattgggtcgtttctggatcggcaggaccagttgagatcgagagttgagagtggtgtgctactaacttttcttggatcatgcatgatcttgtccaaattttgaaaggcaggtgtagcagatggccaacaaattgactcgtggtcaatcctttttctctgtctaaaccaatcagattcaccatccatggccagtagtagcctgacaagtgacaagcacattgctgggacaaattctccagtctccactatgcatggagcaaaattaattgcaagacaaacttaggatcccaaatattttgaggggatctgtacttttcctctcaagttaaattcatgacggaaatctccgttccaacatggtttacgtgggttttaaaatcttacttgcatgatgtacttaacgcttctcgataaacccataacccaaaaccaagttatcctttagaatccctaaaattttatgctcagaatttcttttaccaacttaccggtctagagtgagtttaaggtttcaaccatgactcgtcccactgtggaaaaatctaattgttgtattctaattgttttctaatctattacactctcataaggtatacatagaagtaaataggggacaaagacttggagtacaatacaagtataagagtagatttatctctagcatactatctctaggattctatctctagaatatatcttatctctatatttatatttgtatttgacttttatctctaactaacatatttgtacttctaacacccactactcgtattgtaatttacacacccacttattacaaataagaatgcatccaaaaccaaaaccgtcctcttgtcgattttctcctagagatcagaaatctccaatcagaccgaaccactgcagccggcaagtatgaatgatcgatcaatcatccaagaatgcaaatgtaccaggctagacagcacgttggattcctagaaaacctttttggtgtttttagtaccattgcatgctcccctttgtcttccactgctcagtactgcactgcactgttaatcactccctccgtcccacaaagaatctatttttcaatttttgatacgactattcgtcttatttaaaaactttttatgattaatatttttattattgttagatgataaagcatgaatagtaatttatgcatgactattttgtaaaacaatttttgtaatttttttaaataagacgaacggtcaaacgtttgagacagaaaccgaaaaatagagtctatgtgggacgaagggagtacagtgttactgcttgccgaaatttaacctctccccggtcaaaacctgaccaaaattaaccgctctaactgctagcgaacagaaaacgaactgttcttttttctatctttcttttgcccgggcttaccgcgtcatcgtgcatggaaggtgatggagctcgagatcaagaatggcggtgaaaagggaaaagaaaaatggaggagaaattaaagaagctgaagcattctactccccaccaccaccgcccttatcttcttcctcctcctgctgctgctgctctgactcgatgcgtcgcccttggcgttttcccatttagtatttaggcagccatggtgtaggtggaggtggaggtggccggcagaaagcgccattgcccacctgcccacctcaggtctagccgggtagggtagggtagggtaggctcgtcgtcggcgaggcattccgccattgttgctgcttgcttgctttgccggg

SEQ ID NO: 5763 - DNA, 382 bp, Oryza sativa
aactcgtggaaccaacgggcagcccacacgaagcttacgtacacttcttggtctcgagccgagcaacctccagaaacaacggacacggahccgacccgacccaaccccaacccaaccagaccgacccagccgcaatccaaatccagccgcaaccgcctccctccttcctcctccgcttccccatcccccaccgccgtgttttcccccccacaaacccaatcgccgatttgccgtcgtctccaaggctctcctccccctcaaatacccctcctcctcccttccccttcatctcgccgccgccgcctcactcgtctcgtgcccccaccgcatctccccgcaaacggaggactcgggaaccctaggtttactcccccgccgccct

SEQ ID NO: 5764 - DNA, 2000 bp, Oryza sativa
aatcataattaaacttgagttgctatcctccgaaaaaaaatattagagttgctgaatgcctctagcatagttaagaatatatagtggcctaaattaatggttggagtgtccaacttgaactgtttgatacctgagccgaaaaactatagctctttccatattaggcacatgcttagttaaagccttcgagttgtgtgcattacgtcacatgcaaacaatgcaggccaattaattgcacgtgaaaattcgaccgaatgaatcgtgcaacgttgaaatcctattctcaagcatacacaaaagaacttcaatctctacgaaccgacgatactttagttgataaggtttcttggcagaatttgttcattggcagctcaagttctagagtgagtacaagtactcatatttatgattatttatttttttttagtaatgagcgatgtactaatcagctacaagacacaagtaattttatcaattttaagttatatcaattatttgtataagtacatgtaagcccctactcatgagccaaatgatgatcagtggtttgcaggtcacctcgggctcggttcgtttcacaaacgagctacgaaagaggcttgagcttagctcatttggctttcaagctgagctgagccgagttggtcaaacgggcctaagctttttatccacctatgttcgtgtgtaacttttagtactagtatatttatgttaccgctattcattccaccacagatctaatggttgaaaatggttacaccacatgtcaagtcacaagtagggagataaaacattttgggtagtaaaataggatcccatctcgctcatgacgattagtccttttacttagtcatatagcccattgccccacatgtccttggttttgctctcgcggggatgagaagacattgaattaggttaggcggtgaagaaaatctatggaaggagactcctaccaagaaatctccttgctggtagtctcaagaggtgaacacggagcttaaaaaaaacattgctaaaggcattataagagagatgatggttcttagagttgaagaatcaaggaaagaaacgagatataggaaaaggctaaccaatggagaaagatgatatagagttagcgatagagaaggctatgaaagggaggcaccgatacaccagccactagaaacgaacaaggaaagggaagagtattggagaaggtgttatcacaaaagtagaattgagatccctctaccttctgtctttaaacgcactgtgttttaatcactgacatatgggtcagtgatttattaggcttacacgtcagtgacaaaattaaagtcgcgtgacttcaaaactagaggagcttgatcctcatagagtgataccttggaaatacccagagctacctcctccaaaagcaaaaccccaaaaacatttttttaaaaaaacacgtatacagccaaaatacgttacacggtggcctagccagtatataagttgaattgaagccttgaaggtatataggcaactggttagacttttttttccctttgcccataataaagccatctctcataaagccatcgacctcatctcctcctcctcctctctctgtctctctctggctgttcttatcagtttacgttgtcctcatcgtcgccggcgccgccctccaaagcttcatagatagctcgatcgatcgatcccgtcgtcgtcgawcgtcgtcgacgcagcagcctcgccggcggccggagactggggagatcgatcgagagggagggaggttgagtaaggtggatccacgggtcaggcatggcaagaggcccctaccggccggcgaggaggaggaagaagaccagccaccgcctccgacaccaccagcaaagcaggagcagcaggacgaggaggagctcgccgcggtcgtcatcagcggcggcggagcaggagcagctccggcgccggagacgtacgcgcagtactactacgcggcgcgcgccgaccacgacgcctccgcc

SEQ ID NO: 5765 - DNA, 2000 bp, Oryza sativa
gtaaatatttcaaaaagggttccatccaactacattacatgcatgtttcactcatggtctcagggatattataattaagagaatatgataccaaaagctgtttttacaagtaagttataggttaatttcagcataaagaacgttgcaataattcttttagacagttaaacttctaagtttctgatctgaagacgtattcgcaacattttctctgaagaaactttagagagttactagtagtatgaactatgcatcatgagatgctgcagttagcaaccgcaacaaaaacacaaataacaaactaatatatacttaggagttcatttagaccttaaacataacaaaaagacacaattagtgacctgattgattctgtccatgatgaggcatagatgatgatagatcatagattgaggttggcagcaatcaactcaactggtacgaagaacatggctggagttctagcttgtctccagtgtccagcagagcaagtcaaacacgcatagcaaacataagattaaacaaaaaatccccaggacaataggtgtcaatacgatgttctaaaatatgtcatctctttgtcattattaatccccatcagtgttgtcacctaactgatcgagccatttaacagtggattctgcacgtaatacggcgagctcaaaatcacactgacagatcatagaatgattaattaaccacgatttgtgacaaaattgttgttactcatttcattattggagctaactaatggacttgcaaccaactgattgtgatgccaaactttataacaaaccgttcgaaatgtcagagccacactgaatagcaaaataccatttctactgttgatgtcagagttctttggatttagctccaactaatataattctacgaatcgatatgttatcataaagcaattcaggataatcagttccacagaccaacaaatgtcaacactgccgaccaaacagcgcagaacacgcggaatcaaaaaagaaaaagacaagttctttgaagcaattactaattcatatccagaaacatcagctgtagtattatggaaatgattaggtaggcatcagtgattcagtggtaattgcgcggtgaaagttgcatcaaatactggtatggtcaaaactcaaaagaagtaatgcacacgcgtggcttgggttaggcatagctggctggaaaattttaaaaaatagagcgatttattagcacataactaattaactatcagcaaaaataatttgaaaaataaattactacaatttttaaagttacttttgatagaattttttttaaataatacatcgtttactgtaacgtgcgcgtgaaaacaaagtggtcagtttgataattttctcggatgaagggcctgttcactttgatgaaaaaaaaccttactaatgccaaaattttggtatagttgccgccagaatttttataggatttcttatatagataccaaaatttgacagaaaaataaatgtaaccactttttgacaactttaccaaaatttggtaaggttgaaaatggcatcaaagtgaacaggcgaaatgaggcagccgggaggcaacctgctttgtcggatgcccacatttttcccattgataatattatattctattattctattctattcttgtggtttgcttggcgccatcagatggcaatgcgtttgtttcagagcttaaaaaccaccatgtgctccgttctcttgtcctgcctatctatctaacaaacatatcactgctcaactcacgggtgctcgtgcaagaggcccctccattttcaggcacctagctagctcaggccattgaagaacgcatccaagaaaggtgcgagaaagaacaggagcagagactgatcaagattcagtgattcagaattggagagggaaggagagaagattcagagagaaacagaagcagtgtagatttggatttctagtccgttttgtctgaatttttggtgtgtttgaggcacgaggagtaag

SEQ ID NO: 5766 - DNA, 2000 bp, Oryza sativa
caatccatatcgcttctcgctgctcgtctagtctgttgtgctgctgctacctaaagtgagtcctatcctatttgtatattgaatcaggtgatttatcatttatgagaaattaagacttaagttttgtagtttctttattagttggtggatttgaaatgtagaagaaaacaacattgcttgattactttactaactctcccccactgatgaggctatatattgttaaaactgctagaattttatcctaatgaaatctttgccaatccaacccaacgaataccatagagaattatgctttgaaattagagatggggtagcatatttgttgaatttgagttgtataagggtgcgtggttgatttttagtcttgttgacttcgactttaagcccacccttaatttttatgctggattcgccactgcatggaagtatgattaagtttcacaagggggaacacggtcatcatccaatctcctgcctggatgttctttatgaaatttacgcattacatacgaccatgtgagaatgaatttattacagtttttctcaaacaatgtgtgcatcatattttagcagaaatgctgtttagagaacctacaaagccaatccatccgcatgttctttaattagtgaaatgttttcttttaaggaaaggtaaaactttgccaattttatattgatagggaaggaattagtggaaatgttggcttcttgtttagtccgtactatataagctctttctttttcttacataattatggaaatgattaatatatattcagcttttgccctaagatacacaaccataagtttgttcaacaaattaaaaagagacgattggtgatgggagaaaacccctaactttcccttattattaacttttgttaaaccacatagattcaaccaacaattctaatggaacaacaccatccgtaattccgtagtgtaacaagagatccttcactacgaactattgtgcatagtatccaactcctctatgaaagcatcataaaccaaaagtgaagccaatagaaaaaaaatgaagataagctacatcgggtttgacaattgcttaccactaaaaactttgtcatcgtggcaatgccaaattaaccaacataaaacactagctctagttaatatcatctttttttgacctaggtatccctctaagccaatcaccaaaaatatttttagcattacgaggtggagagttattgaaagtaaagaacatatagctccaaacaaatcgagcaatataacactcaaagaaaagatgttggattgtctcttttgcaaaatagaaaacaatttgttttgtcctggttgggactaaagtttccttacacttataatatactactacattctctacatttgtgccaccaacacagtttgtaatgcatgtgttcccttttttgcttttaactacatatttggaaaagttactaaaaatataataatataaaatgattttcatgataaatctatcgatgcggtttttatatattaaacctaatatgtataaagacatattatatcacacttaggtgcgttataattaaaatgcacacaatgttagtaaatttgtttattgagagtgcaattatcataaatccccgtacaaagtctaacagtaaaatttttactatcagatatttgagaatatataacgtgtagtaaaatatttactatgtgagagacgtgttttatagttattacgcaccaggatattagtactatttaagagacggagctagtaatgccacacaatcagcatcttaaaaaaagacgaagaagaagaagaaagtttttaaaaataagccgggccaatgcagcacatgtacggatgtaccactatgcacaataaatataagcaactaccggttggcatggagaatatctgaatatactagtattatcgtgggtacccaaatgcacaataaaactggctagctagcaacctacctcaaggctcaagcatcattatattccaaacc

SEQ ID NO: 5767 - DNA, 2000 bp, Oryza sativa
cataataaatttgtattgggttgaaaatgttactacttttttctacagatttggtcaaacttaaagcagtttaactttgaccaaagtcaaaaacattttataacctgaaacgaaggtagtactttacactgattttacatgctacggatgctccatatctgatttttatacttgagggattcgattcaaacacgattcttgttgtgagggacctaaagtgaaccaagtaaaatgcgttcatcttttgcatgctttcatgggtcggggcctcggggagagaaacctccgagccccacggcccacaggcctaccccgccaattccaatcgttcggcctagaaatctccgagccccacggcccacgtcggccaccgatgaattgtggccggcgacaaccatctctcatcccctctcgacggacgtcatcggcgttccttgaccttgtgggtccagatcccctagagttgggtataactctaccgggtagagttggccaaatctgtgccattcggcatacgtcaagggctgggattaagccacattaatttatacttaaaaccagtaactgaccatgcaacaaataaacttacatcaacagcttgtcacgagatcattgttactgtataattagcacaaaaaaaattcaagattcatctattatttaaaaaatcatacacattattattgatatggttcgttgtttgcatatatgtgaaagcactatattgatatacactgactgccgctttagagttgatggactatatctgttgtttggggaataacaaaacgttgttctgttacattttttgggagtgagaacttaatcaaatcactattatagagcagacacatgaaaaaactaagtcataaccattaatttaaggagttaatttattaggtgaaatttcctttaaaaaatttattaggttaaattgatgaggaatgatctcagccgtagaaaacaatagatagcacagatttgactaacttcacccggtagagttatactcaacttcaacttcaggggatccagacccgacctttgtgctctgctagcaaattaaccgggggtgaggatttgctctaatccattgatcaatcatcgacacctcacgttacaaacgtgcacggattctttttctgaataaaaccaagcaactacgaggccaaaacatcgtactccatgatccatccgatgcagatatccaattattggactccatgacagcatgcaccgatcgcttccatagacgacgtcacagatggcgcacgcaacactgtagcactgtaccacagcgatagactagctctatctaccgctggggaaagtgatttcatcgctcgtgagaataacatctcgtttcgttcatggcatctaaatagtcataaaagttttttaaaaaaatttgataagatatattaatatgaaatatatcactccacaaacatgcaaagtaaaattcaacttctacaagttataagaaaaacaaatatatctgcgagtgtaccataactactttcagtttattttgttctttttattgcaacttatataagttgaatttgatcttgtatgtttgtggagtgatatattttatattaatctatgttaccattttttaattatttttaataactatttagattacatgcaaccaacgagggacatcccctcgagagatgaaaattcatatcccaatatactctctcttttccataaaggtttcatttttgggtttttttccaatatttttctaacgtatttttgaccgttcatatttaaaaataataaaaaaaacaagtcacatataaaatattatttatattttatcatctaataacaacaaaatactaatcatagaaaatttttaaataagacgaagagatatacgttgtatcaaaaaatgaaaaatgaagcttttgtgaaacgggggagtatataaatagctagtagcctagtagctgctatgcgtaatacaacttactatttccgtaacc

SEQ ID NO: 5768 - DNA, 2000 bp, Oryza sativa
tggttgcctgcaggtgttgtcctggccaccgacttcgaagcaatctgtgcgccggttggaggtggcggagcactggtaccgactctacaagacggacaatcaacgggtaccacaatccggctccacctcgacgcgattgcggcaaccacgaaaacctcacgctccaatctgtgccctccgcccgtgctcgctgcatctcgtgccaccgtctcggactctcgatcctcatggcctgaattatcctaattcttcgttaccagtttttttgagactaatatgactcccatcaaacaatgcagttgagagtgagttcttacctgtattatatagtacattgtatttaaaccatagtacatggggacagtggtgcgttcatcaatttatggattgtggtaggctggtagctgtttgatttgtcactaaaattgcacgacgacaacactttggccctgtttagattctaacttttttcttcaaacttccaacttttccgtcacatcgaacttttctacacacacaaacttccaactttcccgtcaccttcactttaggttcctaagtttaggttaccttcactttaggttcctaaatttatcactaagtctgaaatttatccctaaaccaaaataccaggtacaacggatccctcaatctacaaaactcaatcacccaagattgtagatagtattatgtccggttttaactgacgtgtcaagttgagttaacgtggaatctatgcgggccccacatgtaagtggctagtacttttttccacgttggacgaaaccgtctcccaaaccactaaaggaggcgatatgcaccgattttgatagatgggggagacgttataccctgttttattatcaagagatgtgattcaaccaggagcaagagttgagagagcaagaatagacttattcgtgagcccacaggctaaacccgccacggcccacagactaagcccgccaactcgggccgttcggcccagtttgcacgcatggtgggccggaaactggaatctccgaaccgcaacggaatcgacgacatctgtagccacagcgcgcactcgacggcgggcagcttcgtcactggttcgagctgtctgctgactcaacgacgaacacacgtactcctgctcggtttcttcctccgtgtcgcacaaaagtcaaattgctctctattagtattcattattagcacttcaaacctttctttacgttttaaacgaaccaactaatcaggttatgaggactataataatcgaatccagggatcttgctggaagcaattgaataatcgcccaacgattgagttcatttcttgtctccaaagctgtctcctgatagtcaacaggtctcggtcctcgcagagtcgcactgcgatttggcctctggaaactggaaagagatctcgatccaccacaagaaaatgccaagcagcacgacgacgaagacgacaacgccttccaggtacgtagcaattgaatacggaatactctctccgtttaaaacgtttgattattttcctaatcaaactttatcatgtttgaccaaatttatagaaaaaaataacaacatcttaaatataaaattagtataactaaatctagcattggatatactttcataatatttgtttgttttatgttaaaaatactactatatttttctataagcttagtcaaatttaaatcaaattaaagaagattaattagaaaaatagccaaacgatttgtaatatgcaacggagtgagtagaagtaatcgcccagcctcgccaacgaggcaacgagacccgtaatgcaacgatcgcatctgcgtttcaggcgtcagccatggcgtctgcagagatgcctggattgtctccgcaagatctgatccatttcatctccttctagaagcacaagcgccgctcggtataaaggcagacgcattgtcacaaatagctgcagtgcaccagagtcacagaaacacatcacacattcgtgagctcagcttagcc

SEQ ID NO: 5769 - DNA, 2000 bp, Oryza sativa
tgttttccaaaagggaacgtctcgtgatagtcgtacaagtctcggtctcacgaagagtcggggtgcgatttgccatctggaatcgaagtgaattgcggacaaattggtggagaagtagatctcgatcaaccagaaaaggccaaagccgcacgacgacgacgagatctgatccatttcatctccttctagaagcacaagcgccactcggtataaaggccggcgcaatgtcacaaatggctgcagtgcaccaaagtcacggaaacatcaaacattcgtgagctcagctagccatggataacgcctacttcctccgtccccacagaaagtccatttctaacatcccaaggagagattagtgaagactaaaaataaccaaaatgatcatcattattgaaaaaaccagtaatgttgataggtaggtaaagggtatttaagggagaaaacttcttattttatgtgccgaggttaggtaggatggtagaagttggttttttgtgggacaaaattcaaactccagaagttgagttttttttgacggagggagtacattattgtcctctctgtagctatcctcttcttgctccactcagtggcgtagccaaaaattattaaagagtaggactaacgtaggacttaattagcgaattatttattttctcttacatttacatggtgatttaagataatttagccatgtttttggaggcaggtctagggctcaaaccctagctgttcaagtcctgcytcggcccctagctccactactacctcgtcggcctcggcaatggcaggagcaagagcaagggggcgccacggagatgagggaaagatgcagggaggagataaatctaacgggtgggttccacgtgcagatgaggaagaagatgaaaaacgtgacgacgataacatggttctaattttgtaaaatttaaatggtacggttacgatagacgaattgtaatgatatttatctaaatatacacatttgcaatggcacatatcaaattaacccttaaaaatataatcatatatttgtttcaaaaaaatataatcattgacatgttgttgaaaagatttaattaaaacaagagtaaagtgcacgggaggtctttaaacttataatggtgtgtcatctagatccctaaactctcaaaatgcatatccaagtcccaaatcgccacagcccctttcgggatcctacgtggcgctgatgtggcatgccacactgacatgacgtgataaatggaagccatttaaaatttttcctttttctcttttctttttttcttctctttttcttctccttcttcttctttttcctttctctgttacccgagcagaagaaaggaaagaaaaacagaagaatgacaaggaaaaaaaggaaaaagaaaaagaaaagaacaaaaaaaagagagaaaatggcacatcacatccatgtggcgtgccacatcagcaccacgtaggatcctagaggggctatatcgatttgggacctaaatgatacattttgataagttgtaggatctgaatctgcatttcgagactttggggatcaagatgacacaaccctacatgtttaaggaccgtctatataatttactcttaaaacaaatatgatggtgcagattataatttgattactaatttaggagaggaaatgatttaaagcttgttattttgtcgggggatttaaagcgagagatagatacaatcgtacatacatgcatgcacccttaatcaggtgtcagggcacccttaatcaggtgtcatgaaagtgagcatgcacacaagtattaggaaagtgagtatgcataaaagtatctttaatagatagggattatcactggataggcccgattctttagaaaaatatctagtctcgtcggaaatatctacagccatgcttagcttctgtacgtatgcacatctacctcttcatatataagtaagcagctaaccgctgctgtgcgtatccaatgaagtactccacttctgtaacc

SEQ ID NO: 5770 - DNA, 1403 bp, Oryza sativa
gctctttcgaagctttctattatggagtatcttttwgcagttttatctactctcagtgctattagtcaaaatatgttcatcactgtgctgttttagttatagcatgtacatctgggacttcaaacattattcagttcaactgctcatgaccatttgggtgctctgttagaaaatctcattcaaacagtgggtcaccatatagattcgcgtctaggttgtaattacaggtccacaatatttttgtccttcctcttctgtgtaccaagtgaagtaaacccattttgtatatggctatgtaagaagtattttttttcttttgcgagatggttatcataagggcatgctgcccttcctcccatagtttgatagcaggagataaagggcagcaaatttgtttcaattactgtggtgcatgatgtattttctgcaactttttagggtcgcaaaatggcaaaagctgcctggagctaactcccaactctctgtttcttgcgcagaactcgcgatgctgcagagcaagtttgagcaggacaagaaaaggatacagcagcttcgtgctcaacggaaattcaagccatactaatgctgcccactttggatatctatcctcagagacgcagtgctgctaccctgttgaaggccatacgtttcattccttcttggcagcaaatgtttgctctgttggataacatttttggatctttacttcttaatgaaccgaaacaatttcagccctgcatttgcagcgcagatgtattggtttaaaatcatgccatgaatccatgatgccatctggtgcctttcatggatgttctcctgttaagttgtactccctccgtcccctaatataagatattttgatattttacttgtattgtttgatcactcgtcttatttaaaaaatttatgctaatataaaaaacgaaaagttatgtttaaagtactttggataataaagtaagtcacaaataaaatgaataatatttcaaaattttttaaataagataaatggttaaacagtgtaagtaaaatgttaaaatctcttatattagataatggagggagtatcttttctgctgaatccccgactgagcctactcgacccgaggtcttggtctctgcctgctcagttctagccctccatgtgagctctagtcaaatcgtgaccaagtgatttgcaagaaccatctgagcgagcaactcccgcgatttcagcccagcgccatggatcgattttcttctctggctctgtcgccttgaaccccaaaccgccaaaccgagacgacgcgacgcagctgcaaattccacgagagatccccaaaatcagcagcgaaactccctgcagccgcgagtgccaaaccgcccgggggctgagctgagctgagctgaacctcagcttagcc

SEQ ID NO: 5771 - DNA, 2000 bp, Oryza sativa
caagttagagatagcttggtcaaagaatatggtttctttgtttgttccatgagtaggtgtctcgatgtctccggagagtatttgcggtgatggaccgggagtcggcttggggataagacaacgtccgtggtggtcagagatcatgcgggatactaaggctagagttgatgcacgtggttgatggagattccatatggcatacgatggagttattgtgtgcgtgtgggatgcggagttgaatttggaaggagtccaaatttggtacgattggttatgtaaagtttctttcttgtactagagggtttcctaaggtgtttaggactcctagtatgagtttggttcgtggctttaggctgcctaccccatgtataaatagagggggagcgtgaggcttccctgtatcgctttagagagcaattgagttgagttttgagttagggtttcgagtttagtcgaaatttttgtaaggagtgctgttggtgcactttgtaaacacagagagaatcaataaagtcgtcatctactttaagagttcttcgatttgtgtttaccgggtttcggcggtctaaccggcaactcaccggtggtcagaccgacggcaatcggcagtcacaccggcgggaacacggcggtcagaccggcggcggcgatagcaagcagcaggcgatctcggcggttagaccggtagatcaacactggtcagaccggcggctcgcttcggtcagaccggctaatctacttcggtcagaccgatctcatcgaaattgagggtaacttttatttccgctaaaagttttcggtttttgggtataccaaccattcaccctcccctctctggttggcttagttcttgtaattcgattctatagcaaccagtcatgccagcatgttctaggacctcaagacaatactaacacggactgagatggatgtcggtaggacgagcacttatcccaagaaagtgatggaatttgccaagatccttcatagagaactcagactgaagagcagtgataatcatccgtaggaggtcaccaaagaaagctatatatggggacaatatcatcaacatatagtaatagatagatcacagaaaaacctcgatgataagcaaattgagacgcattagacttagcctctgtgaagccaagagaaagcagaatgttggcaaactagctgtaccatgaccggggggcctgttacaatccatagagggacttgttcagacgacaaaccatgtcaagcatggtgggatccacaaatccgaccggttgagagcaataaattctcctgaatagtaccatgcaataatgcattcttaacgtcgagttgatgaatcagccaatcccgagagctgaaagtggatggttcgacaatcagcgtaaatgtctcatcgaagtcaatgccaagacgttgtgtgaagccacatagaacccaatgagccttatatctgtcaagagagccatcatcttaaacttgtgacgaagttagtgtcgggtgtattcggaatgagctcccaagtgtgattcactagcatagcattgtactcatccattggaacatgctagtgcgggtctattcggtgaggagttcatataagcacgaaacctccataatctattcagccgactcatagaaatataatcaagagagatatggggagggtcggtagggatcagacttctcgacgaggtcaaccggacagtgcacagttgataacaagaggagacgtagtgctgtgattgtagggttcggatcatgttgatcgaaagccgaatcatgtttgtcaatttccatcaaatcaagagttatcaatacctaccggaagatcgagacctagtttcttgtaataaaatatatagatggtagtcatttgaacgtgttacatgtgtaggtttgggcgtccatatatgcctatataatgggcacggtgatgcacacaataatcaaacaagattcacagaaactaccatcaataacaggactcctgcacttcatac

SEQ ID NO: 5772 - DNA, 2000 bp, Oryza sativa
ctattatagcatttgggctgttatacaacggaatcccgttcggacgggatgataccgcggtatcaggtcgtgatacctatcaggtatcatgcgattctaccacgtattaggtgatacttgtgaggtatcatgtgatatctatcaggtatcatgcgattcttacttacataaaaggtgatacttgcgagatatcatgtgattcttaccatgtagaagatgatacttgcgaagtatcaggtgatacccactggatatcaagtaatttcaattgggtaccagagcctcggggtggtgtacggcaaggtggcaatggcgccgttgtacgtgtacaggagcgtgtttgctggcggcgacatcgagcactcggtggggaacgaggagatctacggcgtcctctcgctcgtatttctggatgttcacccttgtcccgctagccaagtacgtgctcgtcgtgctctgcgccgacgacggtagcgagggcagcaccttcgcgctctacttcctcatctactgtcgcgttcgcgctggcctcctcccctgcgtcagtgccggcaccaccggcgaggagctcgcggtcgcggggctgtgcgtcgacgatctagccgtgggtgccgtagcgtcaccactcatgtcggccatgcgcgcgtgctggagaggcatcgtgtcctgcagaggctgctgttgctgctcgggacgtgcatggtcaagtattgctcctctttaaataagcaaggggacaaaagggatcctgtctggacgggattccggtatgtagcattaacaacattgaaaaaaggtatcacattcgctatggagactataaattttcacattagttggagaaaaagaatacatcttagccgttaatagatcacagtgattccggattataacggtataaattgatctaagagttgtacaaaatacaataatatccagaagtctaaatatatagaaatagaatctaagagttgtataaaaaaaatctagaccttatataaatccagagattatagaaatagattctaagagttatatatgaaatccagatattatagaaatagaatctaagagttgtatatgaaatttaaggattgtaaaaatagaggctaagatatgaaatccagagattatagaattagaatctgattcttgtatatgaaatttaaggattgtaaaaatagaagctaagagttgtatacgaaagtaagatattatagaaataaaagctaagagttgtatatatgaaatccaaagaatcatataaataaaagttaagaattgttatgaaatccaggtattataaaatagaatctaagagtagtatatgaaatccagatactcatagaaataaaaaccacgagccgtatatggaacccaaatagacatctaaatataatggtacctttaaacacaaaatttcagagttgtatattaattacacagggcaatcctctagttagtactcattagttacacatttaactgtcttttattaatctcccagtaacttactttgaagcaatatggagtaatacttttactgccaatctaaaggttaaaacaacaaaagcttttctatcatcaccattagaaaaagttgtacgtactatattgccgacgagactggttccgtagtcactagccaggtacaaaatggcacctgccgacgttatcccgttccacgcacgcaaagccaaggcccccacccgtcggagattcgccgcacgcgccacgcacgcttccctctccttccacttccacctccacacgggacgacctctctctctctctctctctctcgtcttcttcctcctcgccacccgctaccccgcaaagcaaagcacacgcgtcaccactcactcacaagtcacaactccgacgagacccaacccaacccgggaaggcgatgaagggcggggtcatcaggagcggcggcggcgtgcggcggcatcggcgtcggcggcggcggcggargcsggggarccggcggggggctk

SEQ ID NO: 5773 - DNA, 2000 bp, Oryza sativa
tcagcttatagctagcaattggacttaataatctagagtataataattttaaaatgaaacaaaaaggaccttattagagggactgtctgacttacaggtagtagttggaaggaaccaccaaacttggagaacttggaaaaggctgacgctgatttgtgtacacacttactgtttggatgggcaacatatgttattgattctgacgctgcaccatatctcttctgaaaaggacagtagagaacctactcctgccaagcgtgccgattaaatttcaaagagcaggctgcacgcccaagttagcttgacaagagcagatacaatcatacattgcactctagagtctagaattgtccgaaagagttatatgctctccaaattattagcgcaaaagaggtatacaaatccacttaaaaagcatgtccatgttatattgcgaggaaagaaaaaacatcttatgttcatactcaaagtttcaatatattgaccgatgacctatctaaaacaagtaattgtggaggagcttagtcaatttcaccggactaaattgcagttgttcacatcagatttgcaacaggagtagatccggctctcagtacgtccggagcgatcgtattcctcccactggccatataattctagctagggatgtaagtgtatcaagttaccaacccataaacccacttataagtaaaatttagtggccgtagattaactcgtggattacctactaatttaatctataaataagtttatggatcgatcacttatatttctaggtatgataataagccggaccatgatatgaaaacctgttaattatcacttatttgatatatatataagtagattcacatgtcgacccgcttacatacattccgaatgtcttccaatcaacgagcagtccttccatgtttggttgtgtgacagccgcaagaggatgaccaaggatcatagccgagggtttgacacgatagccacactggtagcttggacaatctagaagtaaagaaacaatcggctcttcaaccaggaaagcagaacctggccggagatcgctagggctatgacgggtgaagcggacctttggtggatggctagggcagccataccggccatggtagttccttctttgatagatgggtcaccaaattccctagaagattaggctttctgtttttcttcccccctcctgtaccctgtcctcttcatttttaatttgttcggcccgtcttgtacatacatttattctttcttaataaaaatgcgcacctcgcgtattcccaaaaacatgtcgactcatcgtctcataaaaaaccaacctagaatttgagcatacctctgtctaaattcattgtactataatatgtcacatccagttctagattcatttttttcgggacgggggagtacatccctaccacacctttgacatgtcttgatcgcggagcaaagctaagcagccattgagcagaaaaatacggccagaaagcgtcgataacgataagtaagcccagctctcccctttccctttccttctcgccgcctccagaaaacgaagacgacgaagagaagagaaacacaaagcctctcttatgttgtttttttgcaggagtattttttttttgggtcccagagagcgacgcgcatttcgccgtgtgcctctagtggcagcaagctgcgcagcacagcacacttggaggattcccagcgttgtgtcgtccgtccgtcgcatcgtttcccttcaggattagcattgcaagcagccagacagcagcgcctctctctctctctctctctctctctctctctctcttccgttccaaaattccaacgagttccccgttttgctccgcttcctcctctgctccaggaataatattttgctggagaatagtcggatgcaggaggcgaaaaaagattcgatctttggaggccttgcctctggggcgcccgtcggagcggatcgcttcccgtttgatcctcgggagtattcgccggcg

SEQ ID NO: 5774 - DNA, 2000 bp, Oryza sativa
taaaatagacattatattcattaaaaaatttgcaatgttggttatatttaactattagagccatattataattattgtgtcttttaaagatttcaagaacagactcataatatatgatttgttgcttcttcgatgtatgccttctggaacagagttaatatctaagataagaagaaacatgttactactagattttaaagaaatgtgggtacaaaaaaggaatggttgcaatgagaatggatgctactcgatagtggccactttgccgcgcatctcatttttagttggacacgggtggctagcgcgatcgtgtgtgtcggcggatggctagtttatctcaaatagcagttgtaagattacaagctctcaattcatatatttataaacaaaagatcaattatgtcatcgcatcttggttagaaaaaaaaacaaatgattgattttcgtatgcaccgatcggtcattgaatattgaaaattatatatgtgttgtgtaggtaattagcagcaaccagcttgtaaagcgagagaattgaagtgagggaaggaaattcgctttccttgtacggatggaccgacggaggaagaagaagggaaagcaagtcagttgtagaaatgggccgtgaaaggccaggagaaaaggcccaaccatcccgagcacctaacaattaattgggctggacggcctgcttcgggagaaagttgggcctcccctatctggcccatccagtatattggtagtatatgtacatgttgggccggcgtctcttgtttttctgtgggatccttttctgtgtgtttctgttcggaataagttcactttgactccctaaagtgacccgaatctaatccatgaccctaaaccgcaagaccggatatctggacccccaaactattgaaaccgatgcaatttgactcccttggcggttttggagagcggcttctctaacgtggcgctgacgcggtggtgttgacctagtctgtgtgctgacgtggcgcttaggtgacatttcaattaaaaacatatatgtgggacccgtttgttattcacacacacaaaattgtgggtcccactgacatgtgggttccacatgtcatcctctccctttcttcttcctcccctcctcctcccttctctctttctttctccctctccccttcggccgtccgccgggagcaagcggcggcgggcgggagctgaagcggtggcggcgggacgagagaacgcgaacacggggaacgccgccgagctgaagtggtgctgcctcgccgattgccacacggccaatcgaacagtgtgggcgcgggcgcgagttatcggagtgaccatttcgtgcgtcgatttgacatgcctttgttgctgttgatttgaccaaacgttgaaggaacaattatagatttaccacttattctaatcggtaccgtaaagacaataactgtaacttaaaaaaaaagcaaacataccattaaaattattattcgagtggcatctttataaaattaaaaaaaatcagtgacagatttacaaatgtccctattattttactggagtagttagtataatttttaatttattttttttaaaaagaaacaggacctgttggttcgttcgttggtctgtgtcttgttgtctgaagcctcaagcagaggagagagagagagagaggcagcgaccgacgaggcaccctccctgacttgaccaaatcaaccatcgtctcaattcgacaccacacggagacgaccattctcttggtctctcccccaaattccaattccaatttcatcatcttcttcgtctacctccagctcgcctcgcttcccccaccaattgcttacgtacgactactcctccacgccccaaatccaaaattccccaatccgatctctcgcctaccaccaagctcatctcgtttcgttagctacctaccaaattaataagggtagctacagacagcgtagcggacgaggaatccaaatcaaatccaatcctcaatcgaagaa

SEQ ID NO: 5775 - DNA, 2000 bp, Oryza sativa
ttgggtaggaaagagaattaaaacaacccttacctttttcctttaaaaatatataaatagtattattaaaattaaggggacgggacggctcgtagtatacaatcaagacgccgatattaggaaaagacttaatatgaaataattagaaggggtgaggttttaaacccatatcgtctagcccactaccttgtggagctagctagaaaacccctaagcatttatgattctccttatctcttcatcctcgtcccgctcctcatcccatagataccgcgtagtttcatctcgcgtgttccaccctgctcactccgtttgtgcgcgttgcgccatcccaccgtgtgctctagatcctcacgtttgcgttgcacaccccacgcgtcagggtggaaccagctcatagccaccttcaactaaccattgttgaacacatagtaaaaaaaaaatctaatctctatgatacatggtgttgttttaagaatgtttggtttgctaaacccaacacaaattatgggtaggaaagagaattaaaacaagccttacctttttcctttaaaaatatataaatagtagtatcaaaatttaggggacaggatggctcgcagtatacaatcaagaagctaatattagggaaagacctaatataaaataattagagggggtgaggctttaaatccatgtcgtctagcctattactttgtggagctagccgaaaaacccctagacatttatgattctccttatctcccgaggatgaagaaatcgggccagaacatcattagagttctgaattgctaaatttgcaaagaatgaagaatgtgcatcgaaaataataacatattaagactgtggtagtattactagcacggcaattgttcgatagttttcttctaaactgacacgatgatgcccaatcacaccggaccatctcgtgggctcgtggcaaatgttcaaaccggcccggttggatgcagcattaggccgacatgtaaaagctctgtatgcttgtagcccacaacaaaaactcctcgattacgagcttacggctaactccattcggccgtggacacaacggaggcctctacaagaatccaagacgcaaatgctcaaatggcctaatgaacaaagaaagggacaaatggcctggtgaccgagacaatcaggcagaacacaggagaaatacccaagaatcccttctctagaacagatcaacgccatcaaatatactccacacttccacagatcgacacgcatggatgccggattcgacactctttggccgatggtacgagctggatttgcacgcagcctcctgctacatttcgtctgtgtcgtctgtgcgctgcagtgcctgtgtgcccaccacgtactctccaactatacatgcaaaggcagccacacgtacatacactgtagtttcacccgctggctacgcccacagtttccaactcccattggacccatgggaaaagacaagcttttcatggtttctgctttgtactgatcatacagaccaacagtgctaccactgccacagtagaacaaatccgtttagccattgtaccgcaagcctaatgcggacaggatgagtacattataatctctgttagtatagaccaagcaacaattagccacgccgagtttactgtggcttagccattaaattactgtggcgttgcccatttgtagcctcatggctcggtcactccctccctctctctctctctctctcttcacgggagggcagtgtggttttggtcggattccgccaagttaggcagcacatgcgctcgccttcccctgtttgtccatagttccatacacctgcaaacaacgccctcctttccctcccttaattgtcggggcgctctcgccgcccgcgcgccactgcgctgctacacgctacgggataagccaagcttgcttgctttcgtagtcgctttgctcgatcgctcctctcgatcccatcctagattccactcggttctgcttctgctccttcg

SEQ ID NO: 5776 - DNA, 2000 bp, Oryza sativa
gatttcttcatcctcgggagataaggagaatcataaatgtctaggggtttttcggctagctccacaaagtaataggctagacgacatggatttaaagcctcaccccctctaattattttatattaggtctttccctaatattagcttcttgattgtatactgcgagccatcctgtcccctaaattttgatactactatttatatatttttaaaggaaaaaggtaaggcttgttttaattctctttcctacccataatttgtgttgggtttagcaaaccaaacattcttaaaacaacaccatgtatcatagagattagattttttttttactatgtgttcaacaatggttagttgaaggtggctatgagctggttccaccctgacgcgtggggtgtgcaacgcaaacgtgaggatctagagcacacggtgggatggcgcaacgcgcacaaacggagtgagcagggtggaacacgcgagatgaaactacgcggtatctatgggatgaggagcgggacgaggatgaagagataaggagaatcataaatgcttaggggttttctagctagctccacaaggtagtgggctagacgatatgggtttaaaacctcaccccttctaattatttcatattaagtcttttcctaatatcggcgtcttgattgtatactacgagccgtcccgtccccttaattttaataatactatttatatatttttaaaggaaaaaggtaagggttgttttaattctctttcctacccaaatttgtgttgcgtttagcaaaccaaacattccgctataaatttgacattatcaatattagcactgcagaactgtattgctaacacagattattgttcatgttagctgtaccacaggtgcagccaattctatacccatcaactttatcgaaccaatattttagtagtgctataacaaaccaaaacaggatattatattgccgcgggatattgtcggaccaaacatcccaatccaaagagcctttttactgccggtgtccacctgagcccagtgcttgattacgcggctagcttgttgttggttgccctatcaatcggaacgtccgcgtcagactagttgcagtgcagcccgcaactgataagcgatcaacttgttcccgacgcgcgtactacgaacaaaacacgcgcacgcatcgctggcatcagtttacgcctttaaatatttggagttccagaacccccactttttattcccccgttcctttcgcattatgtaatccatgaggtcatccatcacttgctcgttattagtaggtaagtagtagtagattgttagctgagagtggtagtgggtacacgattagttcaacctataataacagcccgatccggtgatttgtacacggtactaattttttcttactaaacttttactatcaatcatctgaaccgtttaatttaagtagatgaaagttatataaaatctagatgcacttatagaatgacatatcagtgttagtaagaatttagcaagaaaaaaatagtcgtcccatgtaatattggtgtctgaacaacttcttcaaaaaaaaaaaaaggtttctgaacaaatttytgaagcctgattagsgtatccgctgawacattagcggaaamcggsgaaatkgcaaaatcccctgcccccatytggtagctatctcgtcctccgtcctcacccgccgccgccgcgaccgcgagctaaaccacggcaccgccggcgacctcgtggacctcgcctgtcgccacatcatcgctgccgtcgcctactcgcctcccctccccgaccccgacccgatccgctccgctccccatttgtttattccggcgcgtgagctaatcaccgcgaggtccaccgccgccgataacacccaagccaagcgcggtcgcttccgcgtcttgatttcctcctcctcctcctcctcccactcgcgtgcgtacctccgccttattatatagcgctggcctgggcggggcggaagagccaa

SEQ ID NO: 5777 - DNA, 2000 bp, Oryza sativa
aattaccatgctcgtgcctcgaacgcgaggagctttacatatattttttttctagataaaatctcaaaagagggcagtgagttcctgcttattacttaataaagagagagtttcccggggaaaaaaataacaaagagagtaggctcagtttattgtgaaaaccagatccaaaaacctcactcttgctccattatatatgtgtgtactgtctatacattctcttgctccattgcaaatgacctcactcttttgaggacgaactaacaatggcttatgggcttgatcactctgagtggctggaagttaaatatatcaacaaccatgctctgtttgtagggtacctgtcgatggccgtcaaaggggtgggcttcttggtgggtttatggaccaccgttgttcttcttggtggcttcgtctctatgcttgagaagaaggatttctggagtctcaccatcatcacactcgtccaaacagcagggttagactgcttactttcaatatatatatttatttatttattttgaagctttcctgcttagtaatgttcttcgccaaacctgtgtggctttttatttgactcttttggtctttccctataataaacaaatctacttttggaacaaaggattttcagtagttatccttcgttcctctggaggaatttctactactgttgatgttcatttctgggggaggaatgctgcggtcgaatttcgttgggagactgtagcattagtggaattccataggaaaggaagcatacactctgtcactcatcctacctcatgtttcactacgtgtttatgctgcgtaggatttttagaggaaaggctagctatacgcgctgttttttttttccgaaagcataagcatcttacaggtttattgctgggaactccagctagtttgcctatatactagcattggtaaacagacatctgctagggacatactaacatctctatatctgccaagctaaacgaccttcttccatagagagttcttgagaagctcagagcaagcaaactcctttcccacagcaactgcaagctcagagctacatgattgacatcgcaaaagacctgactaatactaaggccttgtttagttcccaaaatttttttcccaaaaatattacatcaaatttttagacacatgcatggagcattaaatatagataaaataaaaaactaattgtacagtttgcatggaaatcacgagacgaatcttttgatcctaattagtctataattagccataagtggtacagtaacccacatgtactaacgacggattaattaggcttattaaattttctataatttttcttgggttaaaaatgctattactttttctttaaacttagtcaaacttaaagcagtttgactttaaacaaagtcaaaacatcttataacctgaaatggagggagtattatatatcttcatattaaactaatactccctccgggttgataatacttgtgtttcggacaagagcacaatctcccaaaaaaacaactttgaccattattttctattataatatgtataaaagtgttaataaatatatgattttattaaattactttttaagactagtgtatacatgtagtcaccatatacgaaatacaaatatttttaaaatgatttataataaaagattctaaagtttgacctcacccttgtctaaaacgataagtattatcagtatggagggagtaaatactaaattgataagaagaaaatgtattaaagatattgttggtgttttcttcgccaacatagactcacctaaatatttacggtgctagcagagtcactaatcacattgatctataaaagctcttggtcaagatggatttagaaaaccagcctctagactaatttagtttgatttggagataactactcttctcgtgagcgaattaaaagatttacgggacaaacctaaggatttcacactctcaagcaaaagcatatgttttatgatgccgataaag

SEQ ID NO: 5778 - DNA, 2000 bp, Oryza sativa
tagtttatgtttaatactctaaattagtgtccaaacatcaccacctgaatcaagatggctagtttagaggcctattcactttgatgctattttcaaccatacatttttttttagcaaagttgtcaaaaaaatgtttacgtttagtttgttgccaaatttgataaatatataaaaaatcttgccaaaatttaaatttggtaaacgtaattggattccttcaatgaaattgacggacagctgcttctttcttcttcttcttcttttcgttgcatctactgagggtgaaggcaaacatagttggattccttgaaattgacagacagctacttttcttttttttttaagtaaagagagaactatattaatgcttaaataaagggttacactcctgatttaataaatctagaattcttgcgggagcacaacctccactccgcgcaggacctagaacacattgccatttgtgctaaaacatgtgctaccctatttgcttctcttctttctgtgtgacaaattccatttgttgagtcatcgtcagcagtgaaaatgaaatgtcaggggccaatctaacccataaactaactatggaacacgcaaaaaaaaacacaaaacagtttttttttaaaaaaaaaaagcttgtgcttacatcagtctaacaagtaaaagccgtcgattaaaatttccgaagaataacgggtggccgaaatttacgaagaattttttttttgggggtgccatggccaggtctggctgtaaagaacaaggctagtttgatttgaagtaatttttctttaccatggtgcaagttttgcactaaattttttagagtaaaatttctataatggtaggcaaaaattagcatcgaaacaattgccgtattgaaattgtaaaagatagaagtagaataaaaattaacttcaatccaaacaagctttactactctccacattaggtacccaaagtcgcaccatgaggactaacgtggaaaggcagctttgaaaaatattgccaatttgtaactttttttagtccaaaaatgttgactttcttagaaacttatgtggcaagtttattccggtttgtattccctcgaaaggaaatttccataagaaaaaacgaaactacttcctccatttcaggttataagatattttaactttggtcaaagtcaaactgctttaagtttgaccaagtttgtaaaaaaaagtagtaatatttttaacccaagacaaatttattatgaaaatatattcaattattaatttgatgaaactaatttagtattataaatattactatacgagaaaaatgtcagtgcgttgcaacgggtgaaagatattttaatcttattattgttgtacggtttagataaggtgaaattcactatgggaattcgcttggatattctttttataaaatcatgagccgcaattaagggtctaataatctcaagttagcatgcaagttttgtaaagagatttcttatacgactccttctgtatttctaaaaagaagaaaattaaaaactgactcaaacacggatctatatttccaaaagtgattgaacttaaaaatcgattcaaacacggatgacgtaccaaaagtaccgacaaaagcatctccaatttttataatagtagagatttaataataaacttagttaaacttaaaacagtttaaaaacattaattaaacgagtccaccaaaaaagcgaagcttctcccccaccgcacggcttacgtcacggtgaggcgtgccactgacatctaggccccacgcggagatattttcccgacccggccggatcacgaagggtccggaactcgcctataaatacccacccccaccactagatctcgcctttccttccgatctctctccctctctctcttcttcttcttcttccttccctctcaacccgacgacccacgcgaagcgaactctcgcgcgagacgagagtagtaaaccctagaaacctagaggagatccccaccaccacc

SEQ ID NO: 5779 - DNA, 2000 bp, Oryza sativa
agtaaaagtactcttgatcgggccgtttcttcggaactttaattcaaggaagaaatcgaaaccaaccgacggcgatgagctcgcgcaaaacgaagtcaagactcaagaggcagtgatgatatgcaaaatcgacgaacaaatccgtaacgaacccgcggcatccaaccaactaagcgcgtatattgtataatctctgaagaacgtttcctcgaagtcgaagccaaataaccaatcagaacttgcatcccgtggtctcctgccgctgacgcacgtacggatgatcttagcgcatatttcgccataggataatcgacgatgccggcccgcggttgttttgtcagaattcgacatgcgaccaaacaaagcaaacagtgcacgtttgaaaaaactgtatgcagacacctgatcgcgacagggaagcatacgttgcttcccctgcctcttatgtcatccaacttggcgcattccggggttctacactctgattaatatttcgcaattgggaggaaaaaatcctaatgccccccccccctcctaaaaatcactcatctttctaatctctcccctacaaattaatttcgtgcaaaacacttctcgcaaattcattttctcttccaacttcctatttctatcagtttccggtattttctcgtgccttatgggcctgcactatattgctacccttgtcatcaaaggcagttctccttttgcttttgcttttgtatgctttaatttatcaaaggtgtggcgataaaacacgaagatgaccccatattattaaataagttgtattaaatcttatgcccaataacagagaatataagtgttaacttcgctcaccatgctggaggtccatacgatgtgagaaatcmcccgatgaatgtagtgagaattacttaaaaaactrgacacaggggggaagttgaaargaaaatggacttgtggatagtgttttgtaagaaattaccttctctttctcaaaatgtggttatctaggataggatagacccgaaaggggtagtaagttgtagaggaagattcaaaataccaatggcttgtaaggggttatctggattttcaccttcgcaatttgcagatgttctccatctcatcatctcatatggtgtgaacgcaacggtttgtttgtccctattttatttaatttggcatggttgacaggatcagacttattcagagaaacatcaacatgcatttcagcaatgcgttaatatactattggcgatcgataaccagagaaaaggtgacctgcatcatgtatttcgccggttgcaatttcgtcatcactgcggttaggattacgttctcgtcgcaaccgtaaattatagggcgagaagatcattgacatgcaaattccacggcaagttgcatttgttttaagattttgttacagattcttcttgcgggtggctgcaaaccccgagctgattatctctgaacgtacgatcaagccgtcaaggtcaagtcaatgtacatattactaaagcttgtttctgctttgcagtgctagctataaagtcatctgtagcagatacaagcatagaacacacttcattaatttgtaaaatggctgaaggccccgtcgtccaatgctaaaacagaaggatttgatggtgatcagctacagctgctcggctggtaccaagctgacatggatattgtcgttgctgctcatcctggtcgcggcgacacaagtccatggcgtgtctcctcctggtaattatcagagctgtttcctctgcgagcctgcttctttgtaatccatgctccatctgcacagttcagatcacttcattatatgcagctctagaaaagtagaaatcagtgcataatacttgagagctaattaaacactctcatatacttcctcccaagaataaatatgtaagcactccccgtatacttagcgaccaaatatctagctgcatgattgtatgatgaactcgcatgaaccttaacttgaaacagttgaaacacacgac

SEQ ID NO: 5780 - DNA, 2000 bp, Oryza sativa
atctccacagtaatgcaagcggtcagagagtgagaggcaaatattgggcacgagcccatataatggtcccattcagaacaaaatcggccttttctttagtggtgctgtttggcccaagatgagagggagcttgaggcatggatcgagagctaggcggctaggccacgagatcatgagctcaatcggctaccctaataaatcaaaatcaaagataacttaaatttaaagtttattttaagatttttttaaatatttttttttaagcattgagctcttaagtcgttagatcacattaaaaaaattacctttataaataatttattattagaggatatgggtaaccgaaaactccacgagtatatgtgtgtacgtaagcctcgtgccgcgtgacacatgcggtgtctgagcacgtagcatcgggtcgggcccccgacgcgatccgcagccgcagggcgtcgaaacaaatctgtcgtgtaccgtatgatcacaagtgtcggtggacggtggtggcacgtactagtacgtatacgtgcacggtgccatcaatcagctgcggtcgatttgtcgagacgacaaaaccccgcagttattacacaagaaattcgcacgccgtcgcggggcccgtttccgcggaggctgatgtagaggcaaaagccgccacgctgcacgtacgtcgccggagcggattaaactagcggagaagaacgaacggccgttgcgccgtacgcgacaaacagcgccggagatgaagatgatgggggaggataggattaggatcgcggcgcgacgaggaggaggaggaggaggaggagggcaagacttgcacgcgtttcgcggaccggatggctgcgcgcaagagtccccgcttttccgtgtgtgtgttgggcgctgatcttggcagtgaactagcgacaactgacaaaggcttctcacgtgttgcagtcttgcaatatgtatgcgtgttccagatctcttgctgcastatactggggctgtgtttagttcagcataaagtttagattttagttggacgatgtgactaaaaagtttggttggataatgtggctgaaaaattgtgtgtatgacaggttgatgtgatggaaaagggctgaagtttggatccaaacttttaatttaaacacagcctagctagcaccgattggggttagcctgaagtactcactcccaccattttaaattactactcccttcgtaccaaattataagtatttttagaagagtgaagttaaactttttaaatttaactattagtagaaaaaagtaaaaaaaatcaatcatataaatttaatgttgctagatttataattaaataaattattataatatataactctttttacttaaaacatattacttttgtagatattatcggttaaagtagtatcgttttatttaaaaatgatcatattttaggacgggtgttttaagtttatcttaagttaaaatatgtttatctttgctcattaatttttaaaaatccgtgttttttaataacttcatctaggagtaaagccacagcgatgcttcagtcagtgtgagcgtcattggctccaaactttcattcattcaatcaatttacagaatggggtccatcaaggtcgtcaaggaattaaaagataagattgggagcacaacaaacaaagttgggcacatcaatagtggaaatgtggaacgtagaaacctccacagaaaactgagggcaaacttacaaattgtgcggcccttcctatcattctgggaatcgcatctgttgcaacttccctccattttcaggccttctgattcaggctgcccccagcttagtttgagaagcaaactgccaataaacacagggtgaaaaactgaatcagtaactgttaaaaattggtaagcctcaggcgctcagttttcctttacctcctcccatcttttatatgccaccggaagacaaagccctttttgtctccagacttcctgctccctctgtgtgtaatgcagac

SEQ ID NO: 5781 - DNA, 2000 bp, Oryza sativa
cataggaagtgagtgactggtactcccgcacattcatgcgataggcaacattgaggttgggactgttgaattgggcctccttatcatgaataacctcctcgatgagggcctcagctgtcagctgtgtctggaagaccctcaacattgtagccatccttcttcagatcttggaggacggaatagatggagttgaaaacattcaggtatgccgctgtgccaacattgcctttgtctggtgggaagctgaaaacagtgatggccagtttcttctcctccgcagagaaagaaagaaggtaactatttctgtgtgctttgcaaacctagtcagcatacaacacttggaatgagtattttcacttaggaacttttcgcgaaactgcaaactagatagcataattggattatgggatcatacacctaaacttttttwactttatgtctacaaatgatcgtactgtttcatttgaaggacttggaacttcaatcagtaggcagttttagcatatatgtaatgctacaataaattctcaaaaaaaaataatgctacaatatattcctgattgaacttcatgttaaggtatgcatcacagggattatgtagcaagcttgtggcaccgttatgtacatgagttcttcggaggatggaagagttgattgatcgattacacgagtagttctagttttcagttgagcatactttatgcaccttaagtattgagctttttgttctcacatgatgtgttgtttcatttgaaagataactttcagttgacagctaatgattgcataacacgtggcttttcattgaacttcatatcatatatatgatggtatgcattactggatttttcatatcaggattgcggcatcaaatgtacaagagctctcttcatgggatgaatggcgcatgtgcaataccagttttcagcacgaaactgcacctcaagatccctcgagtaatcgagtcaccccatttcttccttcagcgacagcaatcagcaccgccccaaagccatgcatgccgtgtcgccgttacaggcttacagccagttacccgtatgcattccatcacgtgctggagctgctgttgatagctccccagatggccagagcccagatgtttacttgttctaccacttcaactcatgcctgatgccaccgtgtgtgctggatactgaacgacctactgcccgtttctgatgatcatcgccagttcaccaccggtgaaaagggcccaaacggcccctcaccgtcaccgagggtccgagacaccgaggtcccaatcgtttggcttatttcctaataagccaaaacgacttattaggaaatataaatgaatttgtaggtgaaacttttataaatatgtttttttttgacttaaaagccaatgttaaaaaagaaattgcgttaaaatatctcaaaatcaaggtcaacattaagcttgaaaatttaaaatttgatttttttcttttactgattaggccatctgatacgagccagagaccggttgccccctacaatactcactgtatacgtccatgtcagcgggatcgtgactcgcgcgtcctcgcgtgcgcaggcccgcgggcctgcatgccgtattggggatttgccgacccgttccaggtctttcctgcactccctttcgatcgcacgcgagaaaccaaccatccgcacccgcacgcatggccggatgatcgagagggcgatgaaaagcaccgggtkggggagacaccgacgcgtcacaccaccacgtccgtttccgtactccactcgtggcaggcaaaccagcagcattcgagctgatggctgctctcgcggtggtgcacggttggctcgctccagcgttgtcccggcgcgcggagacgggcggtggccgcgccgcgcttccgtgtcgtaggccccggctcgtggcagtcgcgtgcgctgcctcgtcggttaatacggccactactacgggcgaatcgccgctgggctccgatggctcggcagccgccgcc

SEQ ID NO: 5782 - DNA, 662 bp, Oryza sativa
atgttaatgaatctaagacacwtccatatatctagattcattaacatctaaatgaatgtgggcaatgctagaaagttttacattgtgaaacggaggaagtattttccatttttttcgttgtttgattctgaactgctgtgaatgtctttggctttcttgtaaaagccggatcaatatgatcaatcttgttttttttttctaaaaaaaaatagctagctagctctagctacgtgatatatgtgctgttagtggttaacttcttcctaagcaattgccatcaagataatgcttcaactctaatagcccatagaagcactaataacccgtagtcccttaatcacaattttgttggatagacagtttgtcattgaaccaacttcccaacagtaataaatcatagtgcgtgactgacaacttgtttaaactgattaaagcatacttaaacatcaatactgtgctcgtgctttttcatttttttagtacatgactatttcattaaactgctaatgacatatgctttacccctcttcttatatttcattaaactccatataaaagcttttgcttttatgggccggaaaattctggcccattcacattgggtagatttgtacagcccacgtgagagcccattttcttcgcccattccaaccgccgccgcc

SEQ ID NO: 5783 - DNA, 2000 bp, Oryza sativa
cctttgactagttctttgtcccacgtggcattgacgtggcaattggatcccgggaaaataataaaaaaccgtaggacccacatgtcagctacacaaaaataattaataaagggtgggacccaggtggtcccacatgtcagcctccctcttctctctatcccccctctctcccccccacacggcgaggagaagggcgagcggcagtgggcggtgggcggcgggcggagggcggaccagagggccggtaggtggaagcagagcggcggcgggcggtgggcgaagcgaagacgggcsgcgggcagcgtggtgagagcgcagggagggaggaggcgagctcatcggggcggctagcgggagagggggcagcacgcgccggccgacaggagggagggaaaggagtagcggtgcgctagggtcggcagccggcaagagggcggaatagtagcggtggcccggcctctccacgctggtcggcatcctcgtctcctccctctgcaatgcaatgaaaagctcgacggcgaggcsctgtgggtggggctcgacggtggggcgccgtgggtggggctcgacggcgacggtgcacagcgggcggcggccagcgaccgtctccgcccccctcgttggcagccgcatttttccctctccgtgcgcgcttgctggccggtgaggaaggatgatcgcgcgcacttgtcggggcgacgcggctacaaccagcagcggtgacgaaggaggagaaggcgtgggtggggaaggcggcgaggggcagcggggtcggtggttgggggagaggggctcggttgcggttgagggggggagatggcggcattgatgtcgagaacaggcgagcgaggcggggcggcaagccgccgctcctcttccgctctcccgccgccgtggcgctgtcgctccacccacsgcccgccacgatcgagtcacgtaggcgccgcgtcatccaaaaccaagcacaatactgcccgaggrmccttttctgcccggttttgtaagttgatggatgcattgtatccggttttgtgatcaagggacgaaaatcggactggacgacaaatagagcgacccaaagtgaacttgttccytgttcaggtccttcaggatatacgggctcccaaataggaccaattttgtcctcagaacaacaaagattccaaaaaatagttacccctgaaatcaacaaggtaaaagatgaatttgaattttgttaagttaaatttgatgaactggggcctagttatcggatttcaccgagcgctggtaattctcattaaaccggtgttcagagcctagttcagaacaggaatatcaccaggaaattgcatgctgagaacaatcctgaatgctgcataccatcatgtctcgttcacgctgtagcggagaggatatgtcacttcttggaacagcctaaagtagctgatgactttgatgtgctgatgctgatgcatactgcttgcaaaacaagaaatgatcattccattagtcaaacatactagcaaaaattgataaaccactcggcggcatggacaaggctatactgtattcttacgtttgacctgaatggtcagcctcccttcatttcaacacctgaaatactcttctgatgatgaaacaaatcatgaaattaacgagaccccatgctcgcgttacagctggaacacgttttagctaccttctatttcttgagaaaaaagaagacacaaggtgcacgtcactgatcagatcactgacgcaaaatattttaccagtagtttatgccaagtatgcagactacgcaaccacagggcagtatactatactctgttttgctctgttcacgggtaagtttgagatgatatgtcaagactgcaggtctgcagactgcagccacaggaacggtctatatatatacgtcctggcctcttaatttcttcccaaggaggagtcgatcgagcagaagagaagccaaaagctccaatcttcgagagacgtgtgaagaacattcgatcgcc

SEQ ID NO: 5784 - DNA, 2000 bp, Oryza sativa
atgagttttctcattttacgtgtgttaaaattattcctcgaactcccaaaaatgaaaaaagaaaatattcctccaactggtgccaccgaatggagacttagtgttctggaaccagtcaaccagattggtgataacaagagctgacttctttgatttttactgatcatcgtttgagcgtcacagcatacgcacacatggcaatcagaattcagagaggaagcagtcagtctaatctccctaataatgtatatgcacaagaaaacaggtacaagtgcagattgaaacaggtacaagttcagattgacgtttttttttaaggggaaggacggcaggacatctgccggaatttaacaatagagaaggtatgtcctgtttgataaagtaagctacttcggtttctgaacaagaagagtttgggaagattcttctatttctttctaaccaaatattcaaccaggtagttaacaacgagcctctaatcgcatgcgcttgctctttggaacctgcaggggtcagattttggaattggcaaactaggctccaaacttgtctgacaaagacacattcactgaacagatgatgtatcttcaaaagcggtacagagacaacatatccaattgcatgattagtgtctccggagcaaattctgggcaataagggtttttttttataaagaattaacaatccaaagaatttcatttttggttcaaccagggccctccatagagatacaaaatcattcctagcgaaggaaccttaaaattgaaagagatacgctcttggttgtgtaggaaccaggttcagtccaatcccaggaaatgtcatccggatcttaagaaagcgagaccagttggagcaaacctccaagctgcaccaagtcatgcaattcctccacataggtgaattgtctaaaagaggtaagccatttgttgtctctcatctcaacttgcatggttctttgctttctatttaccagaactgaaacagtttgggcacaatatcttttaaacatcgatttttggatccaattatcatgccagaaactagttttagcaccgttgcccactgatattgttgttgctgcttgaaaaagtcttttgttcaaatcgtcacagagtagattaatgcctacccaaggtttgttctcctccttccacttgaattagagccagcggagttgaagagctcttgagaatctatccaggtttgggaggccagccccacccaatttcttgggtttacaaactgtttgccagttgatcaaactgtcgctaggattttagtgatcgggatatttgcctttccacataaacgatcttctgaaacggtcaattcttttaagtacctatttgggtgcttgaaagaccgtaagatgatgtgtcggcgtagcacttaaaatagaggtaactagtgtttgacgtcccgcagaggtaaaaaaatgtcctttccagcctggcagtcttgacccaatcttatctatcagccttgcagattgacgtatcagatgacaaataatggagtagcgacgagtattatgtgtttacgtgaataatacaaatgatgatatcaaaaggattggaacagatttgtcagccactcagcctacgcttcttcttgtactgaagtcaagataagtgcaatcgtggctgagtttttgagagcatcacccaatatactagtcattgatgaagaaagaaaaatgaatgaccagcttgaccatgctcatacttttctttgattcttgcccaagcatataaactttcgattgtttattcaaaccagaattttataccagaatataacaaaaaaacagtcgtccggcctcttcgtggaaactgcagatttcagagctcaggctaatataatttgggcctaattctataaatacgcgtcatctccttccacctcaacaccaaccaccaaacagaacagagctcgcaactcacaagctgatacagagcagagaccatcggagttcagagttcagacacgagaaagcc

SEQ ID NO: 5785 - DNA, 856 bp, Oryza sativa
gggacggagggagtacatcgtggacatatagaaaagatgatgggaacgggacatctcaatgttacctggtttagggaggaaaggacgatggtccggtgagccttgccagcatcattggtaacttttgtgctgatgaggatgaggtagagtagggaggagcaccgtgacggtatgagtgagctttgtatggggattaggggaaatatacgtcgaggagtattgtattggcacttattttgatacgatttcagcctttcagtgtctaaaattcatgtgatttttgaagaaaagaaatgtgtgaagtaatgcattgattgataaatagctaaaaaaaatcggttatttgatccacaatggataacctagatagaacatccgttgctattgtgctttactgcagtatatacgaccaccgcttcatcccaatgactcgatttgttcatccctgtattaggctgtattccatcggaagcaagccatcacatcccaatcgaccgtctcagatcctacaacccggaaccccgcaaaccaccaaccattgtatcatttcacacagacctggatgacacgttggacttcgcctcgccctccgactcggagtcgtgctgctgctgtgggtcccacccacccttcccgcgcgccccgccgccggccgccactccgcatccccgcaccagtcactccaccgcgccccgcacccccctatatatatggccacccgaacccacgcctctctccacctcgcccacgcacaccaccaccactctccccctgctacttgtccaccccaatctcatcgctcttagtcaactccgccgagagagactgatcgttctcgttcagctctgctctgccc

SEQ ID NO: 5786 - DNA, 2000 bp, Oryza sativa
accgggggctcatctaatgcatacaaccaaacaactcctattgcaacattctaaccacgctaagaggtttttccctgtgtaccattaaaaaagatggtgcttgcctctgtgccactaaaaagttctccctctatgccatcgtcgaactttatcgcgcccttcacaccattccgtccgttttttgttctaacggtggtaacggagcagcaaaatgacttggttgcctcttgggcatgagaggaagggttcgagatgggagggcgtgtggagaagggagatgtagaggaggacgttgagggagtagccgtcggcccagtggcaggcgtccccaccgccgctgccgacgccggagcgccaggcgagggcatggacggcgctggtgagggtgcgcatggcgttggagttcttagcggtgtcgatggcgcggatctcggtggcgcgcatcacctcgcggaagcggagcacggcggagtttaggcggtcgagagggagggaagggtggaggatgaggccggcctcgaggagcttcacctgccggaactgccactggtggtactcctcgccgtcggggaactccaccggcttcagctgccggaggagctcgtgccgacctgcccgacgatagcgcgcatcagcgtccgccgcagccgcgcgttgttctgctcagtgacgcggatctgctgccgcatgatctccgccgatgtcatcagctgccgtccacgcccgggtaacgccggccccaatgtctggctcagcgtgcgcaccatcatcggctgcgtcgccgccaccgctgacgatgacaaccgcctcgccttgagccccagcgcattcttgatgcggctgccgccgccgccgcccctcggcctggccaccggcaacgacacctccgccgcctccatggccgcgccacgggcgccggcggtgtttccgccggaggaggagcggcacgacatgaagatctcgtaggcggtcttgcggagctcgacggggcccagcgcatcgacgcggccgaactggcaggcgacgtcagcggcggcgaagtcgagcttggtggcgtctgacgagggcktcgccgaggaggtcactgagagggagtgcgaacgcttgtggcgccccatctcgccgccgttccaggcggccatggcgacgacggagcgagcgcgcacgcagcgggcgatgtcgaggaggcgggagacgagcggcgatgacccgtgccctcggaggccgatcccactgctgctgccgcgttggcctcctcggcggggcgcttcggtgccatgcggcgcggggaggggaggggagggggagcatgtcgccgccgccatcgaacctgcaccaatccgccgcttagcgccggtcgccggcctcgccatgccaccccgcccttcctagtcgctggccagcgccgccctctctctgtggtgaaaaggaagaaaaaaaaggaggggaacgaagcagagattaaaagggtaagagggacatttttcctgcccggacacacatgtcagagctgccaaacgattaaaaccaaacagaatagcaacggaatggtatggagggcacgataaagttcgacaatgacatagagggaggctcgaatttttttagtgacacagaggcaggcaccatcttttttaatggcccacatctaaagacctcccatgctaaacccagcctggacgaggcatacgagccaggctgagagcattcgagcaaccaaacacacccgtcccttcttctccttccgctcgtctcgctcgtaatcggcacaggcgacctcgacacaccaacttcaccctcgctcggtcggagcaatcttgcctgcgacgccgccgccgccctcgatctcggatcgtccgctacgcccctgcctccaaaccttgccgcggcgatcggagaggggaatacccaaaccctaacgttttcggcccctccccgccgtcagagctgcgccgtgcggttctgcttcttttctgggcctcgtcacctagggttccgag

SEQ ID NO: 5787 - DNA, 2000 bp, Oryza sativa
aaatttttctatcacatcgaaacttttctacacacataaacttccaacttttccatcacatcgttctaattttaattaaacttccaattttaacgtaaactaaacacaccctgaatgttgttttcgctgggccaacaaaagttcgccggccggccaatttattaagcgagaccaggagagaagaagcagggtgtattgttgggaatatatcggttatcaacttgatactaacacaaaaagatcccattataaccgtaaatcaaatactccctccttcattttaaatatatttgaccgttcattttattcaaaaacttttgtgatatgtgtaaaactatatgtatacataaaagtatatttaacaataaattaaatgatagaaaaagaattaacaattacttaaatttttttaataagacgaacggtcaaacatttttaaaaatatcaacggcgtcaaacattttgggacggaggtagaacacaacacttatccggtccaaaggtcaaccggggggaaagccccagagagcgggatcctcccagggactggccgaaacctttgcagtgaaacgaaacatttttacgactcatttgaaacatgggaattttgtacgtagaattttcgcatgaattaattcttctcctttaaaatgttaaaaagtttcctccattctataatctgaaggatgcctagacgtatcatgcatatgatcaagcaattgttcgattaatcaaattatctgctgataatcgttaagtttgatgatttctgatgacccatggtcacctagcggctagcagtaccatgcatgatcaccctccacaaagaaatggtacagtactacctccatcccaaaataagtgcagccatgtatattcgtgcccaacgtttgaccgtccgtcttatttaaaaaaattatgaaaaatttaaaaatatttagttacacataaagtactattcatgttttatcatctaatagtaacaaaaaatactaattataaaaaattttcaaataagatgaacggttaaacgttgaacatgaatagtgaaaaacttattttgaaacggagggagtacgaagtaactccggaactacatatagggcaattattgccctatgtatgcatatagtcaatcaattaactgccgacaatggaaaagctaatcaatcaatcaatggtttgattaatcaaattaagccaggtcagtccgtcagtgtacattcactaattaaattaacatggtcttttcaacggttcaaccaacatctggccatcaacatcttttcgtagccccttggctcgactctttatggccatattcgctaaaaaaaaacttctccttacatcacgtataacaatatatatttckgttttaatttggtaatctttttttttttctgcgttkcaacggaaatcacgagcgatatatgggggaatactgatgaaaatcgdatttctgaggacccatggattccgcggcgtaccatctggttctgtcaactaaaaagtggagtagttccttgacggaagaagggagcaaaatagaagatattctcagttgatctgcagttgttgttaggtcactatattcagaaatcgcagttgctgttgtttaaattgtgtgtgacagcagacagctaattatcagtacacgtatatgagcaatactagtgaatctgtactaatttaacgagagtattttctatatacaaatacaacagctaaactgtgccactggcgccgaatacgtacggacagagctcaggcaatcaggggagcagcaaaagaggagagagttggtgccaagcacaactaaacccaactgcacccaaaaactaatcagcatttcagttcgctttagttagtactaccacctgcatctctttaccaacactatataacccgcagtggacctgcagtcatctcactaattcagtgaagccaccagtactagtacggctctaatcagttcgcgtttgctaattaactctgccatc

SEQ ID NO: 5788 - DNA, 2000 bp, Oryza sativa
cggatactctataactttactccatgtctccatacttaactcttagagttgaatttagaagtttggaacctattaaacatgtccttagcattggttgctaacccttacgtttgtaattaaatccattgccggtagtagctatagcgtgagttctaatttgtaaatagcaattagctataataactttgtcgttcttcgtaagcatattttttgaacggttaaacagtgttatatataaaagtttttaaaagaatcaaataaatccatacctcttctctacaattataaaagttgaagatgtttttgtcggtactttgatacgtcatccgtatttgagtcagttattgagttcattcgcttttggaattacaaatttagatttgagtaggtttttaaatttgtttgcttttgaaaatatatagagaaggagtcgtatacgaaatctctttaaaaaaactcgcatgctaacttaagacgatctaattgtagctcatgatcttgtaaaaataatatccaagcaaattcttacagtgaatttcactttagctaaaccgtataacaataataagattaagataaccttcacctattgcaacgcatgagcatttttttagtttatttttaattttaaaacaattaatatttatttgattaattttaaaactttgccgccggccacgtcacctcgctcaagctcccccggaggcctagacggtcacgtcgtgccgctcaagctcgagctctgccaccagaagtgccaccgcgagcactgcgccggcgatgccactgcgctcaagctccgccaccagaagtgctgccacgagcactgcaccggcgacgccactacgctggagctctgccactagaagtgttgctggtatttattatgagcacagaataatctgcaagcgcacatataccgttgtagcttttaccaagagtatcctagggtagcgtatccacagagaacgtatgtgcacaatttaagaacatgattcttccaagagcaacaattaaatgataggattgggatagagaggatttctatgagttaattaacttaatttaagttaaggtaaaactatatcaattacttttatgctaaaattgacggtcggatttggtacttgaggaacgtcaacaactaccgccacgagcaccgcgctagcaacgccactatgtcgagttcaaccgcctactatgcttgcgggctcgagcaccgctaccgtccgtgctgccgcactcgtcctccgccgccggacacgttgtcgtcgaaagcgtcattgcgctcagaccgttccctctcctgctcccttgctcactcgctctagaccgtaggaggaagaagagatgagcatgcatgagaggaggggatgaacaagggcagtatgatccaagaaaaataaaaaatgcagcaaagggatatgtggtggtatgtatctgatttcaacatatatttacaatgctattgttccaattagataaatggtaatgacatatttttttccggggtaatgacatattttaaaactgtcaaatttataacaacatatattcaattaaccttttttatttactcgtgagtctatcaaagatcaaaataataaagatatagatacagatacatatacatatacatatacatatacatatacatatatatacacacacacgtatacatagatatagtgttataaaggagagagatatagatagatgtagatataataatcagatagtacaagaaacagctgccggtcgtctgctataaaaacctccagccatctctaaatgcgtggcccatggtgtcggattcatagccgcgacgaaatccccatccctaagtgtcactactactggtacggtgatgtgtacatctcgcccaccggcacgagctcgccgcgctttccattattagccgctcttgcaagtgtgaagtgtccaggtagccattttgcatgcattttccggcttgtgtacagtgcttgcagcagaatacc

SEQ ID NO: 5789 - DNA, 2000 bp, Oryza sativa
ggattctttgtgaatcagatccgataacccggcttcatcatttctttttatattatgtaaaatatatatatatttagagagagagagaagccaccacatgatcatctgactgacgacatgagtcttgccctggggtccaaggaatccaccgacagcagtccaccgacagctcgcccagatcttgatttgtttatcacctcactcatcaactcaccaaattagcatacttatattatcactactagtagtatggaggagtattattgtttctctctttctcgctgattagtccccgtctagccaaggcgagaagtaattagcacaccgtgtgagagggtgacctctcaccaattaaggtgtgcgtccacgcatccaagtatttaatcgtgtgctatttttttcccaaccactgctgctcgccgtgtcacgcatcgcatgacataaaaccgtatagcttgatcactcttcacagtacgaagtcttttatttgtgctacttgtatgtagtactgcgtcaataattaaagtagtgtattattcagtgtggcgccttaaaaatgctatctttttggtgcaggggaatagtactagtacaatgctagagctcactaactgaccattaaagtatgtggtggttatggattttaaaacaaccatctgatattggctgggcgattgtggtagacacgccctagataggaggaatcacaacttgactagaatacaatgatacggcagataatgtatgtccaactagtatgcaggggttcagattaaagaaaaactgatgattcttgcatataaaaaaaggaaatgaacaaacatagattatggggcatcatgcatcaagctctgctatgtctaagccctgaatttcccatttccttgacttgatggtttcatcttttattcctccatcctccaatccaccaactctgtccaacttgattgaagtattaaactgagtggcacatacattttgaatcactaatacaggcaataccagttaacaaccacaccataatcgtttgcttcaagccttgagcaacggtaactgctttgcaaaggaaaggcacggagacaagttaatgctgtcgctttcttgcattattgggacctatatatcttctttgccacgtacagtttgataatgtacaaacaactttgcatcccagatctaccaaagttaacactcctaacaaaggcctactactactcttctatatcacctgataatgcccaaacgtcccacaactactactcccactttacaacagtaaacaatcacaacttccgtaagatctaaacaccgttttctttttctgtttcttattccacccagacacaaaagtgaaccccactgggtaagtgcaaccctgttactactacctaccccaaccccaacgcaccaccctctattgtgaatcggatggttattaatgacatttatcgaattttctcttatagtagtatacttcccagttctaaaatataagagcatgatgcattccatctaattcaatattttatattttgagatggaagagtagctattccccaatcacgtcccgtagagagcagcagtagcgtagagccgtggaggggcttgtaccggcaggcaccagcaccggcgcccgccgacgcccacaagcccccaccgagcgcggccgcaccaccaaccgatagcggagcggcaacaacaaaacgaagccgaaacgaaaagacggggggcgacgaggcgagcgcgagaaagagaaagagagagcaacgccccaaccaccaccccctctgcccaggccccagatccctccaccccatcgcacgccacaacataacataacaccgcaaacacgcaccctcccaacagacgcctcctcccctccctccctcccacctacactccgctgcgcagccagcttcgctcgcccgctacctcactcactctcgggtgagcgcggccaccgctgccggcgacgaggtagggaggaggaggagggcaag

SEQ ID NO: 5790 - DNA, 2000 bp, Oryza sativa
cacatgtgctgctgcgcaatgcagagttggccgtagagcaatgttgtgctgtactactagtctactggagtactactgcagactggactggccgtcgccattctactagcaaatatcacatttgtaacaacgatacactggagtatgcacagtggtgtaccgtgaaccagcatggacgtgcgaatgcacagtgtaacagcaagtgtgccccaggcagaggtagcaagcccgaaagtccaacactacactgcataaagttataggattctcccacacatgatgagtcgcacgcagctactactcctacagtagcagctagggacaatttcttcttcagctcaggctcagctgctgagccggtcgcgcctcccaacgcataggcatgctcccgccggccccgtctttcttgtccgccattacgccaaccggccgcagtaactcagcgtactactcgtactctactctactccctccattccaaaataaataaataaataaatagataaatctagggtgtgtttagttcacatcaaaattaaaagtttagcccttgtttagttccaaactttttcttcaaactttcaacttttctatcacatcaaaacttttctacacacacaaactttcaaattttctgtcacgtcgttccaatttcaaccaaacttctaattttgacgtgagctaaacatagcctagccctgtttagttctaaagtttttttttccaaactttcaactttccatgacatcagacctttcatacacacacaacttttcagtcacatcgttccaatttcaaccaaacttccaaacttcagcgtgaactaaacatagcccaaggcaaagttggaagtttgtatgtgtacggaagttttgatgtgatgaaaaagtggatgtttgaagaaaaattttgaaactaaactcgggcctagcactgaatgtgacagattctaatacaataaatctggacagagctatatctaaatatatcacatctagtactaaattgattttttatgagaaggagagagtactccttttctttccctgcttttacgcgctgcagcattgctccctactgcatgctccctaccctcttcgttaaaaaaaaaaaaatcaaattctggccgtaaacctgaaccacgctatacgtatttaccatgttttggctccctatgagttaacggttagcatgtaatatatattggttttaaaaagtaagaaagttatcttacgtgatgttgcgataaacgcacggttttataaatcttgtatatgattttgtagtataactcatgtataactagatatatataattatagataatcgaaaaataacatgttcatatgtttataatcgttaaaagtcataacgtgagtcagactcaaacagttagtagaccgtatgcataatatttttctttttggaccgagggttactcccaaccggaaaacagatccctgactttgcagtttgtagttgtaccatgtgggggccacatatcagtgacacaactatatgtcggtggtctaactacaaactgcacaaaggctaagtttagatccaaacttcagtctttttccatcacatcaaattgtcatacacatataacttttcagtcacatcatctctaatttcaaccaaaatttaagctttacgctgagctgaacaaagccaaagtcaggaccatcattctcccaacccagacgagccaccatgctagctgctgctgctgctagtgttgcccagtgaccttgcagctcgccatgctagctccgctgctcgctgctgctgcttttgcccaaagctgcacaacctgcattgcctctcgcctgaccctcttgcctcatctgtgtctccccccttctctttttcttcaacccctctttatgctcgtttctccattgcagctcacctccatctcctattctcctcctccttgttgaaggagttcgtgtgcctctaccaagaacaagaagaagcctcttgcatcggcagcc

SEQ ID NO: 5791 - DNA, 2000 bp, Oryza sativa
taaatactccctccatctacttttgatagtcatatttccaaatctgaaaaatttatttttgataggcatatttcaatccaatagattatcatcttaatggctttcttggatttaatgcgtgactcttcattcttccacacaacattggtcatatgggcatcgagaaatgtaaatattaatgaatcgcttgtttacgaagaatgactagtagcatatttaaatagatgataagtagaattacttatccttgatctgtgtgccaagatgaaatataacaatcaaaagtagatggagggagtataatgaatgcatccaatagaattagagaacataagagtagaggatttaaaaaagtaataatttaatggagaagaggtcatagttaattgcttgcatgcatgcatgcctcatattatggaacttctaaaaaacgtggttatgccttatattatggaatagagggagtaatgtcttccacttcataatccttcagttacgcaactaacaaaaaaccgtcatgtacctttagatctaacagtggagaacaaaattgtattggcagagtttatgtacagctgacaaccaccaaacagtggttgcagattacaacaaattgatgcatctcacagtttgcccattaacaaaatgcatattttcaatataaattttgtttgtgtaatatgtatgtctggtaagataacaattggcgcctactcccaatagaaaatagtatggacactcaaactcaagcagttaagtttgcatcaatatacattttttagcacttgtagctttgttggagatttcttaaagccaaatctcttttatgtggaacgttctgctcaaagaacacaatcaacctgacagagcaacgcaatggagacattagacttgacaatattgtcattgggggggggggggttctgataamctgggaaaamcaaaaaattgttwactttcacagaaagaaaataagaatttgtgacaattattgttgaacattcctgcctcaaacctgcatccatattaccagtaggaaggaatacaaagtttgatacatggcagtaagaaagtatgtgaagagcagattcagatggtgcatgtagcagcaccaaatcaaaacaattaaaaaatattaaacaacagcaagtgaagttctgcgatcaaacacccagcataagatttacaacaaggtttcataaaaacaatatttttaagcacgaaactatgccatggagaacaaggttgtattgtaatcatacatgataacttcgcggacgtgtcacctcagaaagtggactacgattttgtagcctttgactattattactccagataccttgatcttgtaggtctaataatttattccaacataaacttcaatagacacatggcaaaacatcatatttatacaaggaagctgtagactttatttaactagaatttggaaggaaattggaatatgtaaagtactaaagtaggatcccattccaaagagtatctttagtgaaaaaatggctttgccaatttaggttattaaacttgcaggtgggcttcagtagtgttagatgaaaacaaagctgcttcttgtcactaaaatttggttacgacaacgaaagaacggtgcttagtatttcactatgatgtgacttgaatgcataattaaagtttcacactccagtgaaaaaatatgtttacttctaatgggttcaaattcaaaaccatttgtcacatcatgcacgatgtcagcaacatagttttaggctgagaatagcaactgctaagatcagtccaataaataaattcaaaatatccaattcccatgttgattagttatccatatgaacattgagagtatcaatggaacgtctaccatttttgtacttatatgatttttctgcttctatatacattttttgtaccattttctgcttctatatacatagcccaatgctgctgctgctgctcttctgcaaaccatcagaaggctcacaaaaaca

SEQ ID NO: 5792 - DNA, 2000 bp, Oryza sativa
agtcacaaattttttggtaattccgagaaaatttccggaaactccgagaacatttccagaaagtttccgaccatttccgagttccgacggaaactgcccttatcatttccgattccgtttccgagaaaatattttcgaattcgtttccgtttccgaaaaatccgaaaaaattctgaccgacagattccgtttccgaaaataggtccggaatccggaaagtttccgtaccgttttcacccctaactgggacaaaatgattattttagtctaacatacattgtwaagtatattaaagtctacggtctatctcacagcttacaaatggtgagatatgatatcttttaacattatttcataaaacagtaaataagatgcccggcatcaaggggtgaaaacgatattgaaatttcccgaccataccgataccgttttcggaaatctaatataataataatatttttaccaatggctaccattttcaaaatttagtttttttctaatttctatcagcgtggcattgaagttaacactaaatatatgaattcgtaaacattaaaattttccgaccgtttcggttcgttttcgaaaaaataataaaataatgatatcgtttccgaccatttctgatagttttcatccctaacggcatccacgtgggctttcttcctagttgagtaaaaagtggagtattgagagtttacacgagagaattattagtgagattaagatggaaatttgatttttagtcctaatatcttgtttagtaaatatggcggaaattgacagggagtttcgttggagattatgtcattaataaaaacggatggctgagatttgtttatgcaaattaaaggaggaattccccctatccacgtattgaaagaggtgttccttactcaattctccattcccatctcattaaaattatcgtgttttccaactaaacaaaacaaacaaaacagataacttatccatctaaagttctaaacacctaatcactcctcaaaaactacctccaaccaaaacagggccgtaaaggaaaatcttccgtgtcgtcgtctcctccgctccttgcgccaagacgagtcgcggctcaacagcggagaggcggcgatctcccatctggcgagcagagcaggggaggggaagggatcttggtgagcatccacatcctcttcctgactcatctctctcccaccgggagtacttctgtctggaatttgcttgcgttaaccctagcttctgttctaggtttggaagaagctcttctcttaatttcagagccttaatcttaatacaagtgacagtttgtttgttcccccaaaaagctgaatccgcccctgtccagtggtacgaattcagtttctgtagctgccagaagaagtaaattaaatttcatgttataccatgttctgaaactctcaagaatgttgatggaagttgatggggttctagtgtataaaactggatcagtatttctggttattgattgggtttcacaaactgtggaagtataaattggatattatagagtacaaggagcagagatggggcctaacacatgacacgtgcgttacaaaggagaactggagaagaggtggattccttctcaaattccccgcccacagattcccatctccaacctccatctccgtctcctcagagatccacatagcgactcccgatccagactaagcttgcaaaactcccttgccccagcagcgtcgacagtgtggtgctgaccggcggcttctgatcaaaatagtcagttggattggtcctgtcctgtcctgtcctggtcctgaacctctaatctcttcatttcaaaacgaatagatgactggattcattttcctgcattttaaactactggtttttctttttgttgtttttgacattgttcattgctgatataagtatcaggggtataagattatgatggatttatggcattatgggttcatctgagttgatttttttctatctgcagttagagtggc

SEQ ID NO: 5793 - DNA, 2000 bp, Oryza sativa
tttttttaaattacaaacatagccttccaaattgcaatattcattaaattcatttttctaaaaattacaaacatagccttacaaattgcaatattcactaaattctcattctttttttattttcatttttttaaaaaaattgcaaacatagccttccaaattgaaatattcactaaattctcactatatttttttgttaattttttcttttcaattttttaattgcaaacatagcattccaaattgcaataatcactaaattatcactctattttttatttattttttaaaaattgcaaacatagccttccaaattgcaatatttactaaattctcactccaattttttcttaactttttatttttaatttttctaaaaattgcaaacatagccttccaaattgcaatattcactaaattctcactctaattttttttatataatttgcaaacatagcctcaattcttccattttttttcttttctttctccccactaaattttcattttttttataaactgcaatattcagtaaattctcactctagcagacaaatttttacaaagttacaaatatagccttccaaaaggaccatttctcactctagtagataactttttacaaaattacaatcatagccttctttttttttctctttacgtagcataattctcactctaagctaattttttttaacaaaattgcaaccatagcctttcatttttttttctaaagtctaattttttccttttctttcttccctacacaattctcactctagtagatttttttttacaaaattgcaaatatagcctttcaaatggaccagtctcactatggtagatattttttggcaaaattctatataattctcaccctagcactctccaaatgagtagtcccactctagtaattaaatttgtacaaaattctakgtatttcctgcgttattcttattgtagtagatatttttttacaaaatcctgcatagttctcttctcactctagtaaatacatttttacaaaattgcaaaacctatgcttcaaaaaggagccatggttttttcttactaggggaggaggggttacctccgtgatggatggtaagcttagtttctgtggtaaaccataaaaaagcggatacaatttattaaaaaataatcaaaattccattttaattccgttgaacttggtgaggttgccaagctcttaccgttactgaaccccggcgatgaacaataaacctggttactacggtaaccatcgcatgtgaaaccctaaaacgtggatgccttcttcaatgcataaaaaactttttcttaacataatctttctactacctccgtttcaggttataagattttctagtattgcctacattcatatagatattaatgaatctaggcatacatatatgcctagattgattaacatatatatgaatatgggcaatgctagaaaatcttataatataaaacagaggaagtagtaaataagctctctacgaagtgcagaggtaaaaaaaataatgccattgacagtcttaccaggcactcagtatatgaaaattaaacaattgaacaacttgataactgaatactactattagactatagcaatatctatatctatactcctttaaaacacccaatggtgatggtggatggtgaatggtgaatccaccacaagccatcactactgccatatgggtcttcaaatagtgggtaggtggacttttgtcccttccccaacctcaaaccatcaaacagagagaatatttttttaatatttttgagggctttaaagtgttgagggttctcttttaaaattcccgttgcaacgcaccggtatttaggtagaaaaaaaatcaccaaacgtgcgggtcctattcgcaaaactcccgttccgtttgatttaacggccggagattttcccacaaactcgttaactccatcttctcttctcctctcacgagctcgcagctcaagcgcacccagcc

SEQ ID NO: 5794 - DNA, 528 bp, Oryza sativa
  misc_feature (1)...(528): n = A,T,C or G
ggartcggcgatcagtcctctgtktcwtgarwaygknaattccggggtttttgnraattttcmaatttaagttcccmrktttcttrggccctttacccgtggsctttgggcatggctgktttctcaaacctgtgtgttgcatgtgtccygcmtaaatcmtttagcccattctctgttcaacagggttcmtycccckggatattkaccggacmarcygttgscggatcatggcgaacaawctcgsstcttwaaatycsnarccaatttgacytaatycatkgaaagcyttgggattggatatatggagtggttttggtgcaattgttgtaagtcatccataagaccataacttcactgtcatgtacaatcatgagttatgcacatgagtgttacattctcatttttgggcaagaacagatgttaatatttctcttgacttatatacatgttatatgtaaaccactgagttaaatccttacggatagcactttgttgaattgtagatgcttagcttttggttgcatatca

SEQ ID NO: 5795 - DNA, 2000 bp, Oryza sativa
ttcagcgacgcgctggtggaggaggacttgccgagatccatcgctgactggagatcgccggagaaaggactgagattgatgagctagggttttgcgggagcggaaaagacgagaagcgcttggaggttggagggtttcttcacaacaggcagacttcaaaatggatccccaaaactctcttaaataaacgcacttccgacggtgcaaatttcaaggaaaggagagagatgaccgccggaaatttcttggtccgttacgcgcggcagtctttctcacttcagtttaaattcgctcatgaccgttgggcttcacatggtgttctcggctatgtcctgtctccacagttctcacaccgagaacaacaacagcctcgacaccagaagtcgcgattggttacacgagttcatttaagcagaagtcgggggctactgtcaaggttacgggttaggtataccctttacccttcgatatacgtcacatatcgatatggcatgtctgcgcgtatatggacattctgcgcataactaagtaaatccttcacggagtttacagatggaaagaatcctactcggacagactgggtcgtcaatgtatcgtgtagggtccgatgtctccgagttctacttggaaaccgcctgacctgcgatataaaagggaccccctggaggacctaaggcatcgaatctcggagccaacacaacccccacagcctacgaagtcggagcctgcaggagccaaatcgccgggagatctagtcgaaccaactcgattacgatcccgtcggtttcatcgagttccatcgttccctttataacctgtcttttccatcatataatcccatatcaactggattagggctattatctatcaaggggtctgaaccagtataatcctcgttctctgtttgcttgatgtcgtattacgtagatccttgtaccaacgtaccccaataccctctatattcggtctacgagtatcactcgtggacatatgtgtttaaacgtttgatgtgatatggtgtaaaattttgaggtgggatgcgaaataaattcgcccatcgccggatctgccatctgtgactataaatgtctctcgaaacaataaaatgtgtctcttatctatatgaccgtgaacgtgaacacattctcgtgatcgacaagtttaaaataagtcgcagcaaaaaaaacagtcatcgatttgaaaaaargaaaargaaaaacagtagccatccgatcgggaccacccggtgaaacgtggcggagttcaacagtgccacgtcaccactgccgcaacgcaaacgagctcgatccagcgccgcgtcagcaatcacgcgcgacacgaggccaatattagaattattttactacacagcttttatcgtatccgagagcagtaaaaacgccgcctaatttacccggatccggattttggaagcgtgtgcgttgcgtggcgctggtgggggcgcggagcaaatcagggctccgggacatgtcatagagctgacgtggcgccctcccattggccgagggctgtacaggtacgtgtacgtagtcggggcgcgcggtgacgtggcgttggccgtcgttaattcccctgccttttttgaagtcacaggattggatttatccctcgggaccaccccactttcgcccccctaattccacttaattacacatcactcctcatcaggggcatattagtaatttattacctctagttttagcacatctcagcctcgtggagggatgatttgacgatgataagtacagggggttcatcgcaaatgttacctgtaaatatctcgtgactccggtgcgccgcgtccacgagggagtccgcggggtggggcccggtgggcagtttcagggtcgatgtggacttggtccacgtgatccggtaaacccccccctcgcgtactccgccctattaaaacccgtgtgagaagcgtgtcgtctcagggaaaaattccgaaagccacccacactctccgtctcctcctc

SEQ ID NO: 5796 - DNA, 2000 bp, Oryza sativa
gaccgaattgaaaacggcgagaaaagccgcgggcgacttgctgccacgcataggaatggggggccaaatgggggcatgcggctgtccgtgcgcagaatcgcacatacattagcatgtgagcactcgccgctcgtcgcccgttgttgtgtttgtgttgggagccaggacgaacgccactactgtcgctcgcctttcttctccatgctgtctagcttgctctgtttcttcccactgtttcttccgtttggtgtatggcagtaatagtactagtgccctactatcaaatgcatggcactacatttgatactagtagtgctggagtattttattattacttcctctgtttcacaatgtaagtaatttagtatttctcacatttatattgatattaatgaatctagatagatatatatgtctagattcattaacatcaatataaatgtggaaaatattagaataacttatattgtgaaatggaggaaatagtaattagcagtatcacgcgtctacttagggaaatatgaagaagaaagtcgtattaatactccactagtcctatctctacatagatagagagaatcttgcaatctttctgcggatgtttgcatgttcatttcgtctcttctcgtggacggtatacgcatgtgtttgtcccggattatttcagtggggtgaatgtgactgtctactccagtctgaataattctctgctggcctatactagcttacatatgacaatgctaagaacatgcccggtccaaaaagaattgtttgccacagactcacaggtcggtttaatcttggcatgctcatcagaacaagccgggattgaagagattgtatatatgcacacaggttgcttcacatcacatggttgatttgacctttgtgccaagaacatctgtacgtgcccctccaagtcaaagacgaatccaacatcaacacgagtttgcaagtaaaataaaacaaaagatacaacccaaggcgcgtcgtctcaggcatgttcttggcacgtaaatgcactcgtgaagcacgggaggtccggctctggcagcacaattcagttcttgtacttgtgaaacagtacgtttatcttcgtagtataatcatactattgcaccaaccgttgctgcccatttgcatcctgcagcatattcctgtccattaatgatctcatttggtagtccgtagccgttgcaactaacaactcctacgagctgtatgaagttcatccttagtgctctagaagaagagttcttctcgttgtagcaggttaagaaaaaaaaaaggaaaaatggttctaaaaaaaagatttcatttagtaccacctggaaagaacatagtagtatattgtttatacttgcccacaaaaacataaattgagaacactagaccgcaaatgaatgacaaagtatgaattaacaatgtcagttgctcctaattcacatttcgtacgtgtaagtacactaacgctagtgcgtcatgacgctaagatgtaccttttgatcatttttctttgaggaagttagttagccagctactagattagttattagcttgattgggtgcgtggtctgcttctgtagaggattatccaactgactggaccagagccagctgaggaccagacaattttcgatgtccatggtacctattgcagctagtcataacaagttgttcataagtcatagtagccaataaagtttcagtactatttcctccctcgttaactaacggagagaaaagtgttcatttagcacaagcaggaagcataactaactaagcttaataacgaaatgtatggatcatgactggcgagtcaatgtacaggacatgaaaaccatagattcctagcagatagcagtagcatcagcaaccaaaacgctacatagtataaaaagttaggctcagctcgctgcagggctcactcacactagcacactgtcagtccttgtcacgtttgctacggccatcccgtccaatccaccgcagaaacgcca

SEQ ID NO: 5797 - DNA, 1846 bp, Oryza sativa
  misc_feature (1)...(1846): n = A,T,C or G
aaagtattttgtgatgttyagaaggtatttcactagctctatnaaaaaattagaatattgcatgtggtgttctttgtatatttcaacagatattttatgatgtttcattaagttattaaaatgttgcaagtggtgttatttggatgtttcactaaatcatttataacgttgcacgtgttgttctcgatgtttcagcatgtattctgtaatgtttcaacaactacaacttaatgtttcatatataatataaaaatatttcaattagtaatataattatgttatttttgttcatcctaataatgtgagatctctttgttaagatttaattgcaacaaatccaacggtgcaattggatcacacatcaaataagtattttgtgaaaaaaatgatttaaaatttgctattaagggaatatgaggagagagaaaggggtgcgaggatgttccatgtacatgacacgtggaagagataaatagttccatgcctgtgaaggttcccggagagaaatagttacatacatgcttactgacggcgcctgtttttttttaataaaaaacaaatgcttgatatgtagtcttgtcaagggtgagaggctaaatggtaagaaagaaaagaaggaaggaaacaatcacaaaaagggagaaaagaaaaagaaaagacaaaagcaataaaattcgcaaaaagccaccacctccaccttgtttgagcagatcaacacaccacatgcgagtacgtgacgatgtcccctctcccctccttcacctccggtgaatggcgtcccgtatcgccgcccgccacctcctccgccgccctgcgacggtaatccggcatccctcccccctcttcttacgcatgacgcgtaaaatgtatatgggggatttaatgcgatggggcctgactcgttatgagtctcgttgttggggttgattttggggctggatttaatttgttgtcccgatggtggtttggtgctctttccatcgcctctccgttcatttttcttctgtgttattaggatggtaagaatgcgattttttctagttggttgttgttgatcaggacggtagaggatgcttaaactgtgaaattcgaggagattgcaaattttattttttgtttgctcgatcatgcggtttggtctgattgtgtcgttgccatgctgtagaaaaaaaaactggagagagcatggtagcttctggagtcgattcagaattttttcacgcggacagttagcgatagcaaaagcacaggaacttttgtgtgcaatcatgttgaggtgatatgctggctcccttgatcattgattacctgttgatttttttaaaataaattaaggaatatagatttattccggccaccgcataagaaatggattgcctgttgatgattgcctcaactgcatgatcattacatattaatttaaacattttgtgaattagaatgtgattctagtaaatcttcacgcgagtttaatcttcctactcgatgaacagggacaatgggaacaagtcttggtgtgtgtcactgtgtctgttgaacatcttcatattagtttgtcatttggtttcagtcgcgctagctaccaccgcatcaccaaatatgagctaattagatccatgtcatcgtaaatatgccatattgaaaaaaataccactactatttataaaatcggatagataccactgcaatcttctaaaattagaaccataccactccattacaattcccgtcgtctctgtcacattttctgttagatcgagcagcagctggctgtctcccggccctccggcgccgtccgccgcggccaacggagcggcagttcacgtgggcgcagagctaggcgtcg

SEQ ID NO: 5798 - DNA, 2000 bp, Oryza sativa
gagtggctcaagcgcgtccccggcggccgcggcgtgttcgtcgtcaccggcgcgcagctggtgaccaaggggacgtggtcgaggaaggtgctccacctccggctgcactacacgcacgtccccgggtgcgccatccagcgcacggagtgggcggcggcgcccgcggcgtcgcagcgggggagcttcctgacgacgatcagcacgacgctgagctcgccgttcacgcagctgcaggccgccgccgcgccggcggcgccgccgaggaacgagccggcgcccgcggcgctgctcaactccggcgtgtacccggacggtccgcccgtgccgctccagtcgaggaagctgctcaagttcgtcgacatgtcggaggtggtgaagggcccccacgacgtgccggggcactggctggtcaccgccgccaagctcgtcaaggacggcggcaagatcgggctcaacgtcaagttcgcgctgctcaactacgacggcacgcagccggcgacggcgacgatggccggtggtgatcaagggcatgggctgctgaattgagattttcgccgtttgtttgtacatatcacagcagttcatcacagctttgctggtctttgttaggtttcatcgattcaggattttggtttgggacttgggagcagataggattaagagaatgaatttgttacagattttttttaactttttgggcgtataggaagtgtatagaacaggagatccaggacatacaaacaaaaaaaaccatcgagcagtgtgttggcaatgctccaatttattttcttttcttgctgtgtaattagagtcttttgcgtgtaaattattatgagttttgtttgcctgtagattggccggccaaataagccgatatcagaacgtccaaacgggtcaacgggtcgcgaagtgaatatgttaaatctaggccaacaagtaaaagtgaatatttctcacagtgttcatgtttattaagcgaaatgagtgtaacttaactggtcagatttcttgtgatgaaccagctcaccgggttctaacttacacagtacttgtatttatggctaataaatgtttcagtgatagacagcatatgatagcacggcgtctatggtgcctgtggtgactttacgttgccggctcagccttgggtagggtgtgtattcttaggggcgagcgtttgcgtttgtaatgagtttctaatgaaaatataagatcatttttccaacatatgggtaaacaaacatctaagaaaatttaggattcctttaggatagggaaaatttcagaaaaaagtactaaatttaattcaattcctctaaaattccgagaattgccatctccatacactacgtgtgaattcccttgtgtactcttcaacttaacagctctaaccaaatttaaattttaacacttaattttaaaattgatgttgatatcttatttaatccaactttattttccaacaaagtcactaggaacatttctatttttaggtcgttaataagagtttcgttttataatcaacaaaatgatgatacttgatatatttaattttccaaaatctatggaaattaaggactccttggtatagggaattttttccccaaattttcacacaaaaaaaatcctctaaaatctccggttcaaaagagacctcatgtccggccaaatagatggagcgaagtcgtctgatcatctccgtccactaacgcgcgaatctagacttgtccttccagaaaccttttccgttgtgcccagctgtctccgttccatctgcccaagctgacgcaatttaaatttactccctaaaatctaaataaaacccgagcactaaaatattttaaaaatcccataagaaaactgaatttaaaaatgctttattggcaccgttaaacatggcatctcccggattctatcctcgcagccgcgcgcactcctccctcctcctcatttccgtccaattccatccgctcctcctcctcctcctcctcgccgtcgcc

SEQ ID NO: 5799 - DNA, 2000 bp, Oryza sativa
gagtattaaatatagaccacttacaaaactaattacataaatgagagctaattcgtgtgacatttttttaaacctaattaatccataattagcacatgtttactgtagcatcacgtagactaatcatggattaattatgctcaatagattatcccgcgaattagtccagggctatggaatgggttttgtcaatagtctacgtttaatacttctaattagtgtccaaatatctaatgtgacagggactaaaaatttttaagtcccatccaaacagcccctaagtgcacagtctattttacatggtaaaaatttatgacggtccattacaattttgtagtagcttgaatagtaaatgtgttagtttggtttgatgccaaatttggtaatacctatattcaaaatggtacaattctaaaactttgttcaccataatataaattttagctctcaaacttatccactttcaaaactactctaccataacattggattttaccactatcaatattttagtacgatactaaaccaaacaagttatttgcctcatgttcaagccattgtctatgttgcccgaggtctgagttcctcaggatgtgtaaaagaaaaacataaactaaaaagaagggagaggtagggagtgtttgagatatgagaaagggaaagattaagtagatacgtaaaacgagataagttatcagcgtataattattaagtactccctccgttccaaaatatagtaacctaggatcggatgagatgtattccagtaatacgaatctagatagggggcatgtccagatatgtagtactaggacacatcacatccggtactaggttgctatattctgagacggagagagtattaattattctaaatttaaattgtggttaagatgatttttttaaaacatactccctccgtccaaaaaaagacaaaccctgggtttccgtgtccaacgtttgactgtccgtcttatatgaaatttttttataatcaatatttttattgttgttagatgataaaacataattaatactttatgcgtgacttgtttttttaatttttttttatattttttttaaataagacggttaaacatttaacatgaaatcggtcgtagcagttaagagcaaccaacaaaacacaagaggagaccaaatcaagcgcgacagctaggcgtgtacagccccccgtacaggcgtgcagccagcgcgacgcccccctgtggtgcgctggtagttcagccttcgcgcgcgggcggcaaaacacggcacgccacgccaatacgtgcgcgcgtcccgcgccgtcacgccgtgccgtgacgccgcccgctgtcgctcgcgccgcgtccgcgtggtgtgtctttcccctctcgcgaagcgaagcgaaatacaaagacacccaaacccccaccaccacgacgtctcgttccctcgtactagctcgtctcgtctcttctctaccccaatcccgttctctccctttccccccaccccacccccaaccccgtgccgsggcctcgccgatcgatcgatcgtgcgctccacctcctcgagctccctcccttgccgccgccgccgccgsgcgccgccggttcgacgccttyttcgcgctttcaggtgaaatcatcttctctctcaggttcaggaatgaatgcctgggggatgggggttgatcggtttcggctagggggtgctggattggtgggtggggggtggcgcaatgctgctgcggcggggtggcgtttttgccgggtcgaggcgggcggaattgtggggaattttttttttttgcgtgcgcaattttggcgtggctcgggatgatggctgggtggcgtacggcggcgtgagctagggggaactcgcagcggcgccgggggtgggtttcggtggtggtttgtgtgagtcatttgtctcatcgagctccaagtttggaggtggtgttatgctgttttagcactggaggttttgtagtacggacttgcttggatgtggaggat

SEQ ID NO: 5800 - DNA, 2000 bp, Oryza sativa
agagcaggagaaggtcatcctccaatttgggaaaatcggaaaggatatattcacaatggattataggtacccgctctcggcgttccaggcatttgcgatctgcctgactagctttgacaccaaaccggcgtgcgaataactgaagaaaggtatcaaacctgtgtcttctctctatttagctcaggcagcgtctgattccgttggatgctgtaaaattctcggtcttgctatgccaaaatgagcctactcctgggggagacagtagctttgtcagatcaagatgaacaatggcatctatatcttggcaactggcaaaaccccaggaaagatttgagtgacaatgctgtaaccaacaaactgctattgtactattgttcttggaatgtttagcggtgaaatatcactgcgctatggataatatggacgctgttcatcgtgccctacctccttccttgatgctatttacagtgaggttggcgattatgatgctaattaaggagtatctcctgtgatccatcatttgagcctgttacagttacaattactcctgcagaatcatcagtagaaagttaaactctgcaatcatcgtcagtttcggccctgtttagatttcggctgtgtttaggctgtgtttagttcagcgcaaagtttggattttggttgaaattggagatgatgtgactgaaaagttgtgtgtgtatgacatgttgtgtgatggaaaataactgaagtttggatccaaactttggatctaaacacagytagatccaaacttccaattttttttatcacatcaaccygtgatacacacacaacttttcagtcacatcgtaccaatttcaacccaaacttccaactttggaaagaactaaacacagcctttaacttttattcttcgaacttctaactttttctacatacacaaactttcaacttttttgtcacatcgttctaatttcttctaacttttaattttagcgtggaactaaacacacagccagaatgcatattggcagtaaactgttgcttgacactgcctcgtcgtctgttcgtcgccggcgggcggtggcggcggcggcggcggctaaccgagcggtggctgaatcttctcttcctggtcaaaggccggcgactggctgcacgtctgcacgcgcggtgggggccagccgccagcgcaacggccgccggccgtccgcgtcagccggcaacatctgcggcccgtggccgcgctcttcacgtggcgtggcgaccctatccatggtccatcatctccttcctactcgtacacgctaggctttgccgctgcaccaagcatctcccagctccgaagtccatgtcgccatgacgtcaccacatggcacggtagcatacggaacagtggacgacgacgacggcgacctccaagcatctccgatgtccatgtcgtcgtgacgtcaccacacggtgagttggtgacatacggaaggraggaagacgagagtagacgacgacctctgtacaggccggccttctagaagcagcgctatgtactgtattccttttcttccataaaaaaaactaacttttgatcctgagtttgaaatcaaactccttagtccttaaaaaaagtttatgtatctgaatatgctgatatccaactaaaatcctttaggcatgtaattacgattggaaataagaagttggttttttattaatggctgagggactactgtatttgcgcacgtgaccttctagaaggtgagacctgcacaagaggtgaaatccgaacgttcaaacaggaaggacaagtccagtctacagagtcacgcgcacacgaaaccccgggagttaatgcggcagcggaaaccggaaagtgcccgatatatacggggattcgcgcgcggcgccgatctgacgcgtcgtcatcaacgattgctagatagccaaagctcttttgttgtttcggtgctcttcggcttcgtcgtcggcgagggagggtttggtttgggaagttggggggg

SEQ ID NO: 5801 - DNA, 2000 bp, Oryza sativa
cagaaaagagtgatccagtaatttgcagagaaatgttggctaagaaaggtaattctacaggtttagtgagaatacttgaatagggagactgtttccagcatgtgttcctccattaatgactgtaattgcagggatgggaagtgtcgtagcgcttttcccaacaagttctgctatatgcttgtacaatggaacctgcacagaaataagcaaccaactataagaatgcattgccatatccaacaccttcttttaacccagaaccgtggtgattttatacagaactattacctctttttcagcagcacctgctttacaagctgcaattgatacagccaacatagaattcactccaatctcagcctacatgatgcagtgtcaatagttattaaagcaggacaattacaagcgatagaagctgtactgagctggctgctacaaagttaggcttgacagtaaagtgagatggtagtaaagaggagtagacattaaaaaaaaattatagaaaacaacacatcaattattttcatcattaaatctacatggaacaaaccaatgttaagaactgtcatgtggctgattatacagatcgatcgactgtttgtggtaaagcacaacccttgaataatctctcattataactctcatcaaatagagctcagcaatgtaggatcaggttaattccatagagtgagaagagatatcgattggggttttagggatttaccttgtgatgcgccttgtccaagtccatgatggcctggtcgatctgcgactgctgctgcggatccattcccacaagcgcctccgacaccttgtcgttgatcacccgcaccgcatcggcgaccgccctggcgagcagcttccgcttctcggcgtccctgacggcgtcggcggcggcgccctcgggggcgtccgcggcggccgcggaggcccggtgcacggccttgttggtgtggaggctgacctccacggcgggctccccgcggccgtcgaggatctggcgcgcccgcacgctcgtgatcacggccggcgccgcccggcgcatgtggttggagatgaagagcaccgggtcgggggccttggcgcggaccgccgcgttcacggcctcctcgatcttgcgcgacagcaggtgcttctccaggtactcctgcaccgacatggactgaggctgcggcggtcggcgtgcggcgtcccgcgctgctcctcctctcgccaacgcttcccccctctctctgggctctctcctcccgcgccctctgcctctgctcgtcggctcgtcgcctccagctgccgggatcgctaggccgtggacattggccgaactcgaggaaggggaggctcgagacgagaagtcgagagtcctcggaccagtgcgtgcgtttgggtaggcgtgggccagtttcacgatgggccggagcccatttgtgtaagcttgtaccatgggctgagtacacactgtgtctatgggccactgactaggagaagcccagcccggtggtcatttccttcccattgtcttcaaggaaaaaaatcggatcaagcactccaattttggactggaagttgctggatatctcgagtttggaagcagagaattaactgcacttgagtcagtcactgatatgtgggccccattttactatggcccacatatcagtgactcaactacacagcagttaagtcagagcatcctttccctcgagtttgttctggacgattcgggtcgtgctggtaacctgaactgttccgttcgtaatctaccgagcccagaaccaagtccagcattttcgagtctatccaggaatagaagagaactatcgagaagctgctttcctctccatccttatcattcccccgccgcatataagaacgccatcccctcctcgacagatatccaagcaaagcgagaaaagaagccagcaatcgaaagcccaagcttccaaaaatccgcttccaattcgcgaaactacactagtcgtaagcgccaaatccaaccgacg

SEQ ID NO: 5802 - DNA, 2000 bp, Oryza sativa
agtaaggtataaccatacaagtcgcagtctaatgtgtaagtcttgcacttatcactggctggtccacttgtatttattgaatgcttgcatatgaaacacttatgatgcttttccaatacttgttgcaaccagatcacgcaagaaggacaaattaagatatcgatacccccgtggagaatcttaccttgatgtgattcagaggtttaatcatttcttctaatattattcagaaaaaacttttcacagttctttagactgcacaatgcaatggaaataatcaattctaccagtacgtcttcagtcttcactaacttgtgatttggtaaaatcctcagactggaacctgttatcattgagctagaacgccagcgagcaccagtagtcgttatttcccaccaggtaaatctctaaacttcatgatttttccttctgcagagccattgatcgtaaaccatttatcctgtttgtaggctgtattgcgggcgctatatgcatatttcgctgacaggcctctgagggaagtcccagatattgaggtcacacatatgatcttctcttgttcattattgtgctagaaacctaagaaatacatagaccaaactaataccctttaatcttcatgtagatgcctctccacaccataattgagatacaaatgggagtcacaggtgttgaggagaagaggtacaagctcatggactgaatatacatacatctaggctcagtaggacagcaagtctttgctgttttcagatagtcatacagtaacacagatatacgatcgagtcactacaggtctacagctaccacattgtcatttttctcccgacggtgcaaaaacaaaaactagcacctccggtgtaaaactgtaacccactatacccatgaatcactgtaaaaagaagcattcacccaatcagtagttaaaaaaaaaaaactgtaaaataaaaggcatactgctaccaataaagagtgcagatatatacatatagggccctccctaaattttttttctaaaaacatcacatcgaatctttggacacatgcatgaagcattaaatattgataaaaaaaactaattgtacagttatggagaaaatcgcgagacgaatcttttaagcctaattagtccgtgattagccataagtgctacagtaatccacatgtgctaatgacggcttaattagtctcaaaagattcttctcgcggtttccaggcgagttctgaaattaattttttcattcgtgtccgaaaaccccttccgacatccggtcaaacgttcgatgtgacatccaaaaattttcttttccccgactaaacacacccatactgtcaaaaggtaacagaagttgtggctgatccatcactgcttagttggacttgatgagactgacctaccaaactttgaactgtcctgtcctcctgtgccatgtgaggacacaaggcaagcagtttcttgctccagaaactctgctcacatcatggcacgatgctgaatagtatgccaaaaacttccttgattccatgcggcctccatggctgctgctgctcatttgtccctgtctcaacaccccttctatctaacaaacactagtaccattttgtaaattatgtatgacgcggttgactttttattaacgtttgaccatttgttttatttaaaatttatgtgaaaatataaaaaattttatgtcatgcttaaaaaacatttgatgatgaatcaagtcataataaaataaataataattacgtaatttttttaaataagatgaatggtcaaacgttaaacgaaaagtcaatggcatcatatattattaaaatatggaggtagtactttgtaagcttgtatgcttctactactatactagtgtaatgcattgctattgccttcaaatgcatatatggtccatctatccatggcttggtgatcactagattgtgccatcatgattgcatgattgattgcacatttgcatcatttccacttgacttgagccgtc

SEQ ID NO: 5803 - DNA, 2000 bp, Oryza sativa
tgtctcctcttgcaaatgccatgcttaggacggcattttcctcgttgctcagtgctcactgcacaaatgatggcgttctacttctacatcgtcaacttgggcgcaattccatacaaaatttcagcaaccacatgtctctatcgttatagtctttccatccataagacgcttgcttacctgcattattgcttggccaacagaatggccagtatattcagagcaagagccaagaggaggaccttcatttcactcgcagtaaaactttagattttcacacagatcgacttcaaatgcaagctgcaaaaaggacacactaccttgaatcctctgacattattgtcactggagagagagagagagggaaaggtaatgagaaaaatttaggcagtgtcctttttgttctgcagtactgttgctgttgcccgttttactgtctgcacatgactgttactattactacccccttgcttttaatttctactgtcacattgaatctccatttgggccatgttattttcttttcttttcttttcttatcttggattttgttttttcgctgaagttcttcccaagctttgtgtttagtataaattcttatataattttttaaagcaacttttgaaccttgtagttgtcataattcttttgtatctatcctcgaacagttatcataaatcacattatctatcaaacagtacctctctgccaggacagaggaatgcaaaacaaaaagttgagcgtaaggccaatcctccaaaatggcaaactttgcgaccactctctctccaccaaaaaatgctagaatgataaaagtttaggatgatctaaacaccaattagtacttttgaaatgctaaaacttttaccactaaaacttttgctatctgccatttgctatttaaaatggatataaccatgtcctaaaagtgtcatttttgcaagcaaggaaaaagaaagcaatggagtacaaagcgcaaaaatatatttggcttttgcagatacgccatggagtgctcactgctgaagattcacttgacccacacagcacacatacacatactgacaatgatgagttgatgacacactgatgaaggagcaaagcagcatagaatccatcaagtttcagagggctttcagttctctctgcttcctttccagcttgaaacatttcccatttccttcgtgcaatccagatgtgcctccatcgaattggagaaaaacaaaagaacaaataaaagaaaaaaaggggaaagaatacggtacagttgagattttctgaaaaggcttagtatattcagattttcttttaacttacatctaattaaatcaaacgattaacatcagatcattgtctgtaatgttagtacgcgtagcagtggtcaagaattttctttcctgataatggcgagggggttagatatttgtgagaatgataggataggatacgggtgcaaagcgaaaccgctctagcaactgaaagtctgaaacggtcgtctcctcgagtctgaactctcgagtctcaaccctcgtcgtcgtcgtctccacccaatctctcccatttccatttccatttccatttcctcccaaaaaaacacacaagacgaaaaaaggagaaaaatcgcaactttaccattcggtccaaactggcgacatccctttctccctcccttgtgcagcatcaaactcgttcaaaggttagccttttgggggtttctctcgtttgactgacccggggtggagtggagacgtggagtcgttggtgtttggttcagtatcctcgctcttcttggttgttggtggtggctcaaagattgggctttgacccggctttggccgtcgttgacgacggtggaggagggattcctcaatccgcggtgaaaagattttgggttttcaagtcttaattaggtcggagtgagttttgattgtactactccatgtttactcgatttgggaggtgaggaggaggaggttaggttacctaggtttttggagggggag

SEQ ID NO: 5804 - DNA, 2000 bp, Oryza sativa
ttgtgaaatcggtggtttactgtgccctacttatcggagtcaattatctcctgctctatagtctttcaatcgaaaattaaagtataattggcaacgagtatcttcaatcactcatgtctagagttattgcgagacagagatatacataactcatgatgagatatatatttctatatcgcgatatcttcaaaaccgtaacaaataactcttttgtatccaagtctctaccctctatttcatgattttatttctagataatagaatgaaacatgttgggctttgctcaagagctacagtcaattattacaaggttcacacaaaagcaaactcacatagtatgtagccaaaggaacaaaaccaaaagtagaagcaaactaataaaaatcaaacaatgtaaagaccccacaactactaaattctattggtgaatctccacccaatgttggcaaagagctgcatgatcgtcgactcaagtttacggcacgcatcttttattagcttgatatgatcatcatgtctttataattgaacctattcccgaagccaatatgttgccctgaaaagaacctgcaaagattttgaaagtgatctatcaaaaaccatttcatttctactaagtcagagagccaacatacagcggaagctcaaacaagaataagttccttatctttttattaacatccacgagccaattcccaaacacatgagatatactatgtggaaggtataatccaaacgcgaattatatagatctccaaagaaatctggcaaaatggcaatctaggaaaagatggtaaatcgattcatttttcatacagaaacaatatctcaaactaccattccaacaatccccttaaagagataccacataaaaatcttaatcttaaaaggcatcttaagtttccaaataaacttatttatctctatatacccattattattattttttactaggaaaactgctaggactttgcccagcagtgtaattttataaatgaaagagaatatttacaaagttacagaaaaaaacagaagagaaagaaaaacatgattcctatatagtttgtatccaatcataaaccagttgcttgagaggattcttcattctgcacatatgcagaagaacttcttttttgaaaagcaatctccacgattggaaggtgggctgattattttcatacccattattaattagagccaaatacatatatcgaactcaaaattgatatcaaacccaactgttctctccatcatctaaattgtgtcaagtcacgatttcaaaacaacatacgacaaaggtacataaattcagaaaaatctatagctctaactcatgttttggatcaattgtcgatattgatttaaaatgatttgactattgatagtccatgcgtagtttgacgtaagtagtcacgaattttgagtacgtatatggattaaaataatatgtccatattcgtctctccgatcctctcacttgcttttattgtagctttattcatgtttttcgttttctctagctataatttggtgtaccttttccctcgagtagcaacgcacgggcgctttgctagtccaacagaaaaataggagtataacagagaaaaaggacttattgcgtgtccctccgcggccaaggcaggtgcacaaatctcagccgtccgatccacatcacggacggacgccacgcgtgcactccagccacagatttcgcgaaatcctcccttgatatattaatagaccggaatctgccgcgccgcgccgccgccacccacgcgtgcgtacctctctcctccgtgtcgccggcgaacccgccgccgccccatcaccggcggcgacgtccgcccggccgcgcgccgccattgccccgaccatcaacaggtctcctcctctcctctcttaaatacctaatcgcatccgtttaacctaatgatctttcatggattgaatgcttgtccagattgatcgaggcgtagagtagaagcttctcctcggcgacc

SEQ ID NO: 5805 - DNA, 2000 bp, Oryza sativa
atgggctcctccctcaacaccgtccgatctcccgatcccacggttaataataggtcgtgtgtctctagtgttaagtagagaagggcggagtagtcgtcgagtatatcgcgtaaaagaaaaaagaaatctccccgtctccttctccttgcctcctccgctccttctcgcgccgccgccgccaagacgagtcgcgtcgcggctgaacaggggagggccgggcggcgatctccatctggcgagcagcggargggagggatcctgatcctggtgcgtcctctttctgattcatctctctctctctcccaccccacccccamccccaccgggactggaatttgcttgcgttcatcaaccctactagcttctcttctagatctggaagaagctcttctcctcctcctccttaatttgatagccttaaacctctcttaattcataattcaagtaataacagtttgtttcttcacccaaacttagaacccccatttggatccgcccctgttctcttctctgttatataatattgccttctagaaaatattttttagaaaataattcagtgtccgctcagagaccgagcaccctaataggcagaggtcgaaatctaccaacaaatgagagttgggctgtgtttagttcgtgtgccaaaattactttgaagtatacagacacacatttgaagtattaaatgtagactaataacaaaacaaattacaggttccgtatataaactgcgagacgaatttattaagcaggctcaaaagattcgtctcgcaatttacatgcaaactgtacaattggttttttttcgtccacatttaattctccatgcatgtgtccaaacatttgatgtaacggaaaagttggaagtttgaagaaaaaattttgaatctaaacacggccttggtaggaccaaacctaccaacaaaagctagcggcttgtctcacatcaagtactggtcatgcctggtatatctgcgaaaaggttggtatgaacaatctccacacaaatgttatcagcttgatcacctagtattgtgtcgaacgggtgtccaatatgcttgtaagttggttaataaggtatgtgaagttatgctgaccgcatgagatacacaactagtaaccaattcaagtgctactaaaagtggtcaaggtcctcgttcgtacctcgaccagagattgtagtgatcctcccacttttacgagtggtcgagatacgactacacctggtccttgttcgacaagagatagtagtgatcctcctacctttacgagtggtcgaggtatgactacacctggtactcgctcgaccagagtgttagcgatcctcccacctttatgagtggctgaggtaagactacagctggtcctcatttgacctataaatacaagaccccaaggaggagaaggaatgggaccaatacaagagaatccaagacaatccaacaagcctatatatacccagtacatagctacaaaagccgacaagagggatctagagctatctccaatatcgccaagttcttatttgagaaaatggactattactagccgtcgaacatatgtctccaatatcgccaatattagattaggtcgttatcaatattgtgtactcgtgtgatattgatatataatggcaacactggtttcgatcaaacctgtataaaaatccttgtctcccgtttcttttacctcaactcgcatacgctgttgcctgcgagctcagaggcgagcgagaggcatactgtgcgcgaccccggtcgagtgacgggtgctcagatggactagggctgagattacgcccccttcatgcctacagaacaagggcccacccgacccacgggaggatgggccaggttgttcttgtccaagccctccccccttaacaacatcttgtggagcggaggacgggttgcgcttgggccctcgctacctggtggcacaacgcggcctgcgttgaggggcccagatcggcacaagtcccagccctacctggccac

SEQ ID NO: 5806 - DNA, 2000 bp, Oryza sativa
aatgaactttcctacatacacaaacttccaacttttccatcacatcgttctaattttttttcaaacttccaattttggcgtggaactaaacacaacctattttacccttgtgatgaacatagaaatttattaattacattattaaaaatgtaaaagtttgtcgcatgagactattatagttatgagtttgctgtgcaatgcattatttattaccaaatttatttttagataatgaaataaaaaatatgtatttattttcttgaaaaagtcataaaagggaggagcatttctacaaagataggactatgaatgctcacaataatttttttatgaatgctcctgataaaaaaatccattgtcctattaaaatttcaaataaaaaatttwaatctatyacataggttaaatttccaaaatttatgtcaaaatttttcgcactaattatatagtctcattagtttcataaaatgcacatacttgcagtcaaataaaattttcaatcgtttttcaagcttatattcaaacctaaagcatcaagggcaaaaaagacatttgcaaccgaacgcawtagtgaaatgaaggaaaatgtaacggtaggggcatgaaaggaatcaagttgaaatcttagaggtatataagggattgggtaaatttcatgggcatgaaagagattgagtgtgttttcagggatacacagggaatttactcaaaacttttatatacgtattcttagcgatctaaaagcaaatgctgaaaataatcttcgatgaaaaaacctcaaaatcagctctaaatttaaagttgaaaatttaaattttagctgataagcttttgcttcaatccagacaaaccctaaatttccagttgacggaccgattacaaggccatctttttgtaggcaaacgcctgtgattcaaacaatcttttcatcgcgatgcattatgcttataccaaatccgtttgtttgttcaacgtcgttttcagattgcattgtcttcgtgcggggttcatgcaaaaaatttttacacacggccattcggataggtaggggaaaaatacgtcgcccttgtaccgctagacgagatcacgactcacgagacaagtatgctgcagctgccgcgccatgaacaatccaaaacaactccgatctttgccgaagtagactcgcctccgaagccaatacgaaagcaaacatacgctacacaaaggaggccaatcctccatgggccaaaacatcaacaccgtggtgatcctaagcctggaccacgcattttccattttccttttattagaccctctttatataggcttagacttattagcttaaacttttaagtcagtttattagcttatatgatttataagccagtggatttaatgtcctaagtttagtggtggagtcatacatctatctcatataagccaaaaaagcttctccaacctagcttttggcttaatagtgttagagtggcttatggcttaaaaaaaaaaccaaatgaaaaagctacttgtttgttttggcttagacttttcgacttataaattggkttacaagcctaaataaagagggccttattatcctaagccgggatttttaaaaaactttmaaaaacwtcaacatcgtggtgatcctaagccgggatttttaaaagttttttttccggcacgtctatcgatcatttttcatgggccgaaatgacgggccctgcaactggaaaatcgagtcggtccacagcagactgaccaggccggcccacacagccccgaaacatacgggctttagcattcctgggcccaccgacagcctcctctgaccccacctgtcatccgccgtttctctcctctttccccgcactacaacacggggactacgcggagagagagacagcgcacgctagtggagcagctgctgcagcggttggccaccgcctccatcgccgtcgccgactcgccgccatcgtcgttgccgtcgtcgccgtcggcggagtaggcaggcggcc

SEQ ID NO: 5807 - DNA, 152 bp, Oryza sativa
gggtatttttggtattctattaaggaggaacatctattgagtcgcatttttataacgacatcttatagggtggcattttggcatattgttaaatttctccctcctcgccgcgccgctgcgcctggttccacaaggtgtcaaggtctacgccc

SEQ ID NO: 5808 - DNA, 1824 bp, Oryza sativa
aaaatttysggggggggggggcgccagccactctggcgtaytccccctagccacctcagcatagccccgccaagtcggcsgtgggacggcgccaaagaggctggcgccgtcctgtttaacaacggcgccagccactctggcgccccaaaaaggaccatttttgggataagtttttctagggatctacttgcgaaataagtttttcaaaaggactaaaatgtgaaaaatccagcctcctggtccgccgccgcgcccttcattcgtctagccgaggtggaggaggaggagagagaggacgtacggacggcggcggcgccttctccttccactccggcgcctcgccgccggcgacgctgacgacctgcggtacgtacggctccacatgtcgctccccgtcacgtgtttctttcctcaattagtgcaaatttttgtggcgccggagagatcggcttctgcgggaggagtttgctgtttttgacgtacgccttggaatttcttttcttttatctcgatgaatttgaatttgctccgtcgctaataattcggaacagcgaaatctgttacgctcggatttgcctcttcgttgcgaaagaattacaaaatttctccgcttgacttgatttgaattttagaaattcccgttctttggttcagttttgcggttctgaacttctgaaccaaatgcatatttttcctcataatttgttgcaacggtgggtctttgcatgtcgtcgagaatgggtctctttggcacgtgagcgtcaggcatgaaaaaataagcttaaaagagctggaaatttggacatgtgctgtttcaaaatgatttgatcaagtcatccaatatataccactaactggaactaaaatcgtggattagtgtacacaaatttaaacagtctgaagatgacctgtttgactctgttaacaagtactagagggaagaggaggaagtctggttgattcgcacggtagtagtatataattgtttcatcctttgactcgtgtgcaaagaatctagcaacacacattcttgtcctaatcgagtataatagtattatgtcaggcatgctgaacttggctgccaagcttgactgttgtttcctttggtttttcttcactactgcacttcaccactttggctgcaagttatttcagcatatcgaagcaggatctgtggctgttgaagtggtgataacgagtcttagaatccagttcttctactattcgttagcctttcttaaatattcttaccagttataaatatgtgatattttggaatgcgcgttggcaatacatttaaactttaaccatcaatatccctttgaatattttggttcaacttttgaaaacatactttatttgttttcaaaaatagtttgaccatattgtaacttttccgtacttttttttattttacaatactactattttcgacctaaaatataataacttttgcacaaactagcgctgtggtgacaattttgctatccagatcgttacatttttttttctttgggggtggaggtagtatatactactgtcataataactttgccagataagacaacgtatcgtgttctttcctcagcttgtttcgccttttagtcacgttgaacttggctgtcaagttagtgtgcatcgtttcctcgcagtttcctccaattaatcgcaaagcccttataaggacttgtcagattattgactgatttgctgtgctcacaaccttcagtaagtagttcacctcatctgtaattgtaaacacactcatctttctgtttgaagttgagaagcagagcaagaagctaagcttgggggggcgtggcc

SEQ ID NO: 5809 - DNA, 80 bp, Oryza sativa
ggtgacgtcgcccagcgacatgaagggcacctcacgagtgcgccattggcaacttcggcgtgccccagtacggcggcacc

SEQ ID NO: 5810 - DNA, 2000 bp, Oryza sativa
gggcggtsggcgcgtagtggattttattcgcctcaaattttttttgtagcggtctttcttacctaccgccattcgctggcggacacttaagaggtccgcctaaaaaaatagagttttttttatggcggacctcttagcttggccgccagcaaaaatcggttttcgctggcagtccatggcctcccacccctcgatatgttttttctggcggttttcgcgtatggccgccagcgaaaataataggccaacgtcataaaaaattatttttctattagtgttacaaaatcacagtttgattaaaaactaataattaatccctcgaattttaaatataaattgcttttgtcaatggattaaacgactgatacatacttgcatcattgcatgaactttccatgtcatattcacatgatatacaaataattcggttacctatttaatttcgtacaatatattcataagattaataatttaataggttgtccattgaattgtccggcgtttaacaaaccacatccttttctctacttcctttctttttttttctaccctatcaaataacctgcgtgggatcatttcttaaagaccgatgactcaattctgtatccttatatttctcaattattttctaactataaatcttttatttttagaattttctagatacttttcacatttattttccttcttgcgtgagctcttcatgaagttgacaggcaaataaatatagctagtactgatgttggttaaagaaagagagcaagaatccaaaaaggagtactatcccattcagtttgcttgagaaacctgatcaactatgatatgagcattggatttagtggatcaaaatacttttaggtaaactagaggttttgtggggcaaaagctccaattaaaatcatgcatgtcattgatgttggagactagtggggtgtatgctgtgggaatatgccactgttcttgatgagcgcaaaaggacttcatttgatggaacaggtgtaggggaaaaggtagtaggtactactatattatacattcaggtatattaaggcacaaattttggttcaagatctcttatcaccatatatatttgtactttctagatagtttgtctactgaatgtatatttaagtcatgttttagatagaaatgtttatgcttggattaatgatttttagataacacaaattaattagcttagcaaggagataagaaagagctcaattatatatcccaaatgcattcacatataacaccagaaattaagtcactattcttgcaaaaaaaaatggtactcccttcgtttgatgttataagagacgtagactttggtcaaagtcaatttattttaagtttaactaaatttataggcaaatatagtaatatttataatactaaattagtttcatcaaatcaataattaaatatatttttataataaatttatcttgggttgaaaatattgctagtttttttctataaacttagtcgaacttaaagcaatttaattttaagcaaagtcaaaacgtattataacctgaaacggagggtgtagtcattatcactaccagatttgctccttctttcattgatctttacatcaaattatcactacatttctaatttctacaagatgcatggctgtaacttaattatcgtaccaaggctgtttatttgttttctaaattttccttatatattttgttgacactttagaagggagaagtacattttttttatacctgaaaatccatctctatggagaatacattacgtgagtatgttagtcaaagcaagcacataatgcttgtttaaacgaaaagataaagcgaagtgtcagtgtcaaaagcccagcccaatctgatgaatcagtgtaaaccaggcccaagtcggcccatttgtatcatcaaaatatgaattatccttgcagctattatcattaatagaaaacctagacaagacaatatcttatacatgatacctattatagtaccagctgc

SEQ ID NO: 5811 - DNA, 2000 bp, Oryza sativa
ggtggcctaaaacctgcaagatttagggatgaatttttcatcaacagaaggttagcaatcgctaaaacatagtagtttgtgagtcgcagttggttgtaccatgcacgctttgtatcgggctctgctggcatgcaccatgggacggggatacgctattatgtctatacttctatmgaacctcacacaaggtgaaaatggtaggaaatttcccgatcataccgcctacctttcagttgatttgtgccaaccatttaatttcgattgtatattgtccggaaatgttgaagttttattcgaaccgttttagtagtatacggtttactgactgcccatccgaataaaaagaaacataatatttatctgttatcgaaatattcaagagttttattctaatcgttttaatagtatacggtttaccgacagccgatccgaatataaagaagcataatctttatctgttatcgattattctattttaatgatgtattcaaaccagttatagctttgaatgttcactaatagtttcatgtgacgttaatttgtaatgtaaacatgactatgacttatttaccccttgatatatttttttggatgctctattttggtaattctattttagatattttttttcgatgtttcaatagtaccaatatcgttactattgaatctggatctaccgttcaatcacgttttccaaaaagaattagtttgagcttttatttgaaccgttttatccctataagtagcaatggtgctgtagattttccacaagagtgatggaagctagctgaaaaagaatactccgtatcgcttttatggcaaaagtcgtggagaggtaaggatgacgacgagaacgagctaggctgaaaagctacaagggccagaaataaataattaaataaaggcatacttgttgtagtgagatggggattataagattattcgggttatggtggatgagggagaagtatttgggaacatcccaacttgatgggcttgttcaatttgctatcatttttaactttatctttttttggtaaagtagaatggctatatttagtttgttgtcaaattttagtaaatacatatgaaatcttgccaaaatttagcaacattgacaaaattttgacaaccttagcttactaaaatttggcaatgtcaaaacttggtaaggttgaaaatggtagcaaagtaaccatgttcgatattacaaaagtcctaattgatttcttttacattgattattcaaacgaaatagcctcctagggcctcatcgtttggcatattcatatgcttatcagccaaatttgaattttcaacattaaatttggagctgaatttgaggttttttcatcgaagtttatttttcagcctttgcttttagatcgctaagagcacatatataaaagttttattcacaaattaatttttatttgtaaatatgccatattcagaaaatatgccaaacgatgaggctgctagtgatttaacgttacatatcaatctaagagtaggatggtacaaacagtaaacaaatggatagcttagagccaaaagacaggaacattagaatttagtactagaaatcaagcactaatccactctgacacgtcatcatgtatcttctaatctacgccacgtcattaaaaaaaaccttgacctcatatcagaaactttcttttcggccaccacgtgggcccacctctcgtcctcctcatttcgagcgaccttccggtggaccccgccggcggccatcggcgtcgcctacgtcgccgtcaagcctccccggcgaggtgggccccacctgtcatcctccccggagcgagacgaaaagctccgcgcaacgtataaattatttatcccgtacacgccaccttcatctatagccgccgcattttactactgcccaccaccaccacaccacccaccccctgcctagctattagctaagctgctctgctccaccactcgtcttccgcgcgcagcaactgttcgcggaa

SEQ ID NO: 5812 - DNA, 2000 bp, Oryza sativa
ctggttgagtaactagcttatcaggggagccttgatgtcgagagacatgtggattcgccggtgtggtgtcggggaggacccctgggcttcctggcacagtatggtctgggacctaacctgttgttggtctgggacccctctcgtcggcatatggtaaacctgtatcggctttggaaatgccttgtcatgaaagcttggaggtctcccgacgtggctgatccccacgggctgggtgatccgggttagtaatgtcatgtgggtaaagtgtaccccctctgcagaggttaacaaactgttcgaacagccgtgcccacggtcatgggcggatgtgaggtgattcctagcgtagttttgtttgactactgcttgtgaaattgctgttgtggaaaggggttcgatgtttgaaaaatctgcagctgatgggatcagctaggcccgggtggccgtttgaaggttgttggcccgggtggccgtttaaaaagttgttggcccgggtggccgtttgaaaagctgttggccgggtgccaaccttgtttcaattctaaagactgatacattgcacatactccgaccggacgagacgcactgtcacaaccgtgtcgtttgagaagcactcacttagttgttttcagaaaagagttcaactaaaatcaattgcaaaaacaacggcctttccttgaagcctgcattaaacacttatttcccttggcttgctgagtactccccgtactcacccttgctctatataaataatcccccccagtcgctgaagaagacgaagcggatcctgctgatgaggagttcttccaggagcaagccggctacgatgagttttagggtttcggcctagttcccaagtcgcgcctgtgttgtttggtccaagtcccggcttccgtttcccttttgtaatgcagttgtgagatcgggatctgtccgcagcccaacatgactgtacatctactctataataaagagacctctgttgctgtgataatctgtcttcctgtgatatcagcactgtgtcctgggactggtatcgattaacaggttaaattggagcgtcacgggctagttccggtcggtactagttcggggcgtgacagcaagcaagcatgaaagacaacacaccgaatatgctagatatttgttggttagctgcatttgcaccgaaaaatgcgcgggacagacatcaaaactgtaagtctaaatatttcgaaattcgaattgcaaatggcgtaatcgagaagacttgaaatttcgtgttgtggttcactaggataaagacagtgcttacgcaaagcgcgcaacgtttgctgataagcaaattaagtcgactatcgaccgcgaccgcagacctactcgcgcgccgcgaaatttaaatagtttcggcccccctgacaagtggagattttctatgtctaaaatgtttatttgctcaaatccacacatggtttggcatttagttgaacaaaaaatccgaattcatttttgaaataaaaaaactaaaatccatcatgtttcatcgggccagacagcccacacagcattcaggcctcgttcttcgcactgggcccttatcctaatgggcctgaatgggccgggcctaggacccagtcgggcgcacgcgcgcgacacctgtgaaaagtcagacgagtggaccggttccaccacgacgcttccgaccgagccaacccaacccaagtagacgaccacccaacccaggctggcgcggtgcttcgatccccctctccgcctcgcgaatctcctcccctcccccacgcaactcgccgcctgcgctgccgctgctcgtgagggggagacgacgccggaggagatcgccgccgccgccgccgccgcctcggacggccgcgcccccccgccgcgcgtgtaccacggtattgcggctcgccattgctcgttttcggcttgctgtttcgttgcttgatccgatctgatcgatgttgattgtgtgttagggcttgggggattgattggtagcg

SEQ ID NO: 5813 - DNA, 2000 bp, Oryza sativa
tttattagggtgatctaaactagggagattgtctttagcctttgtaaggtgattgtgtcttattttgaaatggacggagtattaaaatctgtcaaaaagggatatccaaccagcaagtatcagcgttaagagcattatctggtttccccaaaaaaagagcactatctggttaccatttcggaataaatactatcaatgctttcctttttctgctcagctttcatcaaccgacgagataattagtaaccgggatcaaccggttcagtttctcttactagtagaaaaatcataatccctatcaataactgggaattcaggacacattcctttttttttttacatattataaatcatcacgggcacatttactgaaactcctaaaccagtactcccttcatactagtaaaggaagttgttttagacagcgatacggtctctaaacacaactttaactccttatttctataaaaatatttattgaaaaatgatatatgtatacttttatgaaagtatttttcaagacaaatctattcatataatttttacatttttaaactcaacaccttaagagttattcatgatttatatttccaatgtttgacttaaacattgtcctaaacgacttcctttatgagtacggagagagtatttcttagataactttataaaattgattgtttaactttctaatatttaattcttttgcatctctgccctcaaataattgcgataaactcagtcatccatgagaactttagaacacagcctactcgtggatcttacatcttgggtcctagtgctacgtatcattctagtggccttgttgtttctctcatgctcttgggtaaccgctgcatgtgaccacaccacaccgagcacagaaggtgtttctgaatgtctgcctgcccgtgtaacccatcaaaacatacctttggcctcacctctgtcttaccaccgctcccgtgacccctacattttgtcccaccataacctctctctaattaccctccaaaattgtactacttcctcctaatgtatgaaaccgttaactttttattaatgcttaaacattcaccttattaaaaaatttatgtaattatcatttattttatcgtgacttgatttatcatatttattctttaagcatgacataaatattttatatttgcacmaaaaatttaaataagacgaatggtcaaacgttgttcgaaaagtcaatggtgtcatacattataatacgaagggagtaataattaggacatatcagcataacttgtacccccatccgaagatacaactacttcttgttccatttttaaaaaaaaacaaagtacaaaacgcatacacttatataagcatgtgcacgctcaccactcatatgagcacacaacacgtacgccctatccctgtgagcgctttcaaatattggtccgataaattttaagattcatgaagtcactactcactacagacgatttgttgtcaatagaaacgtcagttaccatttttctttaaaaaatagctgtaaatgcgagcacctatgtcagatataaaatttgaacagttggatagacagtttccacctctagaaacatagtcagttgagttacactcactttgcctctcattctgtatctggacacatatatttggaaatgtaataatttcttactatgtatttagacatatatatttctaacttttagtcatatatatatctagacatatacatatatttccaatttatattttgagacgaatttagtaaagcatttattatttctctatataaaaatcccgtacataattgcatatcagaatatagtatctgtgttaattacgtatatatctggagccataatccagccgtgagctaagcttgccgtttgctggctagtgaagaatgcgtgctataaatacgaagccccacgagagctatagctatctcagtgtgctcacgtcacgtgcatgctctagtgaggcggcgagtgttcgacgac

SEQ ID NO: 5814 - DNA, 615 bp, Oryza sativa
tattttaatatttttaattttaaaaataatttaaactaataatatagatatttaaattaggtaattaataaattcaaatcaactatagtttagaataaaaaataaaatgatatatgccaagtacaatctaataacaatagaatgttagaaacaatatgaattcaatatttttataaattttaagtacgattcatatataaaactaaagaaaaatatagatttatatataagtgagaacataataaaatgtaaggtaaaattattaaaggaaaaatattattaataaacaatgatgttgatgtatttctaaatattttcacgtattatttattaagtgtcaatgattgaaatggatgatttaccccagccactgccatttgaggcccacacagcgttggccccaccagtcggtctcacatcggctacaatggctagaaggttctgtgagtaaagccgcttccccatttggcccccgtgccattcccgtccgatttggccatcgtcgtctccgtctccgctgcgtctccgctgcctctcccgcgccgccgccgtcgcagtagccgcagaaaccctagacccggcgagagagcggggragctcacgggaaaccgccaa

SEQ ID NO: 5815 - DNA, 2000 bp, Oryza sativa
tgaatgtggctatatgcagttacagttggtagatagaatcgttaacattctgtggcttaaggccgaaattaaacgcaggttgtacgtttgtgaaggctgtatgttgcagtcttgcagaggcgcgtgtttcataaagacctgacattgttgtgaccatatgcaaatgcattatacctgtggatctagatctgctaccgtggaaagcactgatcttgtccmagggaaataaacgcccacatgtcggcaaaatccacccattgcctcccagttgatctttttgctgtgcacatatggttttgtgtgcagtggctaatgcaaatgtgtgtcgtggagagacctcgtacgatctgcgggccgacgtkggggcgaaatggcgaatcgtgtttaaccgagcacgttttactctatcgggtagtcatctcggccgtgccatctcgttgtgcaggatgccggtgaaattctctgtgcttgggccgghccagctgaaaccggsccatgggctgcgattgggttgtgaacgactagctacagtacaaacgccatggatgtgctgggcttgccatcgttcagcttcctcagctttgacgcaagctgggcctcacggccgtggtggtgatccctcgcgccgcgcttcttgcgcttcgccgccgcggcggcggcgtcggcgtcggccatgtcgagcagtatccttgcctgctcgagcagcgtggcgagccccgcgtacgcccgcttcatctcctcmacggcggcgtccccctgcgsctccamcgcgtccaccgtctcgcgcagctgccgccggttcagcccggcgaggtacgccgtgacggcggcgctgggtggcgcgccgttgacgagcgacgccgcgtgcgtggcgtcctcgacgcccactggctagtccgtctcgcccccgccgccgccgcagcccaggtcggcgaggtcgacgcggagcgcgcggccgcggagggcgcggcggtcgaggttgcggcacgcgctgcgggcggtctcgtcgtcgaggtactcgacgaacgcgaagcccctccgccggttgccggcgtcctcgtcgacggcgaggcggagcgactcgacggggccgatctcctcgcacgcgtcgcggagctccgcctcggtggcccggtacgagacgttgccgacgaacaccacgctgctgcaccggcacgacacggcggccatggcgggcgaacttcgaaccggggcgaagtcgatcgaacaggtttggtttgatgattgaatctgaaaagcctttcgatttttctatacaaggagtagtttaatttccgacttctgagtcggtggcgagtacgaacgcgttgggttcgattcgtgaactttcaacacgtttccagatgtttcaacacgttggaagtatttgatccgaccctattttgtacttttaaattaggtctcgattatctgatatcctaattcacttttatgcatttagatgatcttacgtagtatcatcttcattagtatccgttcaagtaaattaacaaaaacaattgctaaattattaaatttctaaaaaataaagagcatatgaagcacttaatttgcaacatctggacggtggaaagcatcaaacagttgaatagtacggagtttgttcgatgcatctcgccaccatgacgtgtaccgcgaaagaaggcgccaaaccgtcgtccacggcgacgacgtgtcgccccgcgcgagctccggtcgggtcgccctcgcgccacgtggaggtcacctcccatttcctcgtctcccacgacgaggtgttcgtccgtgctcagcagcagcaggaggaggaggaggagaaccacaagaccaaaaccaaccatgggcgcgggcgtggcgcgcacggcgtggcgccacgtgacgcccggcgcgcgcgcgcgtccggtcctccattatagggggggaggggggacacgagcgagctccgcgttccccggatcgatcgccatcctcttcttcttcctcctccgtcgttcgcgtgc

SEQ ID NO: 5816 - DNA, 2000 bp, Oryza sativa
tttaattaagctgaccattgcgaccgaccgaccgaattgaatcgagtctccaaaagaaaaaagagaaaatgcccttctcctgcatgcatgcagtccttggtgcagcagtgacctcactgaattttgtttgttcttggctagggactgcttggaattggattttagtctagcaaaatttgactccaacatgggagcatgtgagatatacatgtcattgatcacatcactatactgctgtgtatcttttcataccaactaccataatatggtagcccaagtagtggaaattaaagaaagcacaactccatatctcgatccatctatcccttatcactatatatatctatatcattatcccgtagctattttacaatatcacaaatatataaaaagatttagtttttttaaggagtgaatatgttcgtttcagtttgactataatttcctgaacttttttcagtgaccgaccaggcgaccacccgttactaagatcagggtaaaatgtgaggccgacatgtgtattactggtcaatggcagaactgaaattcgaaaatgtattgatgtattattcctcttttttttttgttcaaattaagatgacacgtaggctccagcaaccatccacgtggcggcaggttgtgcacgtcactccatctccaacacatcagcattttcagcaaagaaagaaaaaactgtagtggactttgcagaaaacgctgacgacgagtacgtacgaattaatgccttaatcatatgatatctccaaagattaattaataagtggcttgcttaattttgctactaatcgctatctcgacgtagccagagagccatgcatgcatcacagcgagcccacggccgcacgagcactcgccaacgaattcgctaggcgtacaccgtgaatgatttgatgcgttgattacgggtattcatattcctttatgaaaggttattgtcagacttttttaattccacaagatcgatcatactacaaagttattctacaatagtttagaacacttatccagttgtgttagaatataataatgatggatggatatgtatgccatattaaacaatctaaattccccacaaaacatataaaagaacactataataaactatggtttatccaacatggacatatatttaaatgaagtgcgatctccggtgctctttactggtaggatgaatgatgatagagataaaagcgtttaacaaatatggcctcaagcgaaattcgttatattaattaaatcaatgaaaacatttactggattaataaaactccatgctactccattataaatgaacgcacacctatatatagcaaaattcctatttgccagtaggtccaatacttcggatctgtttttttttcttttaaatatccaaaattgattttggataactactcgacagtacaaacgaattaaaccagctattacaacgtcgagtggatttaaaacactcctctattaaattcacctacagaaagtcgttcccgctgaaataatcgcaccgtctagaagctcggcaagcgtgtcgctaatccgatactaactccattaattccattttcatttcaataattgttgaagttattactgcactggaaataataaaggcaggggggtgtaactgggtgtgtacaaagtgttggtgagcatagcagttggcaggtgcaccaccccttattatattcctcctttctctctctctctctctctctctctctctctctctctctctccccctttttcctccctttaaatgcttcgcctctctcgctcgtctctccaaacacaaacccaccacctcctcctcctcctcccatccagcacgcgcctcctctctcgcgcggctttccatttccatctccccctcctcctcctacgtctccgccgctcctcacttcctccactcgatttcctttcttggcctctcctcctctgacacaggggtgtgcaggtttgtgtttgtgcgtggcgcgtccgcc

SEQ ID NO: 5817 - DNA, 2000 bp, Oryza sativa
ggttgtaggccggttttttttttcccatctcttttkgtttgaacgggttgtcaaaagagaaacaaccacgctagtagttgttgagtagtggagtttaaggtaagcattttcaaatcggttagaaggtacttggagtagaacaaatgcatcatataccaaattactcgaatttaaaaaatgagatgattgtatcacgaaggtttaatattcgtatttagtcatgatcaagcaagatcggttcagagtgtgcaacatgatttaccgtactaacaaggttttggtaacgttaatagctcagaaacagattagattaaaaaaaacttaaaacaaaaactccatatttgatagtttttgtctagttttaccagtttattacggtatccgatcttacaattgggattacagtatccccacacaaaatagtgaggcatattatgtagttataccctctcacccatcaacatgtacgaatttgatgctatacgctaaattcttacacacaaaagaatctcaaccgtcagatttaattagtggatagttataaaaatcaagattgaatcacaatgtgccacatcagtttttctaagattaaactgtcataatttttaggatatttttctccctaaattccttttgaacaattggatagaccattctttttttaaaaaaaactcataaacttttattaataaagacagagttcaaggggaatgaatcctaatacatcgctaaatagatgttctgtagcactgaacaattggatagaccattcaaaggcgcaaatccatactatgtgttttgagatcccgatttttgtgtttcaaaggatctgtacactttgtcacatacaatatgtacgtactttttatatttgtgctcaagaaatcaagatatttccatacactacactaggcatgaaagcccactttacaacagaggaatttaatttggaggaaaaaggaatatcgcaatccaaatgaaagagatcgttatatgttgtattgttggtattaaaattgcaccaaaggtacttcatagggcaattttttggcggaaatacattagctccacccttacataaaacttcctttgatatttgcacgttttgccgacagaaatctattacgacaacatcaaaaaataatctgtacatttcacctacaactaattagatgtcgtaacacttgttagcaacaaaaaaaagttatacgtaaaacatttatatgtgtttgtaacaacttaaaagcaaatacttaaaaaataaacaccgatcaaaaaacatcaaactttactctaaaatgaagttgtaaaatttaatttttgccgcggttgataagttggagggcaagttacaggtgttcccaggcgtgtaaacaattttatttgggccatgctcacgcataataagtcgagcccataataaaattagtgggcctaccgggccaaagcccacagagtctcacgtcactgtaacttcactcacagagtcgcgcagtaactcggagaggtgaagcggtaaaaagataaaaaatcgtcgcacccggaggcccggtggtccccgcgcggcagcgtcacacaccaagcaccacgacgcctctcctcctccccaagctccccgtcaccaaccacccttttccccggaagaagccacgcgggaagcagcagcagccagcagcagcggcgtggctgcgcgggccgcctcgctccctctccctctccgcttggccgcttcccttgcccccgccattaactcctcactcgctcgcctcacctcamgcgccgcacgccacatctctcgccagcgagcgcacctcgtcctcgtcgctatatagccaamgcctccgcctccgcctccgcctcgcgcttggtgtcccccaaaaccctaggtggagctctcctcccccctcaccccatgcggcgccgccgggtcgggacggcgggagggttggttcgatcctgactgggctcggcgccgcgggcgagtcgcttgttggaggggg

SEQ ID NO: 5818 - DNA, 2000 bp, Oryza sativa
aactgattcaacagttattttcaaattattatcaattgctgaatcagtttatttgttcaacgcctcaaaacacacatttttttttaaaaaaacactaattctattgtactcattatttgtaagttactccctccatttcaaattgatctacatatagattttttaaggttattcctaaatgatctacatatttgtgttcatttattaagtctatctaattctttatttgtgcattagagtaaatggacattgatgcatgcatccatgcacacaagtatttataacccacatgtaatattttgatttgctattggctagaaaatagtggggatggtgtatgcttagagtttgttgctagagtaaatatagtatgaaagaattattagtttttcttggtcttggtgtatctatgaaatatgtagattaatttggaatggagggagtatctgttaaacccatctatttaaaatatgtaatttatccctaccacaaagtagataattcacaaaacaatcttcttaataatctgcttcaaactgagcatcagataatcggtttcttctgccatgatttataaatgaaatgttgcccatgcaaatgatggcattaaacaatacactaatacagtgtatgattccacccataaataaagctcaaaataaacggggccatattatgtctgttacaccttattccgtggcgtggtgtttggcaagtttcagatgggtccggtattctggttcgatgaaccggccagcctggcacacgacaagtgggcgtcggttaagctaaccaaaacgcccaagcttttacttacccctgtgattagtctcgctaactacgctgtcatggagagagattagtcatatcggatagctaactacgtatttatagctagctatagcacgaactataagatgtaatatgtgtctgatagatgggactatgtacaatagtatagatatatgtttataggtaactattgtatctattagctattaaattgactatagatgatttggaactagtggtgagctatactactagcttcatatcatgtcgatttaatagctaatttatacaatatagttgtctataaatatatattacacaattaatatctgatcctatctatcatagatacattgtgtcttaagtccgtgctacagttaactacaaatatatagtccgctgcttatctttcttttttttttcttttatctcctcgatatatagttatagctggcttatactttgttgttgtacctgctataagtttatagtactagttggctatagttcattacccctgtgattagtcgctaactaaggtgtcgggagagagagattagtcagatcggatcggatccgatcgctcasgcgccccgagacaccctccgaataaaaatcccccgaatagtaggattccagaaagccgcgaccgcgagaggtcagaggagagacaagcacacgcagacacgaggagagacgagaggagagggggagatgagcggggcggaggaggaggcggcggcggcgaggggagggggaagcgggagcgagagcggggggagcggaggaggtggacggggagggggaggggraggggcggggtagtcggggagcagcggggcgcggcggcggttcgacgacaaggggcttgtggcgaggacgtcgctgatcctgtggcacacgcaccagaacgacgccggcgccgtgcggaagctgctggaggaggacgccgcgctcgtcaacgcccgcgactacgacagccgcacgccgctccacgtcgctgcgctccacgggtgcacgacgtcgccgagtgcctcatcgccaacggcgccgacgtcaacgcccaggatcgctggcagaacacggtgaggcacgccgtgcccctcggccctctctctcgcgacgtctgcgcgcgctggaaatggagggcgtgttgcgtcggtgtggattggatttggggtcgtgccgcggcttgggctctgttcggg

SEQ ID NO: 5819 - DNA, 2000 bp, Oryza sativa
ggtgactctagagcagttagacacgagaaaattgcaatattgggattgcaaacatgggggcttcgctgttttgacactctgtttggatgacaaatgggcccatctgtgtctatgaaatgtgggtcaagtgtcattatagcaaaggttaatgtttgcagtgtcataattgcaaatcccccgttagacacaatgctagccattgacatgagcccctaatgcggctttcctatgactcagatccaaataaaaatgaatttaaaccgccttgagtcaatgcaccacttctcattgatttgcaagggtctccatatcataagattatcaacacatgagcctaatacctgcgcttatctcatttaaagcgattagtcccctaattgtcttgtcatctatcaccaaaacctactggggatctaggtgcactttcagtagtaagttccttgtgtatgtaccaatccagaaatactcctaggtgaaagtatcttataggtatattgtctctcttacaacgggagtaacacgatttggtaatcagaaggggaaagtgaataaaaagggtacactactcattttgatatggtacttagaaacacattgatcgggatgaagaagggatgagcaactccacgagttacatacaaaaggaacccaacttctaagggacaaatgatggaagtggtcaactttcgtaacaaatatagaattttctcgccgaataatgttgtgtgccacttgcaatagtaaagtctattacgaatcatcataagatatcacaagctacataattacaacatttccttcgagtgtgttcgaaagaggtgttgtgaacatcaccacgcgcacgaaaaatggggtggctcattagcgcatgattaattaaatatttaaaaaaaatgaaaaaggattaatatgactttctacaacaactttcgtatggattttttttttcaaaaaacacaccgtttaacaattcaggaagtgtgtatgcagaaaacgagggagtaggcgatgcgaaccatgactttcgaacacacccttattctcactaatggattgcctcatttttgaagtgccaaacaaagtagcaaaagaaaaataaacatatacgagtgatgcattgtctataaaaagcatgtgctacatttcactgaaatctaatttaaactatcatcagatgatgatatcgcttgtaatcaacgaaacatagcgagcctttgtttgtcacagctaccgaacaaatatagttgccctgtataattttggaagttaagtcaacaaacgaacgaaagccatgtatacgtaataaagccatatgatattataagagatatactacgtaaatattgtctaaggacaaaattatctgccacgctccactaaaatcaaatatgaactatgataagatgacgtttgtcaccaacaaaggaggcgctaccttctattcctcaccggctcaccgctatcctctctcccaccgatggactgctcggtgttctctcttgcgtcaatggcctgctcggtgctctctcttgcgtcgatggcctgctcggttttggaactagcaagtatgaactaaccagggatgcaaaatccatatctagatgaaggcacatctgtacccctggacctacccctatatatagcactcatgtttgagagtaaaaccattgcctatcaaacaacagagtgtttaagtatcctggcataagcacaagcaggtcaggaggtactttgcacactctgttcgctggtaagccgcgttagcgggcgttcggtagacagtttgtttctctaatcacttccacagcctgtttagcactctaatccccgccatttttgcttaaacccccctccctttccgcgtcttctccgtttccaccccatttcgcttcccgatcacatcaccgaacgagagagctaggaagaggaataagaggaaggggaggaaattttcgaaacgcgaaccctagggttcgcggtcgcggtcgcgggcgcgggcg

SEQ ID NO: 5820 - DNA, 2000 bp, Oryza sativa
  misc_feature (1)...(2000): n = A,T,C or G
ggttttgcacgtccaaatttaaaaccaagttgtggaggtaattactaaattgaattcgaaactaaacaatagaaatccttgtggggtctggtcgtgacatgaagaatatattggcgtggataccggccggcgccgacggacgaacagaagaaaacgcaacaacaacgaaaaaagaagagtaggaatgaggttgcagcatctatctgaaactattttaccttttgggatttgaccaaacctgcatgttctgatgttcaggttcagctgaactaaacctcgaatacatgcaatgcacttctttttcgtttggataaatgtgtcacgtgcgctagtgactgctcaccgatcgaaacgtacggggcctagatctctcaattttggaggtatccggcctgcattttaaatttatgtttccagcttgagtgacttttgctatccttttcactgcgatttggctcgtggtgaaaattaaatcgctccttccatttctaactgggatttatctcgtggtgaatatatattactgtcgttttctcctaaagattgaagtggtggccggtgggtatcaatttagtgacccgttcttttgactgtcgttcaaaagtcttttgcacgtggtgaataactatataacttcaaatgtttggatatatgtatggagtattaaatataaacgaaaaaaacaactaattacacaaattacatgtaaacgagacgaatcttttaaacctaattgtgtcatgattgaacaatgtggtgctatagaaaacaattgttaatgacggattaattagacttagtaaattcgtatcgtagtgtacaagcggaatctgtaatttattttgttattagtctatgttwaatacttcaaatgkgtacccggatatcccgatatgacacgtcaaaactttacatccatatatctaaacacccccatttgtcctaaatattttctcaccgaggggattggttattgtaaatttgaaaagaaataattgatcggaacaagagaatttgtcacctaactttatgctcatttatattttagaaaatgaacaaatgagacttagaaaataattccattaacctagttattctattatagtagtttctaagaaaatcatttgatccaactaagcccttgtattttagcatacgaattaaacacagcctacgttttaacactcccaatattttagcactaccccgaaatttccgtttccaacgcgacgaggggagtttgaaatgacaggtaccagagttgaaaaggagtaaaagcaggaagcagcaatacctctagtacagcctacagcgacctccgcggcgtggcgtcggtaaamcccccgcgtaggcgcaaacccacgtccamcccamccaccgttttcccccctccaaaaccagggccgcaccgscaccgccamcccccaaccccgccctttccgccgaggcgtggcgaggccaccccccaactcgctaaacgctgaccccgtttaamgsacccgtcctcgcctycaagccamttgtccccctycccgccgggccatccgctcgcgatccgggcgtccgggsaaaaagcggcgtgcgtacgcagccacaaggggccggcgcggcatttgcgtygsgcttgccgcctttggtamagctgctgctgctacagtgttcgagacgcgcgacgcgagtcagtggcggtgccggtgccaggsgccagcaccagcagcagcggcccatcaccacgcggamantcccccccccctactgctacagtgtcactgcagctgccactcgccacgcacgtgaacgtgtaggagtagtctctcacagctctcgctttctcctctcacttttcagggagacgagccagcgactgtgccaatgtactactcctaccccctctcctactcctgttaacaagttgtgctgctatatagaggagcagccgagcaagtktgttgccagaagaaaaggccttgtgaagttggtaattgaatagtagcaagaca

SEQ ID NO: 5821 - DNA, 2000 bp, Oryza sativa
  misc_feature (1)...(2000): n = A,T,C or G
acttattaagactacaaattcgactcaatccgagccaagctcgctacgagctttaagttttttgtccaccccaagtccaaactccaaacacaccctttaactttaactttaatattgtataaagaaacattctcaactcttaaaaccatttaaagaatttattctcataaaagtcctcaattactcccaccgtcataaacaaccaatcaaaaagctcaaatttctactagaaatgtagctatattttttaacagaggataaattatgtttattttgcctagcatggccttttgaatgcatatgttactataaaatccaagaaataagtgattgcactcaagcttgattttgagaaggcattttgtaaaactgaatagagtgtaatcctagagattctgatatgtaaagggattggcaactgtggattgattgggtagannnnaaatctaaaaatctacaactttttccattttattgaatggagtgccccaggggaaaaaaatctcaatccagaaggggagtgagacaagggagtctcatycaactctccttttttaactagcaacagacctcctacaatctattcacaataaagctatgacctatgaacagagggaccttgcaatcttcactgacaatttcaacttgtacgtgtcttgacttactagtaatacaatatgcggatgacacgctcctagtaatatatgtatgctctagacaattgttttgactcaaagctttttacatacattttgtggactcgactagtctaagaataaacttcaacaaatcattcatggtgccaattaatgtgtcagaagaaaagatgaagattcccacaaatactctgcaatgacgcaacgatcctttcctttcagttaccttggattacctttaagtctcaccaaaccactcatacatgatttcttcccaatagtatagagaattaaaagaaggctcgtctcctgttccatttatctttcttatggaaataggctcgatctggttaactatgtgctttctgctaactttctacatgtgccaactgaaacttccagttaagagttgtggagcaaattgataaaaacagaagacatcgtctatggagagggttagacatgggaagccaatttaacactcctcctggttgggattaagtttgcatgttactgtaatcctaaaaatggttaaaatttgagatgtatggggtactctacatggtgcacggctgtatgcctacctactgttgcttactcattgatagcattgttgcagtttcttatagcttctctgtctcaaaagaaaatgactacctcaacaggtcatacaaaaagtacaccatttatcaatgcaatttgttctattgtaaaatagataccaattgatcagaggtacatatcctatatgtacaaacttctcgtgcacgctccatgcacaccaacaagcaaatggcacgaaaatttctacgaataattgaacatttactcctaatagtattaaacatatctgcaaagtctcatattcaaattcattatattttagccgtaacaaaaaagtgaaaaatctgacaatttaaaagtaaaaatctgttagaaatttgttttttttgttacggctaaaatataatgtatttgaatataagatttcacacgtaagtataataccattggaattatgtgtctaattttttctggatttttctgtgacatttgtcagttggtgtgttaggagtgtacacgggaaatatattcccttccagatcacgagattaattagcaacttgggcaattaaccacagtggttttttaacatgaccagtacaagttgactaatgattgtctttatttatgccaagtgcaaacaaaacatcgatcgaatgcccatatgcagcctgaattctcaatggtatatctattgcgttagcaagccactccctcttgcgatctataaaagttcgcccgtggttcagtcatcttcaccagccaagatacatttttcag

SEQ ID NO: 5822 - DNA, 2000 bp, Oryza sativa
  misc_feature (1)...(2000): n = A,T,C or G
agttgagctcagcacgggcaggcggccaacttcccttctgcaaacagcatgcactgatgcacacatgaagatcgtataaaattgcactgcgacgacgtgccggtgtataggactagtgaatttgatgctactcctaccttaaactgggctctcagagtctcattcactgcatatgcgattcattttagctgtgtgacgggaggaacggcaggagagagtcgaggacggggggcgccaacgttcgactgtaccgtgggcctgcgacaggccggaacgtcacctgagcgctcatcggggaatctgggcccaactggagctttcccgggcccatgcgaggatggagccgtctgttcgctgggccctcgccgacgtggactggtcacaggagcgtgcaaatgggcccgtctcgcgcgcgacgacgacgccaccgaccgggaacggctcactgagagacgtgcgccggtcagggccggcagctggagctgcacgtcgcgcgcggttagcgtggcggattcacgtggactcgtgggcctcgccggtcgacgacgcccagtcacccgctaatcaccagcgcaggttttgtactagtgtacagtctcttctcttttttttttcttttcgaacggctaatttgctgtcatgcgttaggtctcctctcacaatcaccatttgatagagacggactgatcgataaatgaattgcaggactagttcagcacgctcctcatcgctcaaacagtcaaactccccgcggatttgctcgatctgttgtttcctttccatcgatggaaagctcgccgccgtgcgtctagggatctcacaccccgagagatgatggtagtagcaacatacgaggttcagccggccgggcaggcgatgggaccgggaacacacgttgtcaccagtatatgtcgctgcttttgttacccactttagtaccaagcttttccctctgcctgcgcagcggcagcgcgccggaggccggaccggcctactccagctagcaacggtgggggggcactgggtttggggctagctgtgttgtgtgtgggcgcgcgcacggtgcgacgttcacggtcggcagcggtgcccgcgcttgccgtgggccgccgccgcgtgctggctaactgggctcgcagcggarcctgcctgatctagtggcaracgatgacggcagatgaaacgaagcgagaacaagtccacttggattccttctaatatgagtccacggataggatagtcccttaaaagcaatctaaactatggatctagtagtatttaaggatctctcaactgcaataacacatcaactwttaaaatcattataatttaatttccycggttgtttwaaatgkggttttcgcttatgtggctagataaattggtctagccagctgagccagcttatggngcccacatgttagcagatctatatcaataggctgggtataatagctcagcaaggtcatcgaacttgttagggatgaatcggctctgsgcccttgtcagctagagactcttatcttgattatgttyctcaatacgtaggatgaatttgaacttgttttttatagtattagatgtcaacatactttatattgctaatttcccataactatttatattgaatttagaaaaaaaaaagtacacgaaggatattcccttatcatattagaacccattccccatcttattggagtggtggagttttcacagggaccatactatattggtttccatgaagaggtcaattataaagtcactaacaatgttctcagctcaattaattaaaccttcacccacactctttgactcttctaggcttactctaagaaaaagagaaagagaaagaaaagaatcagaaaagctttgccacacctcacaccttgtgtccttgtgcctcctacaaatagctcttgccattcagtttcctctcagcagcccaacagtcgtcttaaaccatccagctagaagacaacatcctcttaattccggcctta

SEQ ID NO: 5823 - DNA, 2000 bp, Oryza sativa
gatgagttgtgcaaccaagagactgaattccacgtcaggacgtttctttcatcacttgggcaagaaaaaccttgtggtttctgtcccgtttccttcagttttccccaagaagtttcaggaataaactaaataatcctctgtatcaggaagaggatagcaccgattagaataatctggtccgatgtgcacgcttcatttacaaacgtgtaagtatgcaaccgcctgaagatctttggagaaaattgaattgatcaaatggacggacaagacagctccgacacctaaacacagactgtttgggatggccccataattcaattgtctctgtagcaatcgacagcatgttctcctccctttggcctataattcatcagagaatttgtttgtggggtagttcagatacggtattgggcactcagatgcaatgtctttgggaacagaacagacgaacaattttcagtccctttcgttcagagaaggatataaaattagaaagatcctggaagcaaccaaagcagaagcatcaggttctagtagcaagtagcaagcagacgacacagagtcacagattgactgatagtatactgcacgtggacgatatacttctgtacttgcaaatgcaactcttctgtacttgatagttttggctgaagcccatgggaaaggagccaaagatctgctggaatcaaattcctctgcgctgcaactagtattaagcagcaaactagagcttctttttttttacacccaaactagagctattagtagtacttgtcctagcttctagtaatctaattagcctcctaaattcacctagggattagccttggaccattttgcaactgaagggcgtggatgactgagattgcttgtgagattattgtgatgttaacactacatcgccacgtgtcatcgtcttgttggatggggccccacctctctcgttttaacttataagccacctcggttagtatccacaaagtcaagttggagagtatcatatgcggttgtgcacaccaagcagcaagcaccaaaagttggagtctcgtaggacgtatggatggttaaccataaagctacttgaataaccaaataaaggtgcctttactaaggagagatcaaatccacggctgatgtcgtcgtgaaaaccacctgtaacaaaataagaacaatcctttttaatatttaagttattatcggtgccattcatcatcaactgtcatcagtccattcacatagaagggctcgttttaaccataatatttctcctaccgactaccagccactcatcgaacaaatccacaacacatactacgcgcgaccgctgataagatatcacggcgcggcggtttttatggagcggctcaactaactatcaaatatttatatatttttatattaagtgaagtaccaatattttctctttcttcttcttgctctcaactattgttttgaagtatgtgtagacaagttacaataaatattgattccacatacaaataaagaaaaaactaggttcaacaagtaataacgtaatagtataatagtggatagattcattcaagttcggataagcccctcacagtcctaattccatagttttaaaaatttgggtcaatttgatcagaaatgtaaacaaacaaccctggtttgaggattgccaccccaccaacaaccctctatcgtactagtctaatagaccagtattgtcttgttccatgtcccccctacttcccctgtttgcggctatcacatcaacccgcggtttttgccgcgaaccgcaatccgcccgtgcggcagccatggcgtcgcccacacttataaaagggccctgcctctccagctttccctcctcaaggctcacctcctcctcttccctctccggcatctccatctctcagctcctctgctagctcgagctgctcttcccggatcctagccacatttcttggttctgawctctctcgggttgttttgaaattttcytkggttcaattgcc

SEQ ID NO: 5824 - DNA, 1800 bp, Oryza sativa
tgtggcaattgttattggagcagtgcaagtgaaacccttggtcgcctcctaactcagtttatcaagttaatggaatatgggagttgtggcatgtgccctggatagacttcaactattttagaacaagattatgtttgatgccaccttagccaccatcgactcaaattggaaccataatgctttggctggtggcaaactcatggttgagaatagtagagctgaaaccgtggcctgacccacaatcaagtcaatgtagcataggcgggaggtggactgaactgaaagttccatggtcagcacttgattgtgaatgttctatgggagatgatctttgcagtgcaaattgcmtaagaaacgaagcactttctgttacattatcttgtgcacctaaaggagatttaaatccttaaaaaattgatggatctcagaaggataccttggtggcattacctawtgtaatgacccyaaaattttaatttgcttcgccgcgctgttggcaacctagttgagctcactgtgttgagctgaacgactagttgtgtcacacgattggcttggatttttttttttgcgttaraggatcgattcatatgcatatatcmcagttgaaacccaaattagacmcataagtaaattcyttawttcttcacatwtacattatacagtgttgttgcatacatcaaatgcatctcatacattattcgtctaaaatagaaatagtgaaaattaaataaaaatgttggtgtgatctgtgaccacacctaattgctttaggagatttcaaatataagatttaggcaaaagagaaaatttagagttgcttgatgtcacatattttgcaaccaaaccattttggggcacaaaatttgtaacattagccatctcttagtactttccaaaactatttatttcttaggtaaactctgagtttttgggcaattgaaaatcagtccctaaattcaaagtaatctccatatttttaaagtctatggtactataatgcaaaagttacaaatatcatacttttcactagatttttatttaattgcaaatctgtgaaaaattatgctgagcctccaccgaataaaccatgcttaggtgtcaaacagggagaccactagtaaaaccttagtaggtgagtcacctagtagtcaaccatgtccatgtgacaaaaaccatatcagtgtgaaccccatcctgaccgagcctcgttttcctcgtagagaccaaaaccagttagcaagaagaaccaccataaccagagagtggagaagaaaagaaaaatacaagagggcaaactcacccaacattaggtggagcaggggctccagctccattaggagcaggtaccccagctcaaggaggagacgctgattcagtagaatcaaccaaccaatagaagctgcagtagaaaaagaggagttcaaccatatattttcacaaccactgaataagccacaaagaggtaaactagattaagagcatcatccatggcatataatcatgattagaagtcagattattttacaaatcaagaatctagagaccatattatttgcattacaaggttacagtggcacacatctaactaatttttctattgtgggacattatgagaaatagaacagaaaaatagaagggggaaaagggatatggagttactggtgagggttgtggccggcagagttgccatttgaggcattggccgtctccacggcgaccatcacaggagttgagtaccaatagccatggaggacaacaatgctcagattccttgagagaggagaggtggtagtagag

SEQ ID NO: 5825 - DNA, 133 bp, Oryza sativa
tggaaagaaggcgcgggtgcaaactttgaagagtgaattcaaggcactatgcatgaagaaaaccgagaccatcgatgagtttgcaggcaaaatcagtggcctagcaaacgcaatgagtggtcttggtgcaacc

SEQ ID NO: 5826 - DNA, 532 bp, Oryza sativa
aakgggtaytaaccaaaaaacttggcaattaataacaagtattgctagatcaaatcatcaaagtcaaaccgttgaagatactcacctatacttactctagtcgccgccatgcatgcacatgtggtcacgttctctctactccataatccatactccatccgttacaaaaataaacaaatataacactgtatctgtttttaaatagatgacagcgttaaccttcggttacatgtttaaccgttcgctttattaaagaaattacataattataatttattttattatgagttattttatcacttaaagtactttaaccatgatttatatcttatatatttgtataaattttttaattaagatgaatgattaaacatgtgttaaaagatcaacggtattttctattaaaaaataaagtaaatataaaatatgacacatcctactactactacagcgaaattgacggtacgaagggatcatataactagaaatgtaaaattgttcatcgccatttcttgcattttctccatcaata

SEQ ID NO: 5827 - DNA, 2000 bp, Oryza sativa
gtttaatactcataccttcgccacttgcagtgtgaatttgatctgttcccttgtatctctccttggttgtcaatttgtctagctgcccggtaatgtgattcgtcgccccagtgtcaacataccagttggtatcaacaccgtaggcgtatgttgcagcaccgccaagcttctcatcaggaacatatgagtcatcataacgatgccagcagtcgcttgcaacatgccctcgcttgtgacacacttggcacacggggcgagtatcattgcctcgcccgcgtccctgacttgcgccgctaggggcgccgcggccgtgaccgccacgaccgaagccgccgcgtccgccacctctgtttccagtgctgctgccgcgtccaccacgaccaccacctcggtttgccgcatttgccgaagtggtgagataagcttgccgaatccgaatcctgttttcataactcaagagctgtgaataaacatgagaaattgaaactggagcaatccttgccgtggccatcggtccttcaaccgcggcgtcgaattctgaatccagcccgttgatgatgtacgccaccagctcctcctcatccagcggcttccctgcagccgccatctcgtcggcgagggacctcatcttcgcaatatattcgctgatagacataggtcccttctgtgtggtggttaaggcgaggagtacattgattgtacccgccttcgacttgcacgagaacatgtcatcaatcatgttccatgcctgggccgccgtcctagcgccggccacttgttgcagcacctcccttgatagagaggagaagatgaatccgagcacttgctggtcctgaacaaaccatgtcttgtactcagggttggggatgacaatcttggtcttcttgtccttgtcgccgtcttctttttcaatttcagccgccggagctgcggtcgtgctgacgatgtgctcctccagctgcgcacctcgcaaggtggtgaggatctgtgcagcccagagaggatgattctgtttggttagcttctccgagatttggaggccaaacagagggttggagattgccgccgccatagaagagctcgccatgtcgctgggagaaagtttgcacgacagaactaatctaatctagcgggaggctctgataccatgtggagataactccttcagcgaggagtttacgtgttaattacttgccacaaaaccgggcttaacagaatacaggtatatatagctcggatagagttgttgtgcatctactaaaacataggaaacttatcttatctatctaaacagcccaacaactcttatccttcgctatttgttacattattatatgtgagaaatatctaacactactccacactgtccacaattactgcgaacccgcaacgcaccaaaagcccctacgcgccactcgcagtttagcacgactacgagatgagagcacgtagcatctacgagcacatgccacgcatgcaccacagtccacagtgctatgtactactcccacctcactcacccgacgcacgcagcggcacagagccagccagccacccacaacacacacatcacactggccgtcctcctcaaaagccgcgccctgcctggraagscggagraaaacgtggktccgaargtkgggacgccaacmaccacccagtagaatctagccaattccagttgcaataaagtatgcccctcccgtaccctcctcgtgagctcgcccactgcgtccccaccacccatacacgccgaagccccacgagagggaaagcacgctactgctactcgtcaccgcagcgcacgccactagactagctagagctagctggctacgctactctactctcccctccctctcattagtcaatactgtagctgtagtagtggtagcacccaacacctcgccattaaagaaacttgagctcgccaagtggagaaaggagaggtggaggagaggaggggaggggaggggaggtgagggacggagctggtgggt

SEQ ID NO: 5828 - DNA, 2000 bp, Oryza sativa
  misc_feature (1)...(2000): n = A,T,C or G
ggatggtaacgtgcgtgaggattgcagtgagagatcttaagttcgaatcccacatctaaagatgggcatcccagttgcacaattgggccggacagtgttatttcaattgggcatcccagataggcatctggcgggcctcggaagtagtggattattttactcaaaaatattttagctaatgggtctctttaactaccaccaacgaaaattgttttccgctaaaaaaataatttgcgctagccgttagtggttggcctttttttctaaagttgtgcttgttccagtttacactcgttagacccaagtgagtgtttgtttgacattttgactccaatcggtaatgaaatttgtatgatacagtttgtcctggagatcgaacttgtaccagcaagttgcgataaaaaaaaaaagaaaagaagaaaaactacaccaacgtgtgcagctttcattcatccagcgacggtacggaggaccaccgattgctctctgtcgtcccgtactacgtcatctccagtcatcttctcccacacctgcgccgcgttgatttcggttaacccctttttttaacggccaacttcgatcaggcagtcggagccggattgagttactacatgactttgagctacttatatgtgggacctctttactatgagctccacatattaatgacttaaaattatctgatttaggccttgtttagtttaggggtgaaaagatttagcgtgtcacatcagatacacggatatatatttgaattattaaatgtagtctaatgataaaataaattacagattccgcctgtaaactgcgagacgaatttattaaatctaattaatatgttattagcaaatgtttactgtagcaccacataaccacattatcaaatcaaggtgtaattaggcttaaaagaattacacctaatttgtgtaattagtttttttttctatatttaatactccatatatgtgtcaaaatattcgatatgacggggtgaaaattttttgcgtgaaaactaaacatgggctttaatgtagagtatctcaatccgtcggagctaccgtcgtgctcacccgcgtggccgcaggcccgccccaaaaagatcgtcgtcgccgcccgtcgccgtcacacccctctcaccaccaccaccaccaccacccgagcaataatttctgggggagggccgcggagatgccgtcaccggccggggggcgaggtggccgcaagccgcggncacagawtcccggcgagacgaccgtgagtcgctcgatcgctcacgggctcgcggattgcatatcctcacmtgycgccgctgctgctacgcccgccattctttctgtcgcstactgctctcctctctctctctctcgtctccccggcgcnacctgactgattggattggtatcgatccaagcctatcagcctagctagtgacctgagtactctgctgtctgctgcctgaatctgaatcgatcgatcactcgctcgctgcctgaagagaggttgctgattaatttgtctctctctcgtcttacttccctyttatgtggcttctcgctgagttggaagaagtggtagaccagtagcccagataaggaagtggatagggtaatggaacagtgaagagagagagagagagagagagagagaggggtgttttgattggtgtacattcttctgtcaggttgctgttctttacatttctgaacttgaacagtgaaaaaatggatgggttttttatatagtactccctagatagcaaagaatccttctgtttaggtatctttgcctttctcgtggtgtctagatttgttggagcaagggttggttgcatggttttgtgatgattaatttgttcctttttgggtgatgtgagtgtaatgtatgaattttctgattattattatttttttggtgttgtttgcagcaagaatcgatggttgcacggccaagattgctacaccttcgctgataaatagccgaggacaatctcatcggcatcc

SEQ ID NO: 5829 - DNA, 2000 bp, Oryza sativa
atcgtacagtttcatccttgaaagcaacaagcaggcatacacttctattactgtgtactgcgtaccatgagtacgttctcttgaaaaatagataagttacgagtttgttctgaagtgtcgtacagtataatccttgagaagcaacaagcacccaagcaggcacacactaatattactgcataacatgagtatcttctttggaatagatcaaccaatgagtttgttctttgaagcttcttttcttgtattcttttttgctaggtacatgagagcagtggcagtgctgctagtatctggttttagcataacggattttccttgcatcaatgtcttgttcacttacatgttcaacagattcgtcatcagtggagcaactttcaggatcttcgcgtgcgggaatgatgaatatgtcagattcatcaggtaatctgaagctaactctcctcatgctgttttggctcctaatagagattctatcgatggagaagctgtcccggatgttaggagaattattttcataagaacaatccgggttaattgggcaaacctttggagagtgcctccgaggtgatggggctccaattgcctccccctgaaagctctgaggagaatacaagatgtcttgaagagtgttttgccttatttctgccttgactgttctggtcttgttatgctgctgctcctcttgaaggcatctgggcttcattctgttgaatagtgctttaacatggcaacagctctgtgagcccatcttttccctctcttctttggtgatgaacgatagtgtcatggcaaatgcgcttatatatgtccatgctccgtattgtgttgggcaagtaaaataatctgttttgcatatactaggttgtgtcaaaccttgttcatgtcaaagtaggacgaattatggtgattgaatcaaggaacgtaaaggagagatagaacacttattttggattaggtttggggaagtcattgatgtttccaaactaacttgaaagatactattcatcttgtgatattattgttgtcactagttggggatgtcaaacatgataagcctgcttacacttaggatttggtacagacattagcggagtatatgatgatgaacttactgaatcctgacaaaaaatatgtggatggtactagaatgcaactaggtaactttgtctatactactagtagctatttaggctcggcgcatgctcgagagaaggtgagatcgcgcactagtgcgcggctgcactccaagactagtgatatactatactctactctactcgagtagctagccagcgcagcgcagtggtgcacgcaccatcacggcgcacccgatccacaattaacctacccctcgcgctcgcagccacatatcatgcgcacgcacgcgcaagcgccggctgatccgatccgatccgatcccaccaggcgaccactacctcaatacttccattctaacattttctatatttatattaatgataataaatctaaatagatatatatgtctagattcattaatatcaatataaatatagtaaatgctagaatgacttacgttgtaaaacagaaagagtagtatactccagccaactactaactctaaatcatctatagtctatctaataactaatttatactagttaattacaaatatataatacaccatgataattggtcctacatatcatatatatatatatatatacacacatatatatacacatacattttaaagttcgtgctacagcgatgtatatctataacccgtttttcttctctcctctctcttatctccttcacgtatgtttatactgctcttattacctccggtcaccggcacgtacggacgtgacgacgtcgcacgcgcgcgcttataaatgcagccatacatagtgcgatcgtttcgtggccagagagagagagagggggagagagagagagagcagagcttgaactgaccggccggtgcagtacaaataaaaattatacgagcaatc

SEQ ID NO: 5830 - DNA, 2000 bp, Oryza sativa
  misc_feature (1)...(2000): n = A,T,C or G
caccataatcacatgctttgttttcgggaggcaacgttgggaacctggcctcttgaacgcaacctaagagtacaatcttacatagttttaggccttgttgagatcccaaaaaaatttggcaaaaaacgtgggaaaaaaatcacatgcattgagcattaaatgtgggaaaaaatcaattgaacagtttgcatgtaaattgcaagacgaatctttcgagcctaattacgccatgatttaataatgtgatgctatagtaaatatttgctaatgacggattgattaggcttaataatttcgcatcgtagtttacagacagaatctgtaatttgttttgttattagtctacatttaatacttcaaatgtgtgttcatatacttcaaagtttttacacccaaaaaactaaacacacccttagtctaagataaattttctccgtgtaatgccgccttttcaaaagccttatcttatccgctaaaatttaaattttcaactttaaatttgaagttgattttaagatttttcatcgaagtttttttagtcttcccttttagatcgttatgaacacgtatatataagttttattcataaattatttttcgtttgcccgtttttcttattccacgtaccacgatggagccacgagtgtccagacttgaatgaaataattaccccctccagatccaagcaagttcaagagccattcaatcaaaaaaaaaaaactcaacytaaaaaaacttaacctagcagaggtcatccccttcctggatatatggtagtcagggttgatttttttttcttgagacggagggagcgaagcaaacgaatctccaccgtnccgwtcycaaacagcgtctcataacttcaaggtggtgtttgaaagtcctacaggtagacgaaatgaatcctacccaggaagaaagaaattaaagcggggcccatccagcccgtsccgtggracgtgcgttttcttcttcttgcagcacaagccgcggccgtgaratcttccggcaagcacggggaaggctcgcgcttataaaaagaargaaacagatcttttcggttaaataaattttaatcaagaaaaagagagagaaaggcttctcttcttcttcctcgtattgctgctgctgcttttggtctcctccggtgaaagcgacgggccgtgatggtgcagctgccgtcgcgctcgtggtgaaatcttggacactgccggtaatttcttgtcattttttccccttcttttcctcgagtctgggtggattacgcacgcacacaaaaaaagaaagctggggtttctcttcaatgcgattcgagggcgaatggggatgacgcacgaagcccctgcggcgggcgggcgagacgacgagcgatcgaatatcctcaggttttattttctttccacgccgttcgcttcccgcaatcttgtttcctacgtacgacgatgacgagtccactcggaatatccccggaggaatccatggtggattcaacgaatcatcaaaactaccaaaccgtggagtagtgtgtgtgtgccgtactgttgaagtctggccgtttcgctgggtcgcgatcttgtgcagcacacgccggcccgagagaaggttccgattcccatctctcagccagttttcttggagaagaaacgttgttgtacactttattatgtatggcgtgataaatttggagagttcgtttgctccaaaattcttgggggagggagattggtcaacaccgatgtgcttctagtacttctcttttctcactgggctccattttccaaggaagaaaaatgcgaagccaagtctcgtttcgttcgtgtatcatgtttttttttgggtcgctttctttgtgtgtgtatatatattcctcgtgctgttgttgccatcagatcagttttgtgagattcaaattgacaactctttgaattgatctgcaggttctcgtggtaattctgtagttgtttttttttcgagttcttgtgtggggcgaagcgaagcag

SEQ ID NO: 5831 - DNA, 14 bp, Oryza sativa
aaaaaggggktaaa

SEQ ID NO: 5832 - DNA, 2000 bp, Oryza sativa
agtactctgaggacctaaggtgggagaggcaacaaacaggccactagatgtaaggtcaatgggaagataagggcatggcatttgccgctgcgtactacttatctgtcacagacggtgatccaagggcagccatgatggagtactctgaggacctaaggtgggagcggcaacaaacaggccactagatgtaatcatgtaaggtcaatgggaagataagggcatggcataatgatgcaggttattggaagatcactactacctgtttggccgcttgaacaatatatatgtggtttaccctctgtacatgtaataatgtgaatttgtgaacatatgtaatgtatcatctttttttttctcggtgtgatgaacttgatgaaatccatagcaattgctttctttacatatataagtatgacgaattactcatgttatgatcatggcattttcggctggtgtccatctttatcgtgaaattgtccattgagcttttgttaaacttttcttgtctatgtcctgaaatatgggtttcgccaatatgtaccgtggggcttgagaactctcggcgacttctatgttcgaatagtatttttcatgctaatgaaaaaggcacgtgttacatttgcttcaaagcgttacatggccgttctacttaatcttattatgtgttgccatgttagtggtcaaatctggagaagtcctattaatgattggaaggttcgattttagttcatatttttacaacgaatctttcatgataggtgtacttccttggaagaaatatgctgcatgcgcacagaatcaaagagttgctaaaattggaggtagaaagaacattaaacacgctctactgaagcctatggaaatcggacgcatttaagcgcattcaactcaagtacatgaaaccaaatacaggaatctaattcaaatcagctcgatttcccatataaacggcaaaaataatcctgcctgcaaacgtgtcctaaagatagtcccaatttgcatatgctcctcatttcatttgctcctacctgaatttctgggactgcaattggcaagatccaagatgccggtcacatgatccaaactggagtaaaacatggacacaccttaggcccgtagctcaggtcttcgtcaatgacaattcgaaggcctcttgtttagttgcttggcacgggcatcaaatacgtttcaaactgctaataagttaatacagtcttcgttcagtgcttatccagtatactgtgcagctgaagtggacctgtcagcaagtaaagccaagaggccaatagggaataattaacaccttactgtaaatgacagttgatactaatgtaatgccataacttctataggatcactaagggtgaaacctcataataaaaaggataatgtagaaatatactagtactaggcaggaggccaatgtgtatcacacccatgaaaactgttcgaatatttttggcagcacacctcaagagccaagagttggtaaggttcacatacagatggttcatttcaatgccaatatgaacccagctcatacgactcaaaaatgtcgaacccttgcctggttctatcaacaagggaataagtattaatattttgacaaggctgtgagacaaggatgaccagctcgatctcttagacttcgaatttacaccctaaaaaattttcaagctaaaatgtgatactcttcaaagtttcaaaacaggagaaatatctctacaattctcgactaaaagaaagcaacttacagtgtgttgtccaagtgaatgggctagttgatgccttggggttcggtcttccacttgacatagtatccacttgcatagtcgcattagtagccaatactcatgggcacactgacatcgcgaacctccctctcccccttctataaaaactcagctgcattgctaagttcttccccatccattgcaacggcaacatacacacaccaccaccaacatagcttcttttgtcactgactacagtatcacaga

SEQ ID NO: 5833 - DNA, 2000 bp, Oryza sativa
atagtagatgattccgattttctagtattttccttttaaatagaagttgtttcgatattgggcttttgatattgtagagaatttgtatcgactatcatcccatgtaatcggattaagagatgtaaaacaatcttattatgatttttataacgtgcatgagcgagaaacaatcggagatagaaactgttaaggccctatttggttcaaagtatttttcaaagaaattgtaaaggttccatttccttcaaggaaaaaccgttgtagcagcgtttggattaaggtttcattttcttcgaggataatgtttggtgaagcactagggttatgtgaaaagacaaatgattaaaagtcatggtaattaatatatttttctcaaattcctccatttcaaacacaaatatgcctatattgcctatgttttttcattcctttgttttgcaattatgcattcctaagttctttcctatgcttaattcatgtggtttgtttttcttagtttcatacaggcatgcaagcgatgggcttggtatgtgttttatgatctaacctcaataaagtattgtatggtacttttcaagagataccaccgaaaaaaaaacatggtaataaaaaggtagagaaattctgttatttgtagctgttgaagcaagagtaaggactctgcctataattttttttttggatggtaatccccagctctcagcatcaagcgtagattctcaagcatcggtcttgagttagaatgggtttagtgacgtggcgataatgtgacaccgtatcccagggtgttttccatggatgaaataatttttgaattttccaaattagtaaacagctttaaaaatcatgaattccactatagagtatttctaatatagattagtttgtaggtacaaaataaaacataatttgtctgcaaaatataatttaaatgtactaaaaaccattttcgtgcgaccaatttttttcactacacctaaatttatttaggtttaaatcaaatgtgcaaatgaagtgggaattgttccataatgttttgagtttattactaacttttaaaattcacattattaaacaaactatttaaaaaaaactaagtcgcatattgtgggttttagaacctagatattttgtctacaatagactaggttgtcatctataagatattccactctaaagaataaaactattctaatgccactcaaaaagatgtaatgctgtttttccactttgaaaccttttgtattagttagtatggattcaccatttattgaccattttgcccctgtgcttttaaaaaaaatcccccgtgtgcattccctcttcatctaacagaatatggcaaagctcagaagcttggagtggcaaaaacagaattacaacttttgaaaatagcatgataacaattacattggagtggaactcttgaaaatgataaatgttcaattttctcttagaatgaaggttacttgcataaacaaaatcataaagaaaaaaagagttggatccataatcaacttacctcccaaagggtatgtttcttgtaggaagcaattcccagtcctactttagccacattttttcactagaaccaaacacagttttacgggggatttacaattatgacattgcaattttttacataaacaaccaatacttaaattgaaaagctccacactttgccctgatagcaaagcctgatatatgacacctggaagtacacctgaagcactaaacagcagacaaattatgcccttttttatttgtaatcagaaggataagccttcacatggattttgtatcagcaaatgccaagatctcgctgttccccggtggcatcacgggcagcacgacttgtaaagcaactggacataatgaattctgttttttttttctttctccaagcaccaaatctgcctataaatacacaaaccttagtgagaacagcagcaggagaagagtcagtggagaaagatctactgctgcaacaaagaacagcc

SEQ ID NO: 5834 - DNA, 2000 bp, Oryza sativa
aattactttctttagaagcaagggagttagatctaattgaaaaatcattggaacaaagtttgacattactgtgtttaacttgtggttgacaactgaaggaaatatcagctgttcctttccacggttccacttttcatttcggtaccacgttgcttggtgttctttcatcattttttatcactatcataatttccaaaaataaatatgttcacctgctcggttcacagtactatttacataaattttaccatccttaaaagttattaagagatatcaaactttacactaggaaatatattttcttttgataccttctcaaaactgtaaaatcactttaaaattaaattttagagggagatgcctcatgaattgatacagaggccggatattaaaatgtaatatttcatatctaaaaagatggcattctgagttgtgacctgcattagccgcttacattaagaggaagcttacagatctaatgctccattattatgtcctagatttcttttttttagaactatgtcctagatttccaagcgaccgggtaggtatacacattaaaatgttctgttagatcgaaatttccaactaccataaaaaaagttttcttctcagcagactgtgtagaatattcagatgctcgttccattttagagcggaagattctgtctgcttttcttgactttttgcaataagacatcctcttcagagcaaggtaatcaaggactcaaggtcttcatagcaaggtacaggcagcattgttccaatacttctgtaatcggaactcacaagccaagggcacgtttgatctagattatggaacggattattactacggattatttatttattatattagggtaagttaaatattttgagaaaaaaaaacattgacaaataaccaatgcacgcatgaagcgaataattcaatgagactaagctaagaataacagagccaaggaagagagaactggaattctgcacgtttgagagctcaaaatccatgcccacattgtcaaacatacacctgttccaaagcgcgtacccactgatggcaactgttaaactagctccaattgttttgtagcccatcagctcgtcattgtaaaatcgcagcatattacttacagtttacagcacatatcatctggtgtaggcattaactgcaactcgagtcattttcttcttctcaatcagagtcaactgaccaacacataagcccagaccaaataaagattaagaagtatagacaaagaggaaaaagaaatgattaacatcaccattggcttcggtaatcggtagctcggtcgctgaagttttccccgtacagaccatatgtcccgcgacctcgagtcctcctttccaccgacccttccgaccggttcttccggtgccacgcactcaccgagcagcgcagcaaggtcaagtcaacaatgcaagcgacggaaaagtcccgtattatttttagaaacacaaacacagcacttataacacacactcacctatataaacacagcccccccccctatcagcatatcttgaaattgacgaagttaccacgagcatttcgtcgaggctagggtgacatatcttaagattgatgaagtcaccacgaacgcctcgctgtcgacgagtacgttttctacccactgaaagaataattatatgcgcatatatttatattaacgaattcatcataggtatctcattgagactagaccgacatattttgagattgacaaagttatcatggatgtcttgctgtcgacgggtatatcgtttattactgaaaaaataattagcattcgtgtcaaatttagaacttaatcggatggactagttgaaaaaaaaactatcccgtaaaatttttatccgtatataaagctactgccgcgttggactgcggcggcagcgcacggcgagagccagaaaaatctgcaactgctagtgcgagtgcaagtggtggttgctgagagcctgatattgtgatgcgggtgtag

SEQ ID NO: 5835 - DNA, 2000 bp, Oryza sativa
attgattaggaaactgatactgtgtccggctaggtattactctttgtaacactacccctaaacctatataaggtgagcgggaagctctccaaagacataaccagagatagcaagataagtcacaattagattatcatatcaatatatacacccgacagatacaattccgaaataatagtaaggtattacctcttatcgagagagccctgaatttgtcttaattcttgtctctgcatccatcaatcaacttttagatctcatgtgctattctttttaattattgcccatttccataatcgacactgacattgctatcatgctcatcgcaagctcaaacaatgagatgttttcttaataagtacgcgcgtgattgtgattgttaactttcaagatagacatggtttgacaataacatttctttaccaatgacctgattaattagccattwatggtatggttgttggtagttaaggctataaggaatcaacctttgggcgcaaaagagtataaagtatagttttaatattgtggcaccacaccttccacatattttccttcctttaacttgttctataccaatgataatgacggtaaaaagtttcacctcttcgagaagttattgattttatcaaaccaatagaaaatgtatctattaacctataattaaatctctctacttccactgttaaaaaactcaamctttkgaaacaacctgctgtgcaaagctttatattaatacagaaagggaaaaggtaacactgcaaccctgaaaaactataacaagaaaagaacaaaacaaacacacaacccaagagaaggctctagtatcaaatcgaccgctattgagcatgaccgatcgccgctagaactataggggtcgcacacacccttccaaactcaaattccacataggaggtcgttgacggtctcccgattatcatcacgtataaggattggggagaggttgaggacgagagagaccgctattgagcatgaccgatcgccgctagaactatagggggtcgcacatacctctccaaacgcaaattctacacaggaggtcgttgacggtctcccaatcatatcacgtataagcattggggagagggagaggacgagagagaagaagatccactcgtccctcgagccaacctgacgacaacaaccaaaataaggccaaggaccaagctggaggaagggcggcaatgagcgatgaatacttcataggcaacgtcttcaaggaggtcatgacaccaaatggcaccactgtcgcatgtctagatgaatcgggttttcacccagagagtcttaccatgaagagggggttggtagctccacaacactttaaaggggatttcacaacattcagagatgtcatatttgctggctaaaaaaaaagaaatcaatttttaatttttgtatgtatgaatctatatataaaacaacttggtttattttaggatcgaggagatactatactttgaagatggctctttcgagttcatactatttcgaaatattggattttttttctaaaaaagtataacaaaattctgtaaatattgtaaactcttagcactgtattccggaccaaatataagattttccgtaggttgtaaaaacgggcgagacagcgtcaaaatcagcaaacctggacgtgagtcgtgacagagcmaaaaaacaccatcatcattcgtgtcctttccattctctcctgaaatccatccccggccagacgtaacggtcacgcgctattggcaccccaagaagatgcaaagcagcagcacacacagcaataaagcaacgcgcaaatcggtgtagtcaaaactcatctcctctatataaacccactgaaaaaaaaagtcggcacgttttttcccccaatttcatctcgggccaaaaaaaaaaactccagctcgccatagctcgccataggagaggggatttcgaagctgctcttgcttagctgcggctgcgagtgatacggagtagttccggtg

SEQ ID NO: 5836 - DNA, 2000 bp, Oryza sativa
agcccaatttttcgaaagtgctcattgtggacatctttgtttgtaccgtgtttctaaacaaaattgcaacaaaccttacgggatttgggaggaggtgggttccgtcaaatgtacacgtaccgggttaactgttagtggggattgtctgcaatattgcacttgtagggatccaacatgtcagtggcagctactgtaagtgcagcactgcagataattcacgtccgttatctgcacatcatacatgcaaatgctgttttagaaaagaatagtttttctctgtttatctggaaactgaacaaatttatgcaaattcctatggaatcttgagtgcctgttcactttgatgccatttgtcaacgtttgatgtcgcgattccggtatttgcatggtatggggatcgttggtcctaggatatatgcgagacttaggtaaaagagacggagacaaggatttttatacaggttcgggcccctgaattgttaggtaataatcctacatcctgttggccgaagccggtgttgctctttattcatctagatcacacaagtacaatatttggggtagcctatcaaactgttgtcgacatggcgatctgaagttctgactcatagtcgacaacagggtagccttccttctcgaatccatatccggcgagatcagagacagcgctatatctctcctgacgatattcgtaggcaccgtaggggactagccatgtctatctctgaagtcgatatccggcgtcttgtcttggcgtatgttggcttatatgttgatcttgtgtcttaacctattgttccgtgtcccctctcctcctagggggccttgtatttatacccatagttgtccccttatccgagtagaactagggaaaccaatatggatataatccgagtagtccttgtcgtttttatgtagaaccctattcatcattccytatgcggaactcctcctatatccgaagtttgtttccgtataggacatgatatgtggtaggtcctgtcgagatttagtcaactactattaggtatatggtatccataaccctgacatcatttttaaccatacctttttttttgtaaagttgccaaaattttggctacgtttagtttattgccaattttaataagtacatataaaatcttgccaaaattttggcaactctaccaaaatttgacaatgccaaaacttggtatggtttaaaatggtaacaaagtgaaccatccctgaatatcgtcttaacctcttttaacatttgtttaaagaaataatagtatgacctgcgagtaccgtgacatatatacaaaaatattttctgagcgagaggagatacagggactagtgacaacaactgacaactgacaagtggagcagcactacataaaaagggcaggaggggatgatgcgggcgctacaaagtgcttcacatctttgcctcgttcgtcctccggttttctccgcagtttcttgatccatccgcctttcctctcgcagccgtcggcggggggagtggttagttggttactggttagtactccatcggtaaaaaaatccctccttttcatatctttttttcgcttccaatcttgcgcaattcgggacctttcctgccatttcgttctgtccaaattcagaacattgatacggttgtttggttgttttctcccccttttctgtgtctgtacactgctgttcgtcggttgattcttgtgtgagttgtgaattttggcaattgaagaataagaccttgatgtgtttgcacgcctatgctgttgttatccgtgtccatgcgagtgaaatgatccgctgaatttttgggtagatctgaacttggtaccttgaatccagtagcatttggtgatcggcgcggggattagggtttaccgttcagaggggacgcggatatttaccgttgtgctccaaaatttcactgattgttttgggctcaccaaccttttgctttcttgcaggcttgcagagttttcagagagatttaggca

SEQ ID NO: 5837 - DNA, 1812 bp, Oryza sativa
ctcatttcgctatatactatcctccgtttcatattataagtcgtttggcttttatcttaggtaaatataggttttactaagtttatagaaaaaattagcaacatctacaataccaaattagtttttaaaatttaaaatttaaatatatttatttatattaaaaaatattagtatatttttctataaacgtgattaaatttaaagaaatttgactaagtaaaaggttaaatgacttgtagtatgaaacggtgagagtaatgacttattgagggagtatgtgacttatttggatttcagactcaaaagagtaggtaggaaataaagttacacctgggaaccctttgaaactcatatagataaagatgaagatgaagataaagaatacgtgttttacgcaaaacgatgtggtattaatatatgattaatcgagttttaattattataaacttgaaaaatatatttatatgatattttagagtaattttcatatagaaagttttcgtwcgaaacgtaccgtttagcactttaaaaaacgtgccatgaatatctaatttcatccaacttttattggagaaaagaacggagcccagcagggttcgccctggaaaaaccagaagataaagaataccatctggcttgtgtacaatctactctgtcagcaaagcctatattaaaatagagtattataatgatcttgggactgggagaagtcctattctgatgcaaaattttacctatagaattcgtgcccaataatcctccggccataaaatttgcagacaagtcgtgcttagcttaaattggtcaataatttgggttttacccctaaactgtgccactaacctttacaaagttgaggctttcgttaagttttaccagaaataaacgtgctgtgtgggcggtttgctatcgtgcgcaggtgcgccaggcaggagtcagggccgtgatcacgcagacgtctctatttggggtttttgctacgtgcagccgtgttcccatatctgatacgataagaagtcggattatggtagtataccgtgcatacaccccttgtttttaaaatcctagtaactttaaactctggtaaaaattttattcgaaaaatatgaaaactttcaactaagaattgtaaaaaacaaatgattcaaaatagaaacttaaggtcccacccaaaattttataccttgtcgcatcaaacgtttaaacacctgcatgaagtattaaatatatgctaaaaaaataactaattgcacatattgcgactactttgcgagatgaatcttttaaggctaattgctccatgaattgataatgtggtgctacagtaaacatgtgctaatgatggattaattaggcttaataaatttgacttgacggatactgtaattaatttttttattagtgcacgaacaccccatgcgacactctactttacacctttagatctaaacaccccctttctacatgtgcggaaaaaaaaatacaccccctttctacttgtgcggagaaaaaattcagctcaaactagaaaatttttaactcgataagaaactttcaaccaaaaaccacataaatttgaggtttcaatacaggataaaagtagatttcgggacagtttttgaaaatttaaacagtaaatttgagtgaaatatggggaaagtccgtgggaaagataaaccttaacgttttcatttggggccacgagcacggccaccgcaaccatatcagtatcacattccatcccaaatcgccaaaaaatcccaccaatccactactattccactccacctcgtccagggcaagatccacagg

SEQ ID NO: 5838 - DNA, 955 bp, Oryza sativa
ctccctacagaagctacagaagcatttggtggagcaagtgaccaagaaaccgcgcgcacaaagcaccaggcataaactaaacacaccaacggagtggaaaacgaggacgagtttagtcgggccggatccacacaaaaccccggatccggttacggctacaacgacgtcacggctgatgagacgagaaacaccgcctgcgcggcacaattgactgcgagtctgccactctgcaacctgcacgcggccgatgtaaattcccctggaaaagacaatgtgaaaagcgtcaaactcgcacagactccgtggccactcctccctgttcatttcaccggcgtgttcagtatctgcaccctgcagcaagcagtcaccgccactggatgcgtcgcgatggagcgagcgaacaataatctaaaagccggttttctgctggtgccgtgcgagcgttgaaaggtggggggcgggtggcacacggtgtggcggcgacccggaggaggagcggatcggataagaacgagtaggggctgctacgagacgagacgagcaatatagtctccccgcaaagcatccgggcccctgttggtttaccaccaccacccggtgcggttcggtgatagttgcaaacctttctccggtctacaaagacctcagctttcctacctccacttcttctttcttccacaaagcccattccttttcctcccgttcttctcccctcccttctttttccacccactcgaatcctcccttcacattctagttctagctccgcacctttgctgcgcgcgcggatttggttcagggtttggaaatggcaatagacgatgaatcgccgctcagaatcaataccaccagaggcggcgccatggtaacgtgatttctctttttcttgctggtgttggctcgatcggtttgttcgttgttgcttttttctttcttggctgattgattgatccta

SEQ ID NO: 5839 - DNA, 2000 bp, Oryza sativa
tcacatcaatgtcacgtgggacgaggacctagtcaaaggaagccatgtaggcgccacgtcatccaaaaccaggcacaatactaatgagggacctcttctgcacggttttgtaagttgaaggatgcattgtatccggttttctggacggtggatgaaaatcagattgggcgacaaattaagggatctaaagtgaacttattccaaaaaaaatagacaggcccataagcaactcctatataaacgaaacgtttatatatagacgggcccataaacatttacaaaaatgcataggttgcagggagatttttcgtgcacgcgaaacgagaaaactcattagcatatgattaattaaatattgactattttaaacttgaaaaatagattaatttgatttttttaaacaactcctatatagattttctttaaaaaattaccatttaacagtttgaaaaaaaaataagctagttcaaagtttagagttgaagaaaagaaatgacccatacaactgatgatgcttcattgtttggatgcaatctcctgtgctgcaaacaacaaactaaatattgatcttgtcatggactgatagatccatggcagtagtgtagaaggctggactactggaacacttctgaagtctgaacccgggtttgtgctcatctttctactgttctgcacagagaatttcactggaaataagcaaagtagtaactgaagcctgaagcttcctacctgagggactacaagaacagaacagcatatgctcctttgacaaacgaaacaagattaacaacagaactgccctttgtctaccaaaccctaaagcgagactaatctttttatgttaggtacgtgatcaccattcaccaaccggattagagattgacctccgggaattgatagctagcttgttccttaatcttttggacctcctgtagatgaatcctgcacacaaccaccaaaacttccatttgccttcgggacagggtccggaccatctcgttgcattatctggaaaattttctggttgcaagtcgctcttgcacataaatgactcgagaactactggatcagcaagtaagattgctttcaccgataaccagaaatcaattgcttcaccggtaaccagaagccgttgcaatctctcatcaaatctcttggcaaaatcctcgctttgacccatatgacagtacgagatggctagtcaccaaacatatattgctatttagttcaggcgtccagctgctacggctatagatcacctgttactctgcccccaaagttgatgatcggatcaccaattattcgcgtggctttttcatggcggctaagatttgcaaattgctgattctaatcagggattaagcaagcatagaaatactctgcttactatttttataaggggaaaatgtccttatggggtctaaaaggaagacaatgttggtagaacaaattaatggccagtctggtgacattgccaagctaccagttgaattaatgtgttcctcatctttctctgcttcgttgcaagaatatcatgcgacgtgtgtgcatcatgattcatgagaaagatgttgcagctgaaaaggcatcaaagcagcaagcttcagccgcaaactaactagagctttatgaccatgaagaaactgttcttttccaaaaggtatttggcaaaaagaatatgaaccgaacagctagagtagagtcatttctaaggcaatttctgtctactattgagactttgggagaagtacctgttgaaagcaatgcgttttgcaaggcatggaccggttcctgctcccaaccaactccaacgaaagccacttcaccaactctctcagctgaagagctgctgcgacgttgtactcactcatctcgtcacctcgtcagtttcatgcatataagggccctagcttgcaatcctctctgcattgcatctcaacagagcaacacaaactcacacattgccaattccctttcttggtttgattctggctgctgca

SEQ ID NO: 5840 - DNA, 2000 bp, Oryza sativa
aacagcttttcttttttcttttccttgtagaacagtacattttcttaatatctcataatcatgtgtgtatattacctatacgtcaatattagatgactgacatctcaaatttctaaaatattacttaatatactttcaagacaagatagtttgttgctcattttgctaagatctagttttaatttttctaattgttgcctagttatctattttagcttggatgatattatcaccgcttaagatcggtttgctccgcattcttagcgctaaattgaaataaacaaactatagcaatatacctattgttcttttgtgttataatgttctttttacattgatactatgtattattacctacgaaaaacacttaaaatctgcacataattttaagctatcgttgtttaattataatcgtgataacttgttaataagttgatcccctcatattaaaatcgtggcttcgccactgagtagtacacagctagcctacagtgacagtcagtggtcactgagattagtcatgaccgtcttcaaacaagtatgggccagcattcagttcattcgcatgtgacacaagttatagctcctccaaatatcaaccctccgtaaaaaaaaaccaacctaaatgagaatgtcgtacacaacgtagtacagcgggcggtgagcacgttctgaagaaagatcgttttttagcaaatgatacgtgatcgtgagaggctgagaggtgcagtgagccagtgacagcctgcacggttttctcgcgaggtacgagtctactcctacatgcacattgcacaatcagtggtcacaatgcaaggtccagcattcagttcactcgcatgtactcccttcgtatgtaaatatttatttgacgccgttgactttttaaaatatgtttaaccgttcatcttattcagaaaatttaagtaattattaattcttttcctatcatttgattcatgagaaaatcccctatgtacccataaaagttcacctaatcccttctatactcctgaattttgctcaatcccttatatacccctgaattttagtttggatccttccatgtcctttccgctagttgaccgttagttgactgttaaattctttttaaaaagtccattctgccctttgctatgaagaaacataataaattaatgaagtatattgttggaatgtaaaaatttattggatgagactattatatttatgagtatgtgatgcaccatattatttgtgacaaatttacttttacatatgatataaaaagttaatacttatttattagttattaaaagtacttttatgtagcatatgtgttttcatagtaatacaacatatttatttattactatcagaacacatatgctaaaaaattttttaataactaataaataagtattatttttttatatcatatctaaaaatatatttgtcgcaaataatatggtgcataactatctcataaacataatagtctcatataacaaatttctatgcttcaacaatatactctattaatttatatgcttctttatatcaaagggcaaaatagacttttttataagaatttaacggtcaactaacggtcaactaacggaaagggcatggaagggatccaaactaaaattcagagatatgtaagagattgagcaaaattcaggggtacagaagggattaggtgaactttcaatggtacacagaggattttctcttgattcattgttaaatatacttatatgtatacatatagttttacatatttcacaaaagtttttgaataagacgaacgttaaatatgtgttaaaaagttaacggtatcaactatttagaaacaaagggagtgtgtgcttggctgtgagatctcgccctataaatacccaccccccactgcacagggagagagcaaaccacgagcaacgaactcacctgcaaattaagccaggtaataaaacttgccgtgaaaattaagctgaaaattagctgatcgatcgatcgcc

SEQ ID NO: 5841 - DNA, 2000 bp, Oryza sativa
ttaggagggaggggattgatctaaatgcgcatcggtataatctgatactctcacgcactgaacgaacgactcacagacggctggtgattgctttgagatctgtgctctcgccacgtgtcaatcactgggcacagaggtgtccttccgatggcagaaaagaccagatcctatgattttttcgagtaaagtccatcggtccctaaacttgtactgctgtgtcatcccggtccctaaacttgcaaatcgaccgttcaggtcctcaaacttgttcgactgtgtcatcccagtctctaaacttgcagatcactcgtttaggtcctccaacttgttcagttgtgtcacctcggtccctaaacatgacggtctaaaaactttatatcaaaaaataattcataacttttcatgtgaactctaatgatgacaaactttatatcaaaattgtagccctcgacgcgacctacaactttgtagttgaaaagtttttgaattaaaactgtttagggttcccaaaatattgttgcatgtttatagattttgaaattttaattttaaaattacatttttaggacaaaaaatgacttaaaataaaaaaaattaaactacaaagttgtagatcgcgtcgagggctacaagtttgatataaagtttgtcttcattagagctcacataaaaaagttatcaattatttttaaatataaagtctttagactgtcctatttgacccagatgatattcaaatccaagtttagaccggagtgacacaactgaaaaagttggaggacctaaacgagtgatctataagtttagagaccgggatgacacatgccgaacaagtttaaggatctgaacagtcgatttgtaagtttatggacccgagatgacacagcgatagaagtttagagactggtgatggactttactcttttcttctccaacactgtcccttcccgtctttctcctccttctcccctcactcgtagtctcgtcttcgtctactccaccaccaccatctcctctccctytcgtcttccctggcgcgcgcggccggcgagccggcgagcggcgtcgcggcggtgaacttcctcgtcctcgtccccttcccgactccccgccccccacctagcctcctcccaagtgaggactcctcgcgctcgcgcgcgcgcggccggcgaggggcgacgcagccggggcctccgtcctctcggcagcacgaattgaattggaggtaggtaggtatgtattccgttcttcgctcgtagcgccttcttcgcaccactcgatttcgcctgcgtagagtggagatccgtccggaatttgattggtttcacccccaattagcaccccccgtgtgccccccacgtgaggtggatatactgtactagttgactgctactaggatggacttgctttgaattttcgttgtaaaaatgtaaaatatacatgtataatccgtttactttctatgatggtttatcttcatatcttggctacgctacaaaatgatacatcaaatatggtattgaactagttttgttgtcggcagaatcgattgtactagttataggcggactttgaaacacacatagtatatattggcatggtcgcaaacaaaccaaaccttttcttcgctgatttttgctgcaccctgatatgctttatttgttgttgcatatacactggtgcttttgcaaagtttgggtctagtgctatttctgctgaaaatgctctttaatctttggatgtgtagcagcgtaaaactctggtttttcttgtatgcaggggctttcaagttattgtttaagcatttttttgttgtaatttctgacatataaacttgtcggtatgctagaaagaactttggaactaactttagattgcccgtacaatcatatgcaaagtagatgaatgccgcttcattcaagtgtattctagagggttgttagtgcgcactaggcttcttttcctactgacatattctgttgtcaggcacatttgtaaaa

SEQ ID NO: 5842 - DNA, 2000 bp, Oryza sativa
cggtctgaccgtcgaagtcgcctgtcgccgccgccggtttgaccgccggtagatcgccggttagaccgccgaaacccggtaaacacaaatcgaagaactcttaaagtggatgacgactttattgattctctttgtgtttacaaagtgcaccaatagcactccttgcaaaaatttcgactaaactcgaaaccctaactcaaaactcaactcaattgctctctaaagcgataccgggaaacctcacgctccccctctatttatacatgaggtaggcagcccaaagccacgaaccaaactcatactaggagtcctaaacaccttaggaaacctactagtacaagaaagaatctttacataaccaatcgtatcaaatttgaattccttccaaatttaactccgcatcccatacgcacacaataactccatcgtatgccttatggaatctccatcaaccacgtgcatcaactctagcctaagtatcccgcatgatctctgaccaccacggacatcgtcttatccccaagccgactcccggtccatcaccgcaaatactctctcgagacatcgagtcacctacacatggaacaaacmaagaaaccatattccgagaccaagctatctccaacttgactcattagcagcaaacaatagtattacatacgtataggattcatcttgaagtcataatcacgaaataaactcggatatccaataacaaccccgaaaccgaaaccgacacagtgtcgaccggttagactgcgggctggccggtctgaacgcgcgcataccaccggtctgaacagctaccagagcccggtctgacgtccgaacagtccacataaaatgataacctgtagattcacctgtgaaatccgatcatctccaaaaccacttcgtaaataaattccaaataacaagaccgataatctccaatgcccaattgttcatcacagaataataatcaaaaacacctttgattttacactaacatatacggaaatcttgaatagaattatgaaaatggcctaaataacttcgttgccctatatttatggaaataatgagtcgataatgtacactctttgattaaaaaaactcgttttagaattctgtagtcaatctgagttaattttgatcataattattgttttgactatagcgtttggatataggtaaattacatggaatacatagccmagtttgatactgtatagraaagcytctataatactcttatatacttttcgactatttaaagatatgtaaatattatgtatcaaattatgcctattgccttgaaaattcaacaatattcctttgtgactagatcaagccgtagtgtttatttggcaagaaaaaagtaaatataaaaagtcacctaggagttttaaaaaagcttttaaatttttggcaggtaacttaatattttaaagatttgagaagacagatataacttatgttttgaatcgctggtatatcatactgttatgtatacacagattactcaaaattgttgtactgtcaaaaaaaaaaacaacaaaagatatcacctcacataaacacactggatcgctgtttcctccacgtggtgcattgtccttggctaatcacggtcaaactgcttcggtcaaacttcacgtccacgtaaaggaaccgtaaacatcagcccgttcgttcggccgaggcgcaccaccggccgggccggcctgctaatcctcgccgtcgaatcgcccccccacgcggcaccaggtaacccttccccgccgtccgatcgatccagccgtctccctcactcgcttttgactcgaaccagtccgctctctgaccggtgcgcgtcgcgtcgcgtcgcgcccctacaaacccgccctctcccgccgttctacgtttccccccattccgtttcacgcgcgagcgcgctacgatacacgacgcgtacgtacgtccagttcttggctaagcttcaattttgctttgcttgcttctcgccgcgatcgcgcgcc

SEQ ID NO: 5843 - DNA, 2000 bp, Oryza sativa
aaatacaccgttaacatttgggaaacgtgcgagtttctctctctttttcttgctgccagaaatacatgcatacttgcatgcacaattttgtgagtgttaaaaattaaagctgtggatacatcataaaatcactaaaatacaaattactagcccccttgaatcgcaggattaaaataaatggatgaataaaaaaatcacaggattctgataggaatgtaagtgtagaaatgagtattgcaaaacataaaaaaacataggaatggccgtttgattggactgcaagaaaaacacaagaatcagatgagagagatagactcaaagaaaatttttcaagaggttagagtggatgttaaattttctacatttttcctttagaattgcaagaatagaaaagttttctacgtttttccttttctcattcctacaaatcaaaggtatgaataaattgtataggatttcaatttctttgtttttcctccaattcaaagggggataaatagctttcgtataccctaccaggcagcgaaccgaatatagttttttttttattaaaacttagtgcccgcggttgtggtccactatcagctttgttagcccgttattacgcttagatggtgtttttcatgtatggatagtgtagtcaacgttatacactccctccgtttcacaatataaaattttctactattgcccacattcatatagatgcatatagttttattaacatctatataaatgtggacaatgttagaaagtcttacattataaaacggagggagtatcttctttatgtcttacttgcttatactccctccgcccatgatatatcacatccaaccaaaatcccctatatttaaagattgagggagttactacttttaaaatcttatgctatatacatactccctccattctataatatatataaggcacaaccactttgatccaaactatatgatgataataattatttcttagtctttgggttaagggtggttgtgccttatattttggaacggagggagttctaattaagtacgttgtttaaacttgtaaatttaaagtatggttttatgttattattgatatatgaagtacatttatggttataatttaaattccgctactgacattactaattcactatcaaacccgctgtctcctagagttttaggcgtgctttgaaactggaaaccaaatcaccccaagtagttacatccgtgataagttgtcagacgtggcaaaactatctttattcttatccgagacacgaagggatggggatcagggatggtccctctcccagaaatgtactgctccctcccaaaatgtagctatttttagcacagtgccttatttcaaaatgaaactatttcttcacatacctcctcctctcaaccaatcataatcattcttcttcacctactttctctttttaaccaatcacacacttccttccatcattgtcacctacttttttaatacccatgccaaacttaaaaatggcttcattttgggaccgaggaagtactagtccgatgtactatcaaccatctgatgacgtttttgactcatcggaaatggctactgcaccgtttcttgggagtatttccatctgcagcagagcagagcagtgcagtgataatccgatgtttgttaatttgatgcggtttagctggcagctgaagctcctcccaaattgcccaccaaccgtcgccattaaacaaaatcaatttctataacttgtcgaggaaatcgatcgttccttccttccttcattaggttaatcaattatcacatgctgagatttcgcaaatcacgcttcccaaatcaaaacacaataaaaaaaaaacataatttgaggaatactccaagtccaaatataaaagcagcagcagatcagagcagagcagctatcaaaatccaagatcgccaagtccaacaaaaagaagagaaagaggcgtcatcaactttagtagaatctccagttccaattttcc

SEQ ID NO: 5844 - DNA, 2000 bp, Oryza sativa
acttccccgcggtgtaggagagcagcttgagcaccgcggtggcctccctcccgtccgctgcacctcgcacagttcaatcgcgggcaaagcgaaggcacgggggaagagggagaggaggggagggggccctaaccggtgggggatgaggggacgacgtagtcgcggaggaggttggggaggacctcgcggagcttgacctcgaagtggacggatgccggggscgragktgraggtggtggtggaggacgccgcgatgagctcgcggagctcctggatgtggctggaaaagttggccatcgccggcgatccccgccgcytccgccgccggagcgggagcaccgccgccgcctcctttccctccttaatttcgaacggaaaaaattccagactccatccacccacaccgtctgtgttcgtgggtaggaaaggaaaggaaacgcctgtgggcttagttgggcttcaaagcaggcccatttaagaacttccactacgacgatcaatcacggccctatatacctgatctgaagctcgagttgggcctaaatccacaattcacaagcctctcctgtttttctctacccccttctctttttatttgaattttttttatttatacatttttttattaaaatatttacaaaaataattttttgtttcgaaaatttacaaatctaatcgcctgtcgccttctatatgagcgatttttaaaaatcgccctcccaaagggcggcaagggacctaaatgcaaaatttttatttgggttcaaaccctttccaccggttttaattgcttaaaaactaataatgcttattcgatacttcaaatgattttaaatggaaaagtgataaactacaaagttatatatctcatcaagatctacaacttttatataaagtttatctccatccaatgtcgttttagatgtagatctgagattttttaaaatgtgttttatattttgtaacgaatatttgaatatctaaaacatcttaaatgaaaaagttgttaactacaaagttgtagatctccttgagctctactattttgatataaatttttatttcatctgactttatataatataattttaaattgtaaaataatagagctaacaagttgtgctggaaaatttgcatttaggtcccaaagggcggcaggcgattagatttgtaaatttttgaaacmaaaaattatttttgtaaatattttaataaaaaaatgtataaataaaaaaattctttttattatagggaaaaagttaggttaaggatgggattaggactattgattatggtgtcatgtctagctgatggatgactaatttagtttaattaagtccaaatgtccttgacgttttagtttaagataaaaaaaaaatcgatagtatcctgcaaagccagcgaatcaggggagcacattggttcataaaccgtggctatctcgcgtcagcgtgcatgcttaatcagattatgggtgtaggaaaatgctgacttggtgttcttcttatccgataaacgacgaggcaaatccaacaaagataatcgatgtttcagtttcagcaaaaataaaaatgaagaaaagaacaacaaagagccgagtaaaagttgaatttatgggcagatggctgacagtgatagaacaaatcgaagtcaaccttgatttgccgattaaatcgtacacatattcgaatgtcaaactcgtcatcggtggacaaattggccattctctgtcacagcttttctttttaaacatattttttgttcgtaacattagtaaacgctcctttcgaaacggatatccattggattttggcgagaaacggccacaacatagcatacaagaaactaagaaatttcatattaaattcattgaattacataggagtcaaaagaattatgaagagttgcgcctttgctgtttgataaaacgggagacaaacccaaagcacagcgttgcagcgtttgcagtcgttgtgcgcatttcgtcgaacaggtcggcg

SEQ ID NO: 5845 - DNA, 2000 bp, Oryza sativa
aaaacaacatagctggctgcttgagataaagaaaagggaagattctttctgtcctgggatacaaacattagttgccgcccctcgatgattgatgcaaagctttctccaggtaagaagtgatccactgactttcctgaaaaataaaggtgaaacatggtatgtactttagcctggcacagcatttgaagataagaggtacagaagcttataaacatgcagatatactataaatctaaggatagatgcaagcaaactgggttttaatgagaatcacaaaaaaaaagagagaacttcaccaacagtgcgctttccctgcatggaatactcatgacgcagaggttgctgagggaaaaaaaagctcatagtagcagcgatggactagctgctgcaggtcgcattcaataatcacacgagaaacaacattaatccttttccaaattatgtaactttgacaaaacatcctttacttttaactggcttgtgcaaaaagtaacatacctgatatgtagaggaagggtgagctatcaagagttccctctaacaaaaaggctgcggtaattaagtcacagtaatctattatataattaaaggaatagaaaaaggagcctccacgttcgctctcatggcctaaaaattctcacattaatcggagaaaaagaaaaagcagagtccatatagaaatacaatttagaaatagcttaaattcggaattaaaaaataaggaatattagaagaggagaccggagtccatatagaaatacaattaggaaatagctgaaattcggaattaaaaaataaggaatattagaagaggagaccggagtccatatagaaatacaattaggaaataactgaaattcggaattaaaaataaggaatattagaagtagagtatagagtccatgtagaaatacaattaggaaataactgaaattcggaattaaaaataaggaatattagaagtagagtatagagtctatatagaaacttaaaactaactaaaatttggaataaacataataaaattaaaagtagagtttagagtccgtataaaaatacaatttacaaatagttaaaattcgaaattaagaaaaaatgggaagaagagtttaatgctaatataggaattcgaaattaaaaattaaataatattgaaagatgagtttagagtccacatagaaatataattagaaataataaaatttcagaaataaaaataaataatattagaagaagaacatatagtctatatagaaatacaatttacagaaaaaagaaatattaaaaaacgagtctagagtccatataggaatatatataatttacaaataactaaaattttatcttaaaaataattaataactaacacgtatataaaatgcaatatgaatattacacattagtagttttgtaaagttattgcaaaatttaaaattatgttgttattttaatatatttgaataatataatgagaaaacatatatgctattatatgagagaaaatataatgatgctagccgcgcaatctgcgcgggccatcatgctagttagaatgtaaagagacaagtggaggttacaaccccaccgacgttttgtaacgggacaaagattcttagggggatgataagacaggagcccacgcacggcacacgcttaagagaacaaaggggaagaaagcttcccacaaaccaccagctttaaaagaaggggcaaatggggagggaggcctgcaaagaaaaggagaagagtgccctctaacctacctatgccttcctccaaaatcctgatatcttgagccacttgttgctgccactctgccataagcttccatcctatcaagcaccaatatatgagccactatagactgtacactcgcagcaatcccactcttgagcactgaatcaccaagaggattacctgtgtaggtgttgtgtgctgtggaagtttcttgggagggcaagctgtgcagattgcatagcttcagtttctgcattgattca

SEQ ID NO: 5846 - DNA, 2000 bp, Oryza sativa
gttcaggccccttggtaggtactagccttaatccagttggtatgggattatatgatgggaaccacatattacaaagggaatagcagaactcaatgatactgatgagaccgtagtcgagttggtccaactaaatctcccggcgacttggctcctgcaagctccggctccgtaggctgtagtggatatgttagcggtgatatttgatgccttaagtcctgcccagggggtcccttatataccgcgggtcagttgatctccaagtaggactcagagatatcagacccctcacaatatggtaaagacccaacattgtccgagtagaactctctctatccgtagataccatctctatcacgtgatagatttccttaatgtatatggaaactatccgtatacgtgagggtatatcgtgtcggtatacaacgtacatctaagaataaagggtataccttatccgtaaccctgacacatagttaaagtatttttaacttttaatagtaaagcaagtcacaaacaaaataaataataattccaaatttttttaataggacgaatgatcaaaaattacaaacaaaaactcaaaacgacaagaaacatgggacggatgtagtatgtgatatatcattgcataaacatgtaagttcaaatttaacttgcataggtagaaaaaaatgactattaatttttttttatgtcgtgtaagtcccgtttgaatttgtatgtgtggattgctacatctaatattaatctatcctataaaaatatcagattttttatgactttttgggtgacatgtaaaactaggagacgttacttcgagagataaatagactctctcacatattggacacgcttgaagtacttttagtaaataatacacaagtaaataagtatatattattagtcacagttaaaggaaaaaaagtcaattgtatttatatattagaaaacagatgtagtatttttatatctatcacatactttaacatagagaacacgcaaataattaagcttatcttatcttattttagtactatagcttataagttacgtgtatgatgacgacagaaaacgtaaaccattttttcattagaaaaagaacaaacatataaccttttatctttcctaccaggattagacattcatgttaatttgctctccccggtaacacttcattcttgaagatgctgttaactggtactccgtttcatattattataagccgtttgatttttttctaatcaaacttctttaaatttaattaaatttatagaaaaatataatagtatttttgaaaaaaaaatatatttaatgaaactaattcaatcgatcttttatatgttgccaaattttttctataaatttagttaaacctaaaaaaattttaaaaaaaaggctaaacaacttataatactaaacataaggagtaaatgaataccatgctactagctagctagctcgatagcagcttcctgcggcttctgctgtccatttcgatccgggcaaagcaaaagagatggtagtagcagtggacatcagcacggtgttgtggttgaatggtcagaaaagcggtaatgttggcatgcatcagcaagaattgttttcttgtagacttgcgtgtatgtgtacccctgccgataaccaacaccggccaggggtgataatgaggcaacttgatcataaagcgatcgagagcgtactctacaatatataggagtatacgccctgcatgcgcccgtataccgtatgccgcgcgcccactgtataaataggccgcatgttccagccgccacatgcacaattgcacgcctgagactagcatatccatgtccgattggccgccgccactgctgcatgctgcctagctatagtagacctgctacctgcagatcacaatagcaccggaaactgtgagctcggtaagtcggtatatacgtatataagccaattaaccaatcggcgtcgtcaggcctctcgcgtgtgcgagcggttgcgtccgc

SEQ ID NO: 5847 - DNA, 1212 bp, Oryza sativa
aaaarraaagaaaagaagctgtttttggggagtcgtgctttggagagctgaaaaagaaggtgagtaaaaaggttttttgatctttggttggttactgcttctcccgtgatctcctcctccttcttctccagtgcggctgctctgggctcgagggcatcgtgaatctacaacgtcaatcgcattgtcttgattaattcctatgggagttcttggggatttgtcgaggggacgagattttttacccctaggcgatgcgattttggttgcgatttgttcttctcgtttggatcactggtccctgaatattttctttcctttcctcggtgaatgaatggtgttgactgttgaggtagctggttgatgaacactcatgsawacagtttttttttttttttttggkcycyctcttyttctgctgacttattaagaagaaacattgcaatcttagactttattaccattttctctcttcttctgctgacttatttaagtttcttgattttttctttcggtgatatagtgatgtttgtgctgggtatagtgaaatttctgtggttatcttgagcttctatagccacccgaaacactagtactaatcttgtgcagtacaagtccctatctagtccatgttcttcacttatttgctctgactagtttgctttgctgcaggtttaagctgtctgattcaacggacggtgcaacagagattggacagatgggttccctcataagttagttgttttctcacaattctctcgtgcttgacagttgcatcattgattcatcattgagcccttttcacttttggactgtcacatttttttttgagctttcctattaagggtgtgtttagatcccaaaaattttggccaaaaatatcacatcaaatgtgtcgtttggacacatgtatagagcattaaaggtggacgaaaaaaaaactaattgcacaatttgcatgtaaattgcgagacgaatattttaagcttaattgtgccatggtttgacaatgtgattctacagtaaatatttgctaatgacgaattaattaggcttaataaattcgtctcacagtttacatgcggaatctgtaatttgttttgtttaatacttcaaatgtgtgtccgtatgcttcaaaaataatttggccaaagaactaaacaccgcctaacattgatttttttggggggtaatgatttttcaggttcttgggcg

SEQ ID NO: 5848 - DNA, 2000 bp, Oryza sativa
tgatcgtgaggaggaatgtggggtaagaaactgctcacgatacccaaaatggtgtagtttaactaatgttgtgcctgttcttttctttatatggtgttacatgagtttccttgttttcgtttcaaataagtaaagatgcaaatatgcaacaaagaggaaagatgacccccacgctatattgtttaatatttgtgttcttggtattgcttgttttctcaagtacacttaaaattattttttccattttgattcagatggttttatgaacttatgtactaactgtcttcgctgctatatcatggtgttaactcctcactgtgcattaacaggtgtgcaagcgcaaaatattgactgctggaggactgcaccaggtaggaagaagctacacatctaccggacacatggcccccttttatgtgtttccttgtggacatgcctttcatgcgaattgtttgatcgcacatgtaactcgttgtaatagcagccaaacacaagtaagtccctatgcaacatttcaattgttcatttccttattttgatagttcaatctcttgtaccaattagttacggatgaattcatttacctgtaggctgaaaaaatactggacctccaaaagcggcttagcctaatggacaggaaagcagcaaaggaaaatggcggaaacatgaatggtgaatctattatcagtgcgacaccaattgacaaggtttggtcacatccaaactacgaaatcccgagatctgcatttcttgtactaatgccatgcatgtttcttgtgacagttgaggtcccagctggatgatgctgtagcgagcgagtgccccttctgcggcgatctgatgatcaaggagatttcattgcctttcattctccctgaagagtctgatgaaaaggcttcgtgggaaattaaaccgcaaccaacgggtcagaaaattcttccaatgaccatgtctatatgattctactagtaaaagctgagatggaatagaatgtttttcgagtttgtatgtgattttgtaatgctgaatatatgctctttcatgtccaatttctggttgggtggctttggtttttgataattgcccagctcgtgtatctttctgacgagcagaacattagctatcctatccagaatagtttgtgtacagaaacatcatcttccacttcacttgggctcttgtacatgcctcctttcatcaactttgctcataataaagttgcgatttgttagggcatataggcgctgaattatgtttcctcaatatctgaaataagatttgataacttcagaaaacaaaaacagaaaagcatttttgtgatgtaaacctgcaagaaacaatcgcaaaatggggcactatttgtcacttgattttttttaattacttaaaattaaaaagcacagacgtcctcgttggaaaaaaaaaaaccttcactccggtgctttttactggaagtagaaaataatctaaaccgttgatctcaatggatccaagggtttagatctatttctactaccatctcatataacggtagtagaatcgtggaagggtaatattgtctaggaaaaaatatttgtggaraggtataattgtaattatgcagtaattgtggaaaggccaagaaagaaatagtaatagtaaagtctaaaatggattgaaaggatagactggcattacaattaatcaatcttaacccacagcatcacatgggtagggggtaaaagatgggtaaataaaccaactgtaagaacaaaccaagagagaactgtctctgaacaaatgctcctaaatttagcaacttgtcaggacacaaactacaagaacagaaatagaaagaacagtctcatccatcagtgcagccattggacagcattgcgacgctgctttctctgcccataaaaggaattgaaccccacaccccccctcctactcttcctcctcctccctcctcgccggagcttggctgagcttgagctgagctgagctgatcggcggcggca

SEQ ID NO: 5849 - DNA, 2000 bp, Oryza sativa
actttcagacctggccgtggagtcttttggtggttgaagagatttgtttgtccgcgttggtggtccagtttgtccgtagtcagggctcttgggcctcgccggtgcttcatgcgccctgtggctgtgtaaacctgtagttgtgccgagtgtggagcggtgtgcttatcctctactccctctgtcccataaaaaaccaatctagtactggatgtgacacattctactacatgtccagattcgttgtactagctagaatatgtcacatccagtactagattcacttttttttaggacggagggagtacggtgttagagttttagtgttaaggtggagtcggagctgctgcatcatatcgggttcagccaataagctgggcaacgataacactcaccactcttgctctagcttcttggagatcctgcacttctcaagggagtcttgggtgaaagctctgcctggtcttccaggatcggtgacatcgacgcctgtgggtgccgtttcctccttggagatgttaccttgtggactctctccctttcgggtgaaaaaccagtccagtttttgggcggacgtcggcagcgacctctgtcgttgttcacctccttggaggcttcgccttgaaggttttactcttccctcaatcatttctgtgggactagtcattttgtcacaggctttttatgtcttgtgtatagttttgccggtttcctttagcaaactgtgcagttgtatggttttcagacccagttttccttataaaaggatcaactctcttcttctaatatatccgataaaactcttaccgtcaactgtttcaaaagattaggaaaatatcgatgcaatttaaccaatcgaagaacaagcctatctggtacgtaaaaaaagagaccaccttgtcgtcgacaccaacgggacctcgtacgtcgtgggccagctcgccgtccgttgtggcagagagagatgctcgagtccctactgttcacgggggtkacgaggttgccgtccagacgacggcagtactgtccttgacagcggtgaaccatacggagaaggagaagacattgttgccgtcgtcgcccacctgagtgaagccgcagctgtaggagaaagtgccgtacgagagtaccggagcgttgcccttaaatttaggggttgtttagatggtgctaaaaccttttcagtctccgttacattgtatgtttggacgctaatttgaagtattaatcgtagactaataaaaaaaactaatttcatatataataactaatctgcgtgacaaattttttaagtctaattaatccataattattaaaagtttactgtagcatcatattgtcaatcatagcataattagactcaaaagattcgtctcgtgagttagttaggaaatgagttttataattagtctatatttaatactctaaattagtgtctaaacatcctatgtaacaggcaaacaaccccttattcctcatgttcttatagtatactgtacacctggatctctcaatcgatcccctttaccagtacactaaacattgatctcgccttaattaattaatttcttgatctcaagaggacaacagaccccctggcaaggacagatcgaaaaacatcgctcgccgaaccattcaattctcactgaaaaagcttaattaggagtagtagctagcgtgtgaggaagattcataaccatatatcatcttaattattagccttttctgatttagcttattcacttaactcttcattactaagctagctacacgaggcgtagctagctagtacaggccccagcgagcataaatagcagcgtcccctgcttcctttcctcgtcgtcctcagctctcatctgcatgcagttcacttcacacacaacacggcttagcttgctcagcttcactgatcttcttagctatagctacttcactgtgcgtgctagctagctagctgctttgcataggttgatcgaactaattaactcaccaaattagctata

SEQ ID NO: 5850 - DNA, 2000 bp, Oryza sativa
tcatccattatgtgtttggtgtatggaggtgaaaaaacagtactctatcagagtaaacatcattttttatgtcctctaaaccaagcactccacaagctaaatttggtggttctctctcctctcgtcattctctagctacccaactgtctggactaacggtagagggagtgtataccagaactcacggtggagatcgcgggagtaaaggcgggaggcgaaagatttggcagggtcgcaggagattgccaaagtgctgcaccgccctcaacccacaacactcgtgccttctccgtcctcgctgctggttttctttaggcaaatgatgaggcccataacaactagattcatcttgtttttttaaaaaaaataaatgtcctccattcgtccgcactgtacttaactccataatatattatatgcaactaaaaactaacgattttaggacgaaggaagtacgtagtagtaataaaaggaagcacgtaattaaaggatcaacatatttattacttagagcttgaatagatgcaagactgcaactctgcttgctcagcacatatgttgaagcgactttgctgaattgcttgctggttgctgttgaagtgagttgaaataaggagtatcaaccaattgcattaggcaactaaatcggagccgtctaaatatttatggacaaaatttcttcaaaaaatttaacatatacaaatatagtataataatagtgtatttacattttcactcttaataaactttggccggcccggaaaaaaaagtgtacttacattataatttgaatataacaacaaaatatatgtaactttcaaaaatgccatggtatcacgcctattttcgtgaagtggacgtctccggacgaaatcctctcacaactacgcacaccgtgaatttttccttccccgtttacatgaatcttcaagcaaatttgacggttcaaactttccacgatgtagttacactgcaattatatcgtatttacatttataactgggccatggcctgcttgcagctccccaacgcgccacggcgatcaacgaaattggcccagcacacgccaagctcaagcaggccataaaagctggaaatattgtcattctcccagcccaccgcccgtaagtcgcgaatgagcccatgatgaggaggacgaccaacgatgccggcccaatttcgccctggatttatgcgaatcggcacctggttcagatggtagcgatcctgatttttcatgcggcagtgtttgttcattttattagccatttttaacctttttaaaatttaatattgctaaaattttagcaagttaacaatattattaaatttaggtaggataagcttgttgttgtcaaattctctagggatgaccaatactctatttgataacaaaatcatcatatatttgttaattttatcaaacaatgatatgctttaatctgaatagacctttaggaccctatttaggatcggtacctttcatgcccatatttccttaataagttaaaacatcttattaagaaatataaattaatttatagttaaaacttttatatgacttaaaaaccaatgtaaaaagatacactgaaaatatatcaaaatcaacttaaaagtttgaaaatttaaatttaggctttagtgtattagtgcaatcaataggctcttattcacttaagccccttagggatcctaatatatgcagttattatgaccattttttgactttatgcaatttagcccctaatctaggtcgaatttgtacaaatcaccacacaccgaagccgcaaaccccaccaatcccacaaaccactctccagccctctctgcctcctcgccgccgccgccgccaccgccgccgctcgccggcgcggcgccagccatgctccccttcgttccgctcactccgtaggctcggccctgccgcggccgatgggcgcctccttctccccctygctccgctctcctcgaaggcggccgcgccgccgccggagtacgag

SEQ ID NO: 5851 - DNA, 2000 bp, Oryza sativa
ggtgatcaaatgatgctgagcgaaaggcccatcgctcaacacataaaattactcgaggatgaactttaggctacgtattctttaattagaaccacgcctttgatacgggaagatattgctttcagataactcactccgtctctaaaaaccagcttatgttcatacgcagattcgtagctagacatcgatttatatagggcggagggatacctaggctaagttcttttgaaaaatagattaatataattttttaggtaaaaatatacaccatttagtaatttagaaaatatgagcgtgaaaaatgagagacgtgatgttgggaagagcatgggcgccctagtacagctagttggcgttagtgcaacgtgacattgctttcatttacagctccggccgtcctgcgcctgtgaagctgggatkggccgcccgccgcggtgtaacagggcggcacggggaaaacggtacgtactactactagcagcggattagattagaccagcgggcgaacgagcgagcgagcccgtacgtacccgcgcgcgtacgaccgcgtacgtggcgtgcgcgggcacgtccgtccgcacgcaggcacagctcacacagctgtgcccccctctcgcacccgtcgtcgtcacgggggtggcccccacccataactgcttcccacgaaaccgcgccgctgcaaccgcgcatgcgctccagcctggccgtggaccgccccacccgtccttatcccctccccgcacagcgccctaaccgcctcccggccccacccgtcagtggcacgggtatcgcctctccccggtgacccctgatgctgccaggagagggacaggttcatctccatccccagatctcgcaaccccgcgcggggaagggggtacgtacccggccggtacacctgtacggctgcggcgttgggccccccggatcgggatcggacggttggggttaactgcaggatggggatgggcaggggaggtgcagttcagtgcaccgcgcgcgcgggagccgccacgacgacgacgacgatgggggagtggatcgtgccggtctcgtcgtctgatcggttcgttcgtgggacgggataagcacagcgcatcggtggtcgtactcgtccgcacaacacgccaccttaaacctcgtgtcggtttgttacgcacgagcacgagtacgagtactactccactccactgccgttgctttcctcacggtggtttcgagtccactccacttcctctctctccctcttcttttttttttgtcgtggtatcgaggtcgctcggttgtacaagacgacaagttagcaacgaacctgatagacgtgtgaatcaatcctgtccgggtttttttttctctcagctgaaaaaaaactaaactcacgtaaaaatggtcgattcgaattttgaactgacaccgttaggtttacccaaattaccggaattgggaccgattcacttccgcgggaaaagggtgacaagtgctcataaatccgttggccgtttcggcgccccccctctcatcactgatctttctcaacggcaactgccgtttcccactttcccacgtacgaaaacagaagtcacggttcaaatttcgaatccagcgaggcagaaaccgcccccacctaaaaccacggggctcgggtctacacgatcgctgacaggtgggtcccggtcgtagcagggcccacatgtcaatgacgaggaagaaaacgacaacggccccgggtaggaggcggtgccggggggacgcgacgtgtgcagcgggtgccagctgtattgccggtcagagtcaccggtcgacgcgccgctataaataccgtcctcctccacatcactatttctccaacccccatcgccaccaccaccaccaccactcgcgaactagacagaaaccgcaagaaaccaaacaccttttggctcctccactagtagcaactactcgttgtcgtcgtcgtcgtcgactcgtcgtggtagtagtagtcttcttcgcgtgacgcc

SEQ ID NO: 5852 - DNA, 2000 bp, Oryza sativa
gggtaattcgtaaccgtggattatttaccggacggaattcacctctagattatttacggccgggctgcaaattctcgctcggagttgcatgaacgtctccgcctctgacgaatctgcactttctgcagccttccgccggcagctagcccgcctggcgtatcggagcagaatttttacagattttttgagacattgtggcgttttgaaacagttataactgcagtatatgtgattcacgttgggcctcaagattttcaattttcctttttaataagattgggtccccagattgaaggtatatatgatcatttcatatgggggttcttaagctgacccatcgatatacgattttgtctagcttatgtagattcttaaaagctcgttaccagctagctgtttctcatagcgttaaccttcacaaacatggcatacatatcgaaaacagaagcaaagaaacggatcgatgaagctttggcgctctcgttcatcctgtttggtcacgtgggctgtgggaacgggtgaggctagaacatgataaccacgagccaagtctcccattttcgtcttccaactatatgtcgcatggccgtatttgccaaacgtgacgaatgctccttcttcagttagaccgagaaaaattaagctagattccataactagcatcgatcgcttatgtgagtgtgtcagctgccttgcacgagctgatcagctcgcacgcatcgcggaggattcagtcaaaaatatgatcactcgcgcatatatacatgcatttcagaaagcacggatgcgcctagctcgcaagcaacagcgccgtgcagtagccttacaccatgtaattacacttggaatctagttctaccatgtaattacacttggaatctagttctataaaaaaaagaagttggaatcgtgtttggaacgatcactctgaagtttgatccactcagatcccccggaaaaaaaaatatctccatcatttgctttgtcaacgagttacttgaaatgttgagtacactgcgcggtgcaacgtacgtaacgcaaaattacaatcccaattaagcagacgcagtccccatatattgcatggtcaaaaccaaatgaagtccaagtctccactagattaattcgggccaatattaagtatcctgctgtatgtctttcggtagaaactctgcaaattacgatcaatatttagcccgtttcaagaggaaaatagttacagataagtaggtgtgtggtacgtatacgtatatatgtgtttagttcacatcgaaattggaagtttggttaaaattgaaacgacgtgacaaaaaaagttaaaagtttatatacgtaggaaagttttgatatgatgaaaaagttgaaagtttgaagaaaaaatatttggaactaacaaggccgtaaccgaatgtcaaatttgcatcaaaccacgctcctgtagcagagacgccacgtgcagcacggccaagcgttccattcctcccgtttccacccacgcgcgaacgccacaatttcccccgttttcctgggcgtttttccaccaccaccaccaccgccgcgagacgacacgagaggagggcgcggcgacgacgcgagcttccccgcgcgcgcacacaaccgcgacgtttcccgacccctcactccaccccccaccgcaccacgcgtgcacaccaacactaatacaacactcttcttctcacttaacccgctctctcttataatcaccaacctgcagcgagctgaactgactgagaagccaatccgcgaagctaccaaaccgagccaaaattttgatcgatcgatcggccggccggtgtctttgttgaggcgtgcaaggctcgtgctttcgccgagagggattaattagccgcgcctccagcatctccggcctccatagagatcccagcttataattaaagctgtcaagagtcgttttggttgttaggcttaaagttaactactgctggctagctaggactaagagatccgagggagcagac

SEQ ID NO: 5853 - DNA, 2000 bp, Oryza sativa
tcaagtacagcagcatgacaggagatgggcagcggagcgaggcagcggagacaacgtcgacgatggcgacagggactgcggcagcggcagatggggaggacgtcggctccggccgcggccgatggggaagaggccggccgcggcggtggggaagaaggaggaggtggcggcggcggcggtggagaagaagcaggatccggcggcggcgtctccggcgaggatgcggcggagcggcgacagagctcctgcgaggatgtggcttcagtacacatggggaggaggaggagaagcgagcgaagtctgcgcgcgtggaggagcgaagtcttcgcatcctgcggtgggaacgaaatcgtgcggtggtgaatgaaatcgcgtggatggacagtagggattcatccaagtgatttggcctgtagaattagaaggtgacaatttcttttaatattagtatagaatttgctatggagttatgcgtctttttattgattataggtgttctgtcgaatcccgagagtatatagccatttctatgagaatacgatgatttttcattaactgcatgtagttttggattttttttctggaaattgtcaacttattggatgcctttgaattatttcttaagattcaaagacctttcataatatactataatctctcctggttcccaaaataaatcttaagatggccctgggtggattcgtctcaaaagaaaaataataaaatggtgaagagacctttctgagaaacgcagtacaatcacaagagctcataacgcccgcgtattcaccctgtgaacgcgcacacacacatcctacctctataaacacctccggaaaactaagccggcattccttgtgattgatgaagtcatcacgaatgtctcgctgttaatatgtatgttgtctatcactgaaataataattagcataaatacgagcacctatttcaagtgaatagaccttttatttgaaatagttttgaattccacgaaatccgaatttcttcggaattttgtcatccacccagaaactacctgtgtgcgaagtgaaccaatgtctccttccaaagttccaagcctttctccgtccgtccattgtcacttgcatcatcgtcgtactaccaagcaggcgacatttgtcacctatctctttcctacccccacgtggtcctcgcgcccattatccgggcccacacgtcagcctctcccgtccactgtcaccgacgtgtgggcsccactcctctccactgttatcctctcttctccagtgagccgtgcccgtctgctcctcctccaatctctcccatgccgtctcagctcagctgcctttagctactagctggactaaagctagctcgcgcacttggggatgttttagatccataatgtaaaattttaccgtgtcacatcgaatattatagaatgtttggtgttcggttactaataaaaattattaattatagaatccgtcagttaaccacgaggtgaatttattaaaactaattaatccatcattagaaaatgttcactctagcaccacattattaaattatggagtaattaggtttaaaagattcgtctcataaattagatgcaatatatatatatataattagttatgttttagcctatatttaatattttatattagtgttcaaacgttcgatgtgacatgtgtaaaattttgacgctggatgtaaacaagcccttatctttccaactcactctcgcgttcgcgtcgtctccggccttttcttgctctcctcgtcttcttcctcccccatcttccggctgatgaatgcagatgtcatctcatctcatctcatctctatccaattccaacacggacacctataagaggttggtaactcgtagctgggcattgtcacttcttgttcttggcagcgagcgccatttccagaggatttcttgggttctataggtgaggttggaggcgcagcttcgtcgtcgtctgatggcgccatggcgtgcggcggcg

SEQ ID NO: 5854 - DNA, 2000 bp, Oryza sativa
accctttcccactttcacgccccactttcccctttcacatccaatcgatgacaaggacgattcgatgatggcggcgacatggctgcgaccccggatctcctcggggccacatagcggcggtgtcttcgaggcctagtgaagaagcggcggtgagaggacggcagcggcagcttggatctggagccgacggcgggaggactacgagctctcccctcctccctccgctggcgccggctccctatgcggaagaagcagccagcgagggcggtgcccgctctggtcggccccgccgccgtcgtcgtcgacgtcgccaaccgttcccccgacccctatggcgccgacctctccccgcccccgcgcctgcgcccaagtcaatggagttactgctgctgctgcacggctcggggatctccgcgccggcagcgtcagcggagggagctcccctcctccctccgtcgttgccgccctcctctcctccctccgtcggctctcccctcctcccttcgccggcgagaggacggagacgatgacgatgccgccgggtagcgactctcctctcctccttgtccgtctcgatctggtcggattcggagcagcggtgctgcggtggttgaggaggccgaggcggtggcgtggatccggagcggcgagggtcaaggaggccgaggtggattggtctctcttctcctcccttggcggtgaatgtggagaaagaggaggaggcaaggtcgcgccgaatcgaagcaatgactttcatagtgcgagtttccttcgccacgcaccctccttgcaccgagaaaacgcgtctcccagttagggcgcgagcggccgggcgaaggtgtgggtctcggcgccatgtacgcgtgaatccgagctggcgcagtaggtaactcctccatgtaggagcactgtgaaggaccttaacttggggtgtaaagacaaaggcatgcaatacaatgattttgtagttatttcttatatctgagaatcagatggctggaaagtggaaactccccaaagtcagtgtactattcacccttaactttaaccctctaagggtgtgtttagtttgcgaaaagaaaatttttaggtgtcacatcgaacgtttgaccggatatcggaaggggttttcggacatgaatgaaaaaactaatttcataactcgcctaaaaaccacgcacgggacgaatttattaagcctaattaatctttcattagcacgcgtgggttactgtagcacttatggctaatcatggactaattaggctcaaaagattcgtctcgcgatttcaatgcgaactgtacaattagttttttttatctatatttaatgcttcatacatgtgtccaaagattcgatgtgacgtttttgggcaaaatttttgggaactaaacatttcctcaactttatagggtgtgtttagctctttgggtgtaaagtttttaagtatacgaacacacatttgaagtattaaacgtagactaataacaaataaattacagattccgcttataaactgcgagacgaatttattaagcctaattacttcatcattagtaaatgtttactctagcaccacattgtcaaatcctagcgtaattaggctcaaaagattcgtctcgtaatttacatgcaaactttgcaattagtttatttttccacatttaatgtcctatacatatgtccaaatatttgattgcaacgtttttcatcaaaattttattttatctaaataaggccatatagtttatagtcgtgtcactcacatacgctataatccagtgacagaactacaaaccgcacagaaaaaggcgatctctttccaatccattccatccacacacacgcagggagtcacagaccagcggagagagactctctctctctccatcaggcgttaactgagctcgtacggccggcgctggcgaagaaggcgacggaagaagatatcaccgaattccacaagataaatgccgcwttctgcagcagctgggttgag

SEQ ID NO: 5855 - DNA, 2000 bp, Oryza sativa
tttgaataagacgaacggttaaacatgtgctaaaaaatcaacggtgtcaaacatttcgaaacggagagagtactactatactgtgtacaattccaaagttttcagtttgacatgtacactgtaattgattttcgtctctgttcgtaaatatttattagcaggcactatttacatttcaactttgatcgtccgccgtttttaagagaaaatctatacttaccatattatcaaaatgaaggtgtattacgcctgaaatataagtagtaatctttcgttcatcgtagtctaaaccatttaaattattaagcgaccaaaaattgaaatagtgatattcaatagtgacaagtatctcgaaacaaagagagtaacatacataatcatcctctgtaatggtgtgtaagctcagaatcactaagtggacttataattttgctccagttaaatctgttgggcaaatatacctggaaccatggagagaaatcagagcaagggagattggagaaggtagttttggtttggtggcacacagatctccatgtcggcctatgccgcctatcatcatcattccactagtagcaaaacggacggccctggaagctggaacaaacagaagaaaacagcaaacaaattgcccctacgcgacgtaggcaaagccagccaaggcagcccaccaattattggtgggccccactaatcagggacagtaaaccggccttttttacccgccgcaccaacggcaggcgggcgctccaggaggtttcgcttcgcagtgaaaaaaaaargaaaaaaagaagaaacggaagcgaatatcctacggcacttgggcttggctataaaaaggagccgtctttgacgcctgaacgaattgctgcgccgtgctcgaacagatctcgatctcgatctcgatctccgcacgcaccaaggcgaagccaattccactaccaccgctcttccttcttctcactccttctcgcgactgcggcgagggtgagtctcctgtcgtgagaatttcggtctaccggcggcggaggtgdtvttcgcgtcgtcagacgtcgdvgatcataggtaaaggttgdtcttggctcyggttctcttatctctggttgttgataatctatatggatctatggtttgttgattcgtctgtatgtgaaaaacatcatcttgggttagcgaggggtgggtttcagattctcaggtcgagtctccagtacactggttgagtgctcgtttctagatctgtatttgttctgcaacgcgaggtgttgtggttgatgcgattcatgcgaaaacttaatctgtcatacatacttggaagggtaaaaaaagaaaaaaataatctcctttctactggagatgcatagcgtgggaattataattagcctcttgttatctgctagcctggttgttgagcgaagctttcggatccaaccttttaattcagggtagctttatgtagtacagaaaactgtgtaactgtattgtgtttcctgttactttcttttaaaacaagttctggttgaaaagcgtagaaacagtcttaactggcatgtcttgttttcatgcatatgtgctgtgcagtagattaatccttttacctagaacttctcaattgagttttatgttagttgattccaactagtagttgtccatgactgaccttattgcatcttcttcttttggcagaattactagacttccaataagaaggaaacaccttagggaatgcagaaagatgtgcttgcatgctagagagctaccttgtgagggaattggcagggtagcaagccatatttctccttccacaactcttcatgacattggaacacaagagtatatacagcgcttgctccatgtgctctcgcactatggggttcgacgtggcaactcaaccatcttcttagatcaccatcttggtggagacggttgaagtcacctatcatttctaggctcctggttaccacactttgagctttgggattactgctttctttggcgtg

SEQ ID NO: 5856 - DNA, 2000 bp, Oryza sativa
aaaactataaatttactaacaaaattatcataaaaatacaaatttagcatcaatttagacaaaactcggatgtttataattcaaatataatattagtgctaaggatttaaaccccgaaatatgtaattatgtgataattttattgttaaatatgtagttttgtgatacttagtcttaaatatgtagttttctgataaaatctgtagttttgtgataatttgatcaaatatttataattttatgaaaattactcttgtgtatattcacagtatattacaaatgttaatgtttatatatccgtacaaaattcaaagagttgaaagataccatgatacgtgtcattggcatgtgggtctagaactcagatgtcattcggttattttcatatagtatgatggtattttgtaacctacgtatatctgcaatggtttttttaatatataaaaaaaatttagcatacaatctcctctaaaaaaaatattaccaagcctgggagtgccggatacgattcgcttcgcttttattcatatccatgtggcgtggaacggatcatcgatggcacatcgcgggatgctcgaggagatggccatgtgttcttggtacttgcttgattctttccatcttttctttatttgattgtagaaagaaagaaacagctcaaacttgtgtggccggcacggctgtattaatgttctccgttgcatcagagtcatattttgtcgattcttcaagtcctcttctggtcgtcgtcctaaaagattagtagtagctcgtttggcatttgagatgcagacatgggttgggtgcagaactaggggaatgcttttctgtcttctgctgcttctttgatttcttcagaagtttcttgcacaccaatgtgtatagtagagaagccaaaaatgggaatacgatctcttgggttttgtgctgttactagctccttgttcttgccctttcagcaagcaaatatgagatctttgcagctataattaatcaagaactgttctctgtaaaaataaataggagtccacttttggaccagtcactgcattagaatgtaaacaattctttcgctttcacaagtttacataaggttcggcatgagtaagatcacatttttctcgagacataagaagtggtaggagtccatctttcaaaaagaattggtgatccgttatcatctattcttttcgatttggacctatcctctcctccctgccaaactctgaactgaccaaaaaggtttggatctttttgcattggtttgaggcaagaagaagaagaggttggagtgcgaattccaccattaacgcaatagtgatgatctaggggaggcttccctggtctgcattacattctgaaagcaaaagctcattgagtcggcacttcctgtgctgtgatgcgagaatgtgagttcacatgcttttgtccttggacccacatggcctgccttggctgttccattcggtcatatgcccaaaaagctctcgttaaatcccctacctgctgcactttgccatccatcgatttgattttatatgatgcaacttggtgttatcccaactttgtaagtttagtgtgattatctctttgaagcttaggtagaggagtgagcactagtagttgattaataggatttgtattgtaagtgtgatactgctccaccacacgtgtctatatcgcttccttccattccatcacctcgcattcattccaattagtgatcttgaggggctccatctgcaacttttcaccttggatatatttgcatccttgcttttcccagctctcctcgccctttccccttcttagagctgattctctcgattgattacctagtactactgcaattcacattgtcagctcttgcttgttcccaggtgcgtcctctatctgtgttcaatcttgttcttggcctgcagaatctatacaagttatgacagtgtgttgtatctaattcatcttttcttggagcaggaggatcagtttcttgctgagca

SEQ ID NO: 5857 - DNA, 2000 bp, Oryza sativa
ttatttcaaaggaattgagactttctttaggaacaaggcctcaaactagtagtgtttcatatcgtgctattttagaagggaaaaagtacactgaaggtccctcaacttgtcctcgtgttataaaatcatcccccaaccgtaaaaccggatacaacgtatcccctaacttacaaaaccagtgtaaactagatccctcagcggttttgaccccggtttgtctgatgtggcgactgagtcagcgtaggacccacgtgggccccatacgtcaggatgccacgtcagcgaccagcctctcccttcctctcctttcctcccttctctctctcccactcttctctctggattgggcaggccgcccggcggtggggacgtcgttgccggggcgaggaggtccgacggccggccgcgacgtggcggcggcggccgggacgaggacgttcttcttcacgggcatcctccttaaagctcccgacccagcgcaaggtccccgatttgcgcgcacgccgagaacgccgcggcggcggcgacggtgtcgatgcacacgccgctatcatccgccatggccggtacaagaaacgacgtcccggccagccggcggggaatccgtcgaagagcgcccacgtggaggcgagctcgacgcgcgcgaggtagagctcgacgagcccatcgcggacggcgaggcggtggtcgaggccgagcttggccgcktgtgcgtgcacggccggcgcggcctcgccgtggtcggcgatcaagcccttgataagggccctgaggcaaagcggcggcagtggcgctccggcgagctcctcgccggtgcccttctgcgagctgcggtagctgtactagattaacttcttgcaattttttttgcctaattgtgatttgccagtagaatgacactgattttctatggcctcttagttggatgagataagaagagatgagtatgacgagatggcatttgtagcacgagattaatttcttgcctgtttctgctggatgctaaatttgcaagctttgattcccgatttaatggctgcgatggctgtagataaatcccagctggtggatcccttgatgtgtctcgatcgagttccgggaggcagcagcagcagcagcaatgtccggcaccgccaacgcgacctcgccggccgctggcgctggcacgccgcggtcgcggctgccgccgtggacgcggcacaagacgctggtgttgcttgccggccgccggcgctggcacgccgttgtggacgcggcacaagacgctggtgttgctcctccgtgctcccgccgcccgccgcccttcccttctgggtcgccgccccctcatcgccggccggccgtcggacctccatgccccggcgacctcctccccaccgccggccgtccagagccccacagaggagtgagagagagagagagaggaggaagtgagagaagagaggaaatagagaagaggctgacgtggcatgctgacatgtggggttcacgtgggtcccacgctgattcagccgccaacaaaacctggataaaaaccgcctagggatctatcgtaaccggttttgattagttaagagacgtcggatatctggttttgcagtttgaggacgtttttgtaactcgatgacaagttcagggaccttcggtgtactttttccttttagaagggaggaggaagacggtgaaaagaagacaaacagttgggcctaattgggcctggggaaaacttacttgggcggggcttgtggggggtgggaggttcgagagccttctgggagaaggagagagcgcttgcctgacactgcagtggccccacttgtcagtcacagtaggtggacccgtacacgtacacgcctctttcctttactcttcttcttctttcttcttctcctcgagtcgagtcgagaattgttagatttaggtctcccccatatccccattcccatctctctctctcgagtctcgacggcggctgctgctgcggcgtcgcctgcggtgcg

SEQ ID NO: 5858 - DNA, 2000 bp, Oryza sativa
tcctttttctattccttaaattatatatttaattctgaatttctattttttcctaattgtatttctatatggactatatagtctacttctaatattccttatttttaattccgaatttcagttatttcctaattgtatttctattatggagtctatactctacttctaatatttcttatttttaattccgaaatttcaggtattttctaattgtatttctatatggactctagtctcctcttctaatattccttattttttaattccgaatttcagctatttgtaaattgtatttctatatgggactctagtcccctcttctaatattccttatttttaattccgaatttcagctatttgtaaattgtatttctatatggactctgttttttctttttctccgattaatgtgagaatttctaggccatgagagcgaacgtggaggctcctttttctattcctttaattatataatagatgtttcagcacttagaaaaaaaaatgttacagttcttaaaaaaaagtgaaacatagtgagatagttagatgaaacaatttaattcaatatatacaataaacgatttaagtcattgaaacacttaaaccttgtatacatcaaaacaaaccccgtgtatttgaaaatattaaacactatctaaaatccaccttcaaacatttgatacacacacacaaagaaacatcacaagtacactaactgaaacattgtttttgaaccattgaaacatcaacaaaacctgtgtgtcgaaaatagaaatatagaacactatcgaaatatccaytgacatttgatccaaacacaaaagaacatcacgagtatactagcttgaaacacagaaaaaaaaacacacagaacctagtatggactgcatcttccttctctccgatgaacacaggcttgctcgcgtaggtcttctccaccactcccatcatcggatctgtaggaggagaagggggagggcggcggagatgaggagagagtgctcctgggggagagagggagccggcgagcctacaccaccaccgccgccgccatcacctcaccgcacgtgtgtcgtcctccgcgtcggccgccaccacggggacgaagccgccgtcaacgtccaggaagacaaaaagcggcggcagatccaacggagaaaacgacgctggcgagattgacgggagaggagactgtgcgggtgaggtcggctggggagagacggcggcgcaagcgagagagctcgtgggagaggaggcggcgccgaacgggggagaggaggcgagccgagcgaggtgtggggagccaagtgacgtggaatgagacgtgcgagcgccggatatttttctctctcatcgggcacccgtgaacgggataagcattatcggacacattggcgtggccttcattcaacatggcgcctacatgcagctccaccaatagcagctccaggagcttcacccttggtagtggccgacggcagtacggcacaacaaaatttcagagccgatagcacaacaaaatttcagatggttgcctgcatgcaactagaaaatccccacgagcaaagcaaaaacaaactggcggcatccgtcgtgtggctctccattcacctcggcctgtggcgacctccgacgcccatgcgcaaccaccgtcgtttttcgccatgtccaaagttagcgcgggctcgtataagagatgccaccgccgccgccgccgccgccgcctcctcctcctcttcctmctcctcctcctcgttgctccaatttttagaccgaataaaccggaccccttccgctggtaggggacgacgcatcgatcgatcccgacgcctttgcgcgcgcgcgcaaaatcgatcatttgatacatatctcgcgtgaatcgtcgactggtggttgcattgtgttgcaatgagcaaaggcgcgatcatcggcgcgtcgaccgtgctggtggtggcggtgtgcggcggtgtgcgtggtgtcgttcaagaacgggtcgagca

SEQ ID NO: 5859 - DNA, 2000 bp, Oryza sativa
ttttggacctaacctacatgtgggccctgcatattttttttatttttatttttgactaggataccacatcagtcaaaacaatcatctattccaccatgggacctcatttgtacggttttaccaaaattaagggtaaagatttttggtattgtgatttagtgataccaattaaaagtcaataaaggctagagatgataagtggacttatttagcggcggccggattaggctgcaaggggatagccatgtacgagctgccactgtttgggtcggaatgggatactcacgtggaataagttcactttagctccctcaatttatcgccgaatctaaattcattcttgaactcccaaaaccaatgcaaggtcctaaggtggtttgaacggcggttttggctaacgggacgttgacgtggcacttaaagtcagagaaaaaggtgggacctatcagtgagtgtttggttaaaaattaaaaattgtagtgggtcccgccttcattttattttctttccttttcttttcctttctgttttctcctttctggcatccggcgcttggtcataggctgctgtccttctccgcgctgatgagccacaggatgtgggaaatgaagggaggagcaaaggaggatgattcaaccatcgttgtgatgctggtgcgtgggagcacgacaacgatggttacaggtagggatccgacgagtggttgaccggcgataactcgattcgactgcggtggggatatggaggtgagagattgggcgcagtggcgcccgtcctcatcactgacgccgtcctccaagccgccgatgtcctcatcatcatcctctttcatcgcggacccaccggcgaagttcctctgattgatctccggtacactgatggcggacccagttgtcgtcctatcgacctctctacgctcccctccgcctcctccctgctcatccttgtccccaacatcgctcttcatcgccactttcctcctcccttatccggccgttgcttgcgggatcccgtcacacgtcgtctgtcgttcgatccccggtgatcctctatccctgggtcaaagcccacaagaaagaaaggagaaaagagagaaaaagagaaggaaagaaaaaaaaagaaaaaggtgggaccaactatatattttttatttttaatcggacacccactaacatgtgggtcccattattttctctgacttcacccactaacatgtgggtcccattgttttttctaattttaagtgccacataggcactacgttagctgaaatcatcgtgcaggcatccgaacgaggccgaggcttcataactgggggacgcgtcggaacgtacaacgccggagcagacgaagacgcgctggccttacgtgtacaccggcggagatcgaatccaccatccatccatggcgaatccgccgaagcgaacaccaaacacctgacgacgagacacgacgaggcttcacccgcaagcttggaaaagccgtgctgttcggttagttcagttcagaccaactaacattccacctaacaacggactcgcgatctcgatagaaagaaagtatgcaaaaagaagaaaaaaagtacggtttttttggacaccaacgcacgtcgaccaggttgatttgccgtcgcttttccccaaacatgcagatcatgcaggtcgcagatgagtttacaaggtttgaaaagttgaaacccgaaggtttgagagactattgtttgctaaaccaccatatctatctcgctgaccacagaacatcaactgtcaaaaccaaataacacctgcacgcaaaaccacattattattagcctaccaactccatcatacgatcaatttaatcactccatttccagtttgagctaataaactagcaatctgcactgagcgtacgtacgtccttgctgctcactatcatgaacaaacagtagctaagctagctatagctacgtttttgttcatatgctgttgttgctgccggctgcttggccgcggggaagc

SEQ ID NO: 5860 - DNA, 2000 bp, Oryza sativa
ctcaaaaacttttcccaaaaacatcatattgaatatttgaacacatgtatagagcattaattaaatatatataaaaaaaattaattgcacagtttgcatgtaaatcgcgagacgagtcttttaagcctaattagtacatgattagccataagtgttatagtaaactacatgtgctaatgacagattaattaggctcaaaagattcgtctcacggttttcaggcaagttatgaaattagttttttcattcgtgtccaaaaactccttccgacatccggtcaaacgtccgatttgacacccaaaaattttcatttcacaaactaaacaaaccctgaacagtacaaattcatgaacatgtacagtgctcgaggtcatcgtggctggcattgtggttggacggcgaggagcaggaggggcttctgaaggagacgaaggagaacctggcgcttctggaggcgcagctccatgggaagaggttctttgccggtgactcggtcggctacctcgacattgttgccagtggactggctcactggatcagcgtggttgaggaggtgaccggagtgagcttgatgggcggcgccgacgaggatgacgagtatcctgctctacgccgttgggccaaggagtacaccacggatgagaccgtgatgcagtgcctgccgagcagagagcacctcgctgccttcttcgctgcgaagaaggacaagctgaagatggtggctaaggcgatgctgcatcagtgattgtgagtgttgtgggggccgacagtgggagtgtatgtctcaggtgatggtgcttcttaaataaaatcgaatcagaacataattaaacgattataaagccgaaagttctacacgtacatcagattgttcgtttgtcactcactcggctcatttttatatggcgtgatcttgactttacacgttttgaattgaactttgactactaataagtatatactccctccgggttgataatacttgtcgttttggacaagggcacggtctccaaaaataattttgaccattatttttcattataatatgtataaaattgtaaacaaatatatgatcttattaaagtactttttaagactaatctatacatgtagtcactatatttgaaagataaatattttaaaaatgattcataataaaaaaaatctaaattttgacttcacccttatttagaacgataagtattatcagcccggagggagtactgattagcatgcaggataggaactgatctgtacttgtcgaaaggggatagtgcagaagttacctggtcatcttatggcttgcgggagaagctttgtaattagcaaatgatttattaaatattaagtattacaaatttaaaaatagatttgtttgaattcttttcaaaaacttctatatagaatttttttctcaaaaatcacgccgctagttgagattaaatctcagtaaaatgttcatagatattttttttctatggaccatctatctaggaatcttttcattttctggattttatcaattcatctgatttgccctacctttgcgctccggcttgctcttcaagaaatttgataggattaatcaatacaaagtctgaaagccattatggtggcagtaattaagctatctctgggaactgcacatgtatatatattatcttttggtaaattaaatctcgctgacaaaaccgatgacctctgctatttggaccgaagcaaagaaaacctgtgattcctcccaagcttaattaaacaaaaccgatgagctcctgctctttggaccgaagcaactgagaagcagatagtcaaactgattgaaaaaagaaaaggaaaaatcacagataagggaggtcgtccttcttggagaagaagtagctaacacaccatttgaaaattacaaatttgagccaaaaagcaaacttgacatggccctataaataaatgtatggtttagccaagaatacaggaataatagccaaaaacactctaaagcaaac

SEQ ID NO: 5861 - DNA, 2000 bp, Oryza sativa
gaaacgcccgctttggttacctgccgaacagcccatccttcatggcccaagaccggtggagcaatcgcggttcagcccggcccaatgatatttgtgccaactttggcttttagctgaaaataactaggagtactttaatttccccacgacctagtagtttaagtcatggaagtgccacaattatgagtagttgagtagaagctgaacagattggcagaagcagaagcagaagcaaaagatgatgaattcatctgagccggtgaagctgatcggcgctttcggcagcccgttcgtccaccgtgtcgaggtcgccctgcgcctgaaaggagtgccctacgagctcatcctcgaggacatgggcaacaagagcgagctcctcctcgcgcacaaccccgtccacaagatggtccccgtgctcctccacggcgaccgctccgccatctgcgagtcgctggtcatcgtcgagtacgtcgacgaggcgttcgacgggccgcccctcctccccgccgaccccctccgccgcgccatggcccgcttctgggttcacttcctcgacgaaaatgtaacaaacaatccattccatcctcgttttaattagttgcttacaaagttgagtcgataatcatacagctctttgctaatattgggtgaagattcaccaataaaatttagtagttgtgggattttaccttgtctggtttttattagtttgctttcacttttggttttattactttagctacatactgaatgtgtgtgagtttgcttttatacgatccttgtaataattagctgtagctcttaagcaaggctacatactgaatgttttattctattatcttaaaaaaaattagttgcttgcaaaatgttttatctcaactctgttgatcgatatggttggccagtgcctgaagccgttgcggccggcgctgttcggggaaggcgaggagcagaagaaatccatggaggagacacgggagggcctgacggtggcggaggcggagctcaggggcaagcggttctccggaggcagctccatcggcctcgccgacatcgccggcggtggcgtgctggctcactgggtcggcgtgctccaagaggtcgccggagtgagcgtcctgagcgacggcgacggcgagtaccctgctctgcgccggtgggcgaaggattacgtcgctaatgaatccgtgatggagtgcttgccggatagagatcggctcctctcctacttcaccgggatcaagcagaagtgcgtttcggtggccaagtctacgctgccaaagtactcccttcttccctaaatatttacgcagttgacttttttaaatatatttaactgttcgtcttatttaaaaacttttgtgaaatatgtaatattatatatatacataaaagtatatttaacaataaattaaatgatagaaaaagaattaataattacttaaatttttcaaataagacgaacggttaaatatttttaaaaaagtcaacggcgtcaaatattttgggatggagggagtagttactagtgatgaacgaataaactaatagcggcgtgcaccttgtggctaattgagtttcgtctttcttgtcgacgtgttattgtgttgtctctgtttgtcacatgcacgtttgaccgtatgtacgattaatctttcgtcatgatacagtacgagcaaggaaaaaaaaatctgtgtatacgattacgatttacgagtactttacgtggcatggacctcagctcctacgtcactctggcagcccatgatgcgatctctttcacctcagctgctacgtcactcccgaatgtcccaaattaacatccaagtaagctaaaccggccagcagctccccgcaaattaacaaggcaaatcaaatgactaaacactttcaagtttcaacgaagaatatattttttgttgttgttgtgaaactccaagagaagcttcatataagtaaggatcagccgtgtctaaacctgctgttggttgtgagtaaag

SEQ ID NO: 5862 - DNA, 2000 bp, Oryza sativa
gaacttatctatacacaaacttttaatttttctgtcacatcgttctaatttcttcaaacttctaattttagcgtggaactaagcacacccatagtctacacggattcaccggccagtatatacttttacacaaaaatggttggacaaaatgaacatagtacggattatatatgagcaagtgctcatttgcatctatatcagttgaatttatttggttgactttctgtactaccataagcttttctgtacatttttaactgtggaaatagtgcaaaagaaagggaacatgccgtgctcgatcctgtatactgataacacaacagcttgtgtactaatcgtttgtcaaaaagggtgaactatacgagtatagtagtagtaactaggccggcgagcacattgcatgggcagcatggcgaaagaaagcatagccgcaaatcccctgtattttgaccagactatcaggcatcagcacaagaagggttcgtggctagactggtttaccttttatcataggatggcggcgtgttcacaagctgaaagatactgtaggaggaccaaaataattattgaactttaggaatttaccagctttggatagataaaggaatatagaatactcactccattaattcatgttacaactttttgaccactgagaacttttatcagcttttagtaattgtgaaggtcgatcgaccaatactattataatttgaccaccgataatttttaaatggttacactatgatgagcgcaaacttaatattccctcattcacaaattgatcatcacataataaaatttaaaatttgtcaaattaataattatataattgtatggacacggatttcatcggaatacaattaatacagcatgagagaatgtgtgcatgctatgatgtaattggcatgatgttttaatcgacttatacattgtggtagaatgcgtgaatggtgtattgcttgatgtgatttaaattattcttggtcttggtgtataaacatatatgatgatcattttgggttgaagggagtactacgcaacatactttaggtacttcttttttaaaaaataataatagttgagggttcagagttttgatattaataattactggtgataagtatttgagaacgaagggagcagtttattctgttagtactacgcgacatggagaagaatgtctcgccctgataccttggttgctttgtggttttccaaatattcttgcctctcatcgtattcatgctttctcctgtcattctgtcgagctttgtatcacgtaatcctgatcacaaaactataggcccgatttagttccaaaaactttttcctaaaaacgtcacatcgaatctttggacatatacatagagcattaaatatagataaaawtaaaaactaattgcgcagtttacatggaaatcgcgagacgaatcttttaagcctaattagtccatgattagccataagtgctacagtaacccacatgtgctaataacagattaattaggctcaaaagattcgtttcgcggtttctagacaagttatgaaattagttttttcattcgtgtccaaaaatccattccgacattcgaacaaacgtccgatgtgacatctaaatttttttttccgaactaaacgggaccccatacaaaaagccgagcaatctggcatctgaataaagagagaagaaagacactctctctcaaaaaaaaaaagaaaaaagaaaaagagagtatctgcaggccagcccatgggaggagaaacgcccgctttggttacctgccgaacagcccatccttcatggcccaagaccggtggagcaatcgcggttcagcccggcccaatgatatttgtgccaactttggcttttagctgaaaataactaggagtactttaatttccccacgacctagtagtttaagtcatggaagtgccacaattatgagtagttgagtagaagctgaacagattggcagaagcagaagcagaagcaaaag

SEQ ID NO: 5863 - DNA, 2000 bp, Oryza sativa
tcgtccggtatgctttggctatcaagcatttgtatrcaaaattkcacacgggscttcaagttatcytcggtcaaggtgaactttatggcatttgtatggcgcctaaatcttccttccttcaaacgccttaaacaatgtggtttttgacatatgcaaagctttagctaggtcacggagtgttcggcgttgcctaagcggtacatctttgatggcatcagggttaaaagaaagtttcttgcggccacagttcttcttcttcttcgattcgaaagcttcaattccacctccaatttgtccatgtcgccatacacgctgaacaactctccatggaacccccatatcagtagcaactgactttgtcactccctccttcatcataccaggatccgatctctccaaacacaatgcatatatgggctcatttcatatcaggagggtagtgtctcctcctcttaatattgatacctacacatgcatggtggatgatggctgagaacatgcaggctatactatggttggcatgcatcggctagtttgcttaagcatggcactgtgcatgtgtacatgcaaaggccttcaactcgtgcagcaaaaagacacagcaacaaaaagaaaatgaacgagtattacctgcatcgactgctccatcggtggtttgatcgccgccgccgtcgtcgccaccgccgccactgccgccgccatcgtcgtcgctgccgtcgcagccaccgtcgttgccactgccgcggccattgccatcttcaccatctgtgcgttgaaacaaaattataaagtcacacatgcacaagaaaaaaaagaagacaaagcaagagaagaaactcctatgaacaccttcattgtcataatcccaaacgaagtcatagttcaaatcagatatatctccatcgaaatcctcaacttcgtcccaattgatgatgggtagatttagatcaaaactggccattacgtacgttgaaccatgggagggaagaagagagatggaagaaatgtgtggtgcattgtccatatttatagaagaaaattttgctggcaaatagtggcgtcaagtgaaaattttcgattcattttttattgctgatggcgccatccaaatttttgatcaagcatgcatgcatggggctttccaaatttttgaatcaaaacaatccatacatggcgttatgccaggcgagcaaagcgcgctagcaaaaatgcatctgcatgcatgctggctattcgcgcggaaagtacaggtcgagcgcacgctgcatggtggttaatgctagcgtatctaccacgcaactacctaaacgtcgctcttcgaacggagagaattaatcagcgtaactgatatttaaacggttttattggtctttacaactacaacagccacgccacggagggagtatattcctgccaacacgtgtggccgcgcgtgacgtgtccgctgggatgctcggagtgacgcgtgggtggagtccgaacgaaaaaatttgaaagcagagattttgtttttgaggataataaagtaaggataaagataaggataaggataatagataagcagtgtttcgagagttttaattcgattttaaactctcaacctaatgaaatttgatccgcaaatcattcggtcgacctgaaaaactgaaccgttgattgaaatttgagtattgtcgtgtttgtcgagtcggagaacagagtgcattttaacgagtcccactcccaatcggataggtcgtcctgtccgagctaaaatatgccaaattttatctcccccagattggatgaagtttaggctcccgtctccgattcaaactccgttcccgcctcggatatgaacgcggcaagtcgactccccgctcccgccatttataccgcgctcccggcggcctcccttctccacacgcatctcaatcttgatcacgccattgccacatcgagagcagagagatcgcatcttccgtgccaagaacaccgggaacgcgctcctgttcgccgcc

SEQ ID NO: 5864 - DNA, 2000 bp, Oryza sativa
tttaggaagctttttggattaaactgtcccttcttaagccattggcacctgccatattaaagatctaatccatctcctaaccctgtatcatacgcagctggcagcctaacaaattggtcatggtttgtggactttattctggggggatggtcctgcttctgttgatgtttctagttccattgttcataatgtcgcattcatacgatgaattcactatctgttcctttataactgtgttgctgcttgtgaggaattggactttgaacgatatatgggtactttagcagaacacatttttagagtaaattgcattctgcgctagatagaacacatcatgtttcactttgcaccaagtttagcacatactttcactttacacccgggtgtattgaaataagtttcacttaaaaagatacatcatcaaacctgtaaaaaaaatcatgaaatttcataaaatctgaatgaaacttcatgaaacatggtttaaaatttataagtttcactcatattttacaatattttccttcaattatatgctacaatctagtgtaaagtgaaacttacttcaatatacttttggtgtatgctgtatagtgaaattatacattgaacatagtgcaaagtgaaacaagataactctaccgagtgcaaagtataatctactcttttttatctgaacaaacagaaagcatttgaacaatagctaagctttgatatacttgcaggtggaggacatcaaggaaacttctgaaaagcactatgaatccctaaatcagcgggtctcagcgttggaaagcagaaatgaattgggagatactaaagcggtgtctgattagttctggcgttctgctagttgggttgggtgtttttgtctgctgcatgtgtagatgcagcatttaagatgtaccattttgttgttgaaattgctataaaccctcaattggagctgtgttacactgttgcacagttcatctacatgaaatggacacagatcaaataaatcaattttggtggctaaccagccagcttttcttattattattttatgctctcagatgtgtgtgatctgaattcctttttttttttccatctcgtttgctgtaactaagaccctccacgcctgttagtctgtatgtcatttttgagagtttccctgtttatcctgtggagtgtggactttactcatgcattggtgactgctgagcatatagtgggtgttgccatgagctttgtgtcccatcagtattttcttttacaggtgaaattgataattgcaagtcgcttttttcagcgtgattatatcttttaacagccagttaccgccgatcatatagagttaatgtcttactgtttctgatgaaacctgtgttagtatccagcttttgggtgggtggctgctgcaacatcgatgtcactatgccagcagcatggtggagggcatcaactgatcatcttggtggttggcaatggtcataggatgaaattgtcttcaagggcttcatgattattgtatgcaaacctattctgtcatctggtgagatgccatccatagtgcaaacttacctgaagtctctgccttgacatttacaggtgcggttgaatataaatctctatattttcttatctcatttaggtttggataggtgtttgactactaattcatagacctaacaccatttatctcatctaggtttggataggtgtttgactactaattcatagacctaacaccatccaccttgtaaatgctaaccattacaggacactccagaggcaaagacttcatacaggatcacaggacttcagaggcaagagacagtgacaaccagagtgatttcatcagccatgtcatcatccatgatccattcgtctttagacaattgtttttcgatcaagtggacaacacagtgaattggtgatgttgtcatcttgtttatgcttttttttcctcacctgtgtttggtcctttgcagatatcacaataggagtaccaagcagag

SEQ ID NO: 5865 - DNA, 1160 bp, Oryza sativa
tttgagtactaacataataccatgagaaagagctctgttgaaaaatgcaatctaaaagcaaatgactctgcggtgaaaagaaaaaaaaaaggggagggcggggggcaaatgactagtcagggagggtgattggaacccaaaatttttatgctgatggctgctgaaccaatcaatgatgttcttggtcagaaaactggcaacatgcattcataatggtgctgaaatttgacgaagtatttacacaaactataagttatactacttacattaaaatcattatttaagcccactattataaattttccctacatttttttacaacacatacacgtatacagccgagcaaggaaaaaaaatatttcctagcattatttattgcttttttaatctgccaatttttcaacggttgttatgcatgcgacatgatttagttggaaatttgcaagtacatggcgtacgttcagcaaatgatgagctgtgggaataaggtattacattaggtaggggtttcctgagatgttgttgaatctagagcatttttcggctcagattcacaactacaagcttatcttaaaccttattgaaaaatagaggtttgaccttgatcgtagcttgagatcctctgcgcatatataatggacttccggtagcttctggacagtgaaattaacaaggcaggccttcgactgtgggctgtgggctgagtgcgacttctaggctttcgttgtgtaggttttgtttctttcttcttttttcgaaaagagaggtttctttcttgtgttcattgcttttttatgctcaatgctgtctgttttatcagaaactaacagatgaatataatatttttgctgcttcttgttagtagtactagtacatacatatagatttcttccctgcgttgtaaatgcaaatgtttcagatattttggttctccgtactgcaaaagttttttttttcttcactgtcgaccatgcatgcgttgatgcatgcaggtgctttggcagtactgctggattgaattaatggatcaagactgaatttatctgtaaataattagttcatcgtaataaggttgatgtgtttgtgcttacctgcttcagtactgcgcttcatgtgcagataggttcgccttcagcaccttgccggtgaataacgccggc

SEQ ID NO: 5866 - DNA, 2000 bp, Oryza sativa
attataatagcaggtacaatagcatactataagccagctataaacacgtatggagaaaataagagcaagttttatagtatagccaactgctagcttcaaatcatctataatcaacttaatagtcaattcatacaatagttacatataaacatatactacacaatcaatatctggtcccacctatcatacacacatgcgtcttgaaatccgtgctgcagctagctacaaatctatagcctgttgctcttacctctcctcttttatctacttaaaatatatttacatatggcataaagtctgctattgtacctgctctaaaagagaagagatatgagtagtgggctacagacctatagccagctgcagtagggactccaagacacaatgtgcgtgtgacaagtaggaccatatattaatagtgtactatatgtttataactaaatattgtataaattagctattaaattgactataagtaatttggagctactagttgggtatactattaatcttgctctaatacgctgtaactatactttgctatttgcatttatttaaataaagaaaacattattaatgttacacaattatattaaaacaacacaattattctaatatcattttcgacgtctacataactaaggaaaagaaaattgtgtaaaagaaacagacgcatgcctaaaacatgaagaatcaggcatgagtccgtacaactatagggtgatactaattgctttcgtatgtgtaggatttctttgagctactgacacgtgggatatactagattaattccttctctctctcgtttactgtcagccaaacgaacacataacataatcacaaagtacggcaatgtaatgatccccacctgtgtttcaagctcacctgtttttagctgtttactgccgtgtccgcgtccaccccatatttcctgacgcctctccatcaccatgtcctctcctcccacctctgcccgcagccgcagacgcagagctgtctgctctgcaccaccactgtgcgcgtctcccgcctcttgcgctctctttttcacctttcccccatttctttattcccccamgccctcatatcccctttttttacttccccgtgacaccaccagtagagtwaaaaaaatacaggtatagtagcaagtactccttgtacggttgtactacgagtagaagtagaagtattgatttcaactggcacggccagtagcagttatactgggttcacaattccagtgaaatccgatttgaatttcgcgaaatccagttttcttgaaccgggttgaaaaccagatcattccgtttttcgatcaagttaaactttggctgtgtttagtttctgaaattgggaagaaatttaagaaaaattgatagtttgaaaaaaaagttgaaaatttatgtgagtaggaaaatttttggatgtgatgtgatgtaatggaaagttaaaagtttggaggaagtttttgattggatttcacaaaattcgatgatatcggtcgtaagcggatttcgatccggtatacctagaataagcgaaacgacatatttataaatgaaaagtaatttataaataaaatttctatatacgtgttcttataaaatctaaaagtacataatgaaaaatagactttaataaaaaaattttaaaaccagctataaatttaaggttaaaaatttaaattttggctaatatatgtgggcataagcaaaaaagacgaggccccgggctcctctgcttcttttgggcaatagcttcgcgtagcttagctcggcttccccctcattcatggccattaccacgatgtgtcaccccaccccaccaccgcccgctgctccacttctcctcctcctcctcctcctctcctagtagtagcaacctacggacaccacccccacccgcttcatttatcacttgtctccccctctccctcgcctgctccgctgctcttgtgcttcgcgcctcgcctgacctcgctgtcgctgccgccagcc

SEQ ID NO: 5867 - DNA, 2000 bp, Oryza sativa
taaaacttgtaaatcttgataagttatacaactttgttgttgacaatttttcccatttgaaataatttagtattttaaaatattatttgaagttgtcatattttcaaattcaaattcaaactattcaaaaaaaagttatatagaaaaatgaacaaaataaaagttgtaaatcttgataagttatacaactttgttgttgacaatttttccatttaaaatcacttactaccaaaaaaattattttgactaataaaataaattattatactgcatttaattattttgctataggtcaactcacaaatataaacatttcgtatgaaaaatggaaaaaaaaataytaagtcatcttaatcgggcattagtatagagcccatcatagatgacgggcctagttgttaccaattgagatatggtcgcacagacatgttagatggtcataaaactcatactcgtcatggatgacacctatcagtgacgggccgtagtttagacccgattgagataacattctaaatctcaatmcgggcaataagttggcgcccgtcacagatgatggaagcaacttgggccccatttgagatgtggaatgttatctcaatcgggcctaaactacgaaccgtyactaaatatgtgtcatccgtgatgggcctgagtttatgccatctaacatgtctgcgcgaccatatctcaatcgggsgcttttttggctcgattgaaatgacttccttgtgatggcccgctaattccaggcatgttagagaccgtcacacaggagagaggatctatactagtgattggtcagaccggagttatgcgagtagtcagaccagccaactcaatggtttgactgaccgactctaaggtatcggtttcgggttgtttatttggatactcgtgattaattcatatttatgacttctagatgatcaatgtacatatgtaatactgttctatgctaatattgagtcaagtttaagagaacttgtgctcggatatgatttcttatttgattcatgtgttggtgtgccatgatgccttagaagagtattatcggtgatgtatcaggagtcaacttgggagaaaatgacgtccagacgatcgggatattatacgagatgctaaggctaaaaaacaatgcacgtaatcgatggagattccatgcggcataagaaacatgtatctagcaaattcatgtatagggagattgtgtgtgtatagaatgagttgtgaatttggtaatatcacgaggtcaattggatgaggtaaaacatgtatctccatgacacaaaatcaaacggataaatattataattgattgtcgatgaaacatcgggttgtacgtggtgaaacaacaaaattagtgattaaaacatttcaaagatttgtgaaacaaaataaaattcctattgaaacatttcactctcgtatatgaaacaatgatgcgattcctattgaaacatttcactctcgtatatgaaacaatgatgcgaacaacttttaaaatgttacaatcatgctccaaactcacaccttgtttaacatgtgatcatacaaagtaactagcaaattctcccaaataggagtatgataaagaaacaaaagctcaatttgaatcctacctacccaacccaaacaaatgtcgccttccccaaacaaaacgcatcccaaactagagtgcttgacctcacccggttttccctcgcaccgttacagcgattcgtcaactcatttcgtccacacgcgcttagcgggacccctccgcagccaaacggcgcagtcccccgcccgagtcgccatgcacgttaagtttgacctgccaacctctcgaaaccttataaaaggacacctcggctcgatccattgctcgatccatctcaagtctcaagcttaattaagctcgtaatctcatataacctctttttggacgaagcttgccactcgatcgtgttaaccactcgagcttgagcgagcgagctagctttgctctgacgagaaaa

SEQ ID NO: 5868 - DNA, 2000 bp, Oryza sativa
gtgcttaacaattgaatatatataaaaaagtgcttcaaataattaagttgtcgcataacttcttaacttattgtatcaaaatcatgcataccttataagttgttgcatttatgcgatcacttataaagtttttatactaaattgcaccacctaccatgttgttgcactagaacactaatttctcaagtttttgcaccaaattgcacccacctaccaagttgatacaccgtgggtgcaatttactctttattatacttactccctccatcccaaaatataacaacttttaggcctaaagagttgtcctaaaatatagcaacttctccatcaacattctcttccaaccaatcacaacccttcaccattcacttttctcacttaccttacttccactacccatccaaccacatagtctacactaattaacaatgacatctaaatattctgttgtataatctgaactttaaaagacccttctttcaaactaaaaaatttcacatgaatttgaggggaaaattttcttctttctcaataaaaacctcaaatgcgaagacatagttgccacttcactatcatattataaacacattttttgactaaagtatagaaacaatcaaacaaacaatttcccaattgtactatgatagcacggaaactttaccaattcgacagttcgattcatgatttcttattttctttacttattttttcatttagtagcatcttataatatcttaaacattaatagtgagttccaaaatgcatatattgcgaagtgttgtagacttgacacaagtctttttgtttacagctaattattttttaagtggtatgtgacgtataccttgacagcgaaatgcccgtggtgcttttcataggagtgagcgtatatgtttgtactgtgtttttttaaataaaaataaggtactccatcgtttcatattatataaatcatttgattctttttatagtcaaactttattaagtctaatcaaatttatagtaaaaattagcaacatataaaatatcaaattagttttattaaatctactatattttgataatatgtttgttttgcgttgaaaatattactatattttttataaatttaattaaactaaaaagaattgacaagaaaaaaaaaatcaaacgacttaggaaacaaatagagtatatacaattaaaaatgctaatcactccacctctcctgatttcgactgaaaacggaattttagtggcgcgggtaatctcaaagaaaaaagaaatactatctgagaaaacggcgaaatgatcataataatatctcccctttcctcctatcctagttaacttcctgctccgtctcamtcytgcctgsctcttctgcgtgatcccgatctgcagagctcgccgccggcgagctaagccccggaggcgcgcgcgtggamgccccccccccctttctcctccgagcagcggccaccggtggcwgccgcmgccatctcggtctckaatcgagkkggacaggtattcgttctcgtctccttcctcttccccgcgccgcttgatgagtcgttattagattggagatccatcagggatggctgggttgatttgtttccctcagaattacgcatgagtttttttcttactgcggtggtagtgggttagtcagcgacagccgtttgttaccaaggaaaatatttttgggggtgttggtttggcttttgttcttgtttggtttgttttgatcagcaaaatttttcacttttgcatcatcagcagatctgtctgtccattataaccacactattgatgctcttatccatcaattcctgaatcatatcctttctctttttttgcagaaaaaagtcatcagctttctgcatgcgatttggtagatactgacacgtcttgattctgctcaaggaaggcagctgattgattggttgggagggcaaactaaaaggggtgtaatcttggccaattcgatagaaaaacacagagatttagtggcgaga

SEQ ID NO: 5869 - DNA, 2000 bp, Oryza sativa
ccactttcgcttccttcaccgtcgtcgcgtctgcgccgccactgtcgctccccctcctacggccggatctaggagcggagaggtagggagggggagccgcctccacgccgccgccaccaccctctcctcctctagtcggatctgggagggagggaggggagggaagggcgcgtgtcgctgctctaagatggagagtgaggtgagggagagggaaggagtgggaggggagaccagatgaggtgagggagagattagacttggtgaaaatggggataggtggtgattttataagttataaccttttcgcatgtagacatcttaaggtttcacctacgaaaatcaatttttataaacggaccacttaagagatccgccagcaaaaataaggggattttcgcaagcagatctcttaagaggtcctcgtgtaaaagtcgattttcgcacgcggcactagatttatggtatctttagctatttttacaaacggtgattttattatccgcctgggaaatcgtgacgttgggaaaaatctttttttaagtagtgagaggatattgctcgtttttgcacgctatctaaatcgttactaaaatacttaataagatacaacaatatgtgatatgccaaaaaacacgcaaattcaaattccaccttcacgagactatacttgtatttttcaactaatataaagtttgaacattaatatattcatatttagatataatttgtacatatatggcattatttattgttatgtaaatctgtaaattaatagtgtaaagttgtaaattaaaagttgtcaaaaagaacagagataattgaagtggtgccatctttctctctctcccaactacatcagttggaatatgcctccagaagttgcatcaaaagagttgtgaccatggacaaaactctcaaaatctcctaattacaaaagacattgacctcttcatgcatgctcatttaaactgaacgcaacatgcccccatgctaaggtagccatatatactagaacaatatgttgatcgctcttgcacgtggataaacatatagtattaaaaaaagtgagttcatttatttacacaaaaacacaatatgaagattaattaaggaattgggagaggtcaaaattaatgatacgtaccagctttaaggaattaattaacttgttcgattcccggccccttcaatagttttagagataatttaattttgttacaacagataattttattgacctaggttttggggaaaatttagccaaactgatgcaaagttgcaaacaacaaaacgtgcgaagttcgaaaacaggtaaaactagacatcgttggggttacctattttccatcaccggtttgctacgccacaaccaaaaaaaagatgaccataaattaatgtgccatcaaagaaagtattataaactcttgagtgcgtgtgtttttctctcttaggtatctaattaaatagttaacaagataattgaagctaacaacatggtataccatatataggcatgtagagacagatgtaaggacaaaattaaagcacctcgtttgcacctaatccggggccaaatgcaagggagcatcattgaaacactgatcggtcgaagaagcttacttggtaccgaccgtacgcaatgcttaaaaaatgaatcatgcatcatatgcatgtgcttgactgacctgctggctagctgcaaattgctgtttaatatgccatggctagcagcttagcaaattcgatcggtaattggtcgattaagataggagtatataataagtgatgatgtggaggtacgtgggggcagcgcccctagcttcctataaaagggctccaatgcatcacctaagtactccagaaaatcaagaagcgatcgagcaaactaaggaatgagcattaagctagctaaggtaatcaaagccattctacttagctaatagtataggatatactccactatatagctaggagcactggatatatagacgagctgagcc

SEQ ID NO: 5870 - DNA, 2000 bp, Oryza sativa
gactcaccatcgatccatctgacggttagttccaagggaaagaagaaatggaggcttcacgcaaggtgttctcggccatgcttctcatggtgctgctgcttgcagccactggtacgtttgattgctcctatggcttgggttttcaggtgagagttcagtaccatttttgatcgtggttgggtcgattgcaggtgagatgggcgggccggtgatggtggcggaggctcggacgtgcgagtcgcagagccaccggttcaagggcccgtgcgcccgcaaggcgaactgcgccagcgtatgcaacacggagggcttccccgacggctactgccacggcgtycgccgccgctgcatgtgcaccaagccctgcccctgatcgatgaaccagcagctagcgcagcagcttgtgccgccacctcgcgcatgtgtcatcgtgtcgatcgatcggatcctagctgccctatgaatgaataaaagtgtgtggcttatgcgtggttttctcttggagaactttggcttttgtggtgttaagttcgatcgttttgtgcatccaccatccatccatcctcccattctgcttgttctaagattatactactacttgagaaggtgatgcaaattgtgctcaacagttaacagctagtctattaatactgcaccgttaattttttaagcaaaaattaaataattacttattttttwatatcatttcgttcattgttaaatatactttcacatacatatatagttttacatagttttacatgtttcataatttkgtttaataagacaaatagttgtggtgtcaaatattttaaaacggaagtaataattattactacctgagatgatgttttaccacacacgatggggtatgtgtttttaccccccgttgggttgaagtgttgtctagcgattgatgctgcccggtgtcacttgctgacttgcatatgatgcgtacacgtgctgaagcccggcgttgtgcgtgtatgtattggagggggctgaagactggcccttaacgctaaagcatttcttgttaaaatgggccgggcttcattttaactcgaaaacaacctcaatgcaaaatgcaccaaagtcatcaaaggtttgttatggacctattcgtaaacaaataggtccaacataatttaaccttcatagagtgaacaagggattgttcgtaataaacacggaccaaaatttaaattaagggaattgacaggggccgcgcgaacgcgtaccccctctatcacaaattatgacgtccactctcccacttggggagatggtaaaccaacgcgctcaccaagtgcaatgtgagccattgatctaggccacggcccttcttgatcggccgtcgaccccgtccaggtaagtatgttgcaacgaggcaccaccagcctattatatagcaagcgctcccacccccatcgcgtcgatttgtcgaggtggtactaaacgagagctggccgtgctcgagaaggattgctattgcggccacagggttgggccttcgttgcgtgggccttactctttttggtgggctttcgcttcggactccgcagcggcgtgtggaccggcaaggcggagtgtgcactagacgcaaaggccacgcgcccacgtgaacccaaagaaagcgtggtccaccgagcggtggaatattcccccgcacccgcttcggaacgagcacgagagatgcggatcggtcggacccccacggtgactgacgtgtgggaccacgcaccgtacggcgagtcgtgggccccggcgtccgcatcgccacgagccggctcagcgtgaacccgttccacaggaagttgcacacagacaggtgggaccgggattgggttcagtatggaccgggtccacgcctcacctcgcctcgggcgccttcttctccaagccgccggcgtcgtcgtcgtcgtcgtcgcatctgggagctcctacaaataggagaaacagtcagggagaccaaaccctaaaaccccgcatccactgcc

SEQ ID NO: 5871 - DNA, 2000 bp, Oryza sativa
ggtcacttgggaaggagaggagctgtcatgctggtagatgtaccattcatgccagcacattggagtacaacaccctatttgtgtattctccctcctctcctctcctctccttaaaactctagcaataaaaatcttggagaagatcacaagagtattctactatagcaaataataatataatgatgcaagttaactaaacaataataccagcatggctgctggattttgtccaacctgagaccattaggtggcactatggcaggttagctggggcattgttccattaaacttctgattaatccaatttctttttgtgattgcgagtactctcttggcttcttggccaggatgaggcgctgtgattggcttgggtgtggttgcttcttcgaggtgctcacgctacttctctctcggaaggtgtgggccccaccgtcgagcaggtgtggggccacacgcaggaatgccagtgtcatggacagtgttaggattatctatctggctgtccctgatcttctgtgggggcaagggtgtgtgttaatgtgtaggtagttatagccgatgacaaaggtgaaattttaaatggcgtgttaacatattgtactcgtgatgtgatcgcacgtattttttctcgatctatataaagaaatctagaacaattcggatagtgatatattagttaatgctatttagcaaaaaaaatcaattgatatttagttgaattaatttgctatatagacaaggtggtagtgttacaatgaagtttgaccaccaactgtcattgagtaaacactattctttaaaaaaggtgaaagttatctaggagagggatattgtcctttttatatcattctaacttcttccaggaaagttaccagtttgatgtgaactcgttatcaacgaatgtcaaaattaaagctaacactatcccagaatagttattctagtgctaaaaaggaaaaaatatattagacaactatgtgatcttctaggaaaacaaggaacaataaataactcattaaattgcataaccatatcacatatagtttattaatatctaaattggacttttcgattttataaaataacagttaagcataatctatgaactcgcttggttgtgctagctatgggcaataccaatagctaagccaagccaaatttcttctagcaataatagggcggctgcactagccggctagccctatatttttgctaatttttccttatgtctttttttttgcaaataaattacttaaattaaaggggtgttcgataatgttagatgtgattaatttacaacctacagctacagtaaaaacaagaggatctatggtggcagctgcagctacggctgtacaattgcaatgtagcatagccgaacatcctctttgtaattttattgggcatccattcagttgataaagaccacagagtcatagtaacacagaggatcctagcaaaaatactcttcctctttctctccccttcsagcgcagcttgcaagcctccacgacccaccatcatgtcatccgtggcttaatgacaccccttccataatcttctccattttgacacttatgcccctgccacctcactgcaaccatggtgtcatctgcaggggtagacatgtaaatctctcccaagttcagggtggctttctggccagcccattatatatcactctcatggcaaggtggctcctgtactactctgcccattgataggctgctggtgatcacaagctacacaacacatcacacaagcaataggcatctctctcttctttctctttctcctccttgcttcatgtaagcttcttcttctctagcttactttgatcatttccatggtttcatgcatgcatgtttagtttcatgatatatatgaaatatcctatggatttttgttctgtactttttttaagaaggggtttttgttatggattttttattgctgttggacagttggagtactagagattaatttcttgaaggagagaa

SEQ ID NO: 5872 - DNA, 205 bp, Oryza sativa
tcgcttgtkcgaacgtttgccgtgcttcaagggsttttcggtgggcccgsttgttgaacttgcgamrgcggcgctgaagtcgccggcggttgccgggarcccggccgggcgcgccgcggcgagggccaccgcgtaccagcacttctgcgccggggagaccgccgaggaggccgccgcggcggtgcgccgcctctggcgcggcggc

SEQ ID NO: 5873 - DNA, 128 bp, Oryza sativa
caaggsgccktaccggggcaagtytcggggttcttctcgtccatcttcccaccggytcttcaacccctcgccggagcagcagccgccgccgccgcgccgcggcgagggaggcggccaggtgaktagcc

SEQ ID NO: 5874 - DNA, 293 bp, Oryza sativa
gaggagaaagtataggwaagggagaatcatttctttattccatcattccacaaaatattttacttttccattttctaccacaattwaagacccttgatctaggagtatggctgatgatcttcttgagtccgtatttttggctttgcaatatatatgatgtaggtatgtcacaatttttcccaaccaagctccacatatcagccttagaataggggtaaattctagcacactttgccttggtgaggatccaaaaagaaaatatacatccttgagagataagagagaaagtcaac

SEQ ID NO: 5875 - DNA, 2000 bp, Oryza sativa
cgcgggcggcgaggaggcgcgcaaccttccaccatggggatgatgtggccctgcgctatcagcggcaccaccaagaaatggagctccgccgccatcccgccgccgatgagtgtgaggaagcaagcaagttgcagtgtgcgtatacaagtcgacgcgacgaggacgacgcctgtgtcgaggcgccgcgccgcggcggcagaagcctcctggaaaagtcgggagggaggggtgatgacgtatgcgcctagcgaagcttcgtcgtcgcccgcctcgtagtcttcacagctgcctctgtcacgtggactcgtggctcccaagtccaatttcaacaagaaagttttttttaaatgcaacaaacaagaaggtaattaattgagttttaattatttcaaatttaaacaaggatttctttgatattttagagcagtttttatacagaaagttttcacacgaaacgtactgtttagttgtttgaaaagtgtgttaacaaaaacaaggtgtgtttagttcacgctaaaattgaaattttgattgaaattggaacgatgtgacggaaaagttggaagtttgtgtgtaagaaagttttgatgtgttggaaaagttggaagtttgaagaaaaaaattgggaactaaaccaggccaaagataagattctgcgtactggcctgaaggcatatatattgccctctttgtttaggcttataagccaacttataagttgaaaagtctaagccaaaacaaacaagtagctttttcatttggcttttttgaagccataagctattctaacactattaagccaaaagctaggttggagaagcttttttggcttaaatgagatagatgtatgactccactactaaacttaggacattaaatccactggcttataaatcatataagccaataagctgacttaaaagtctaggccaataagcctaagcctaaacaaagagggcaatagccatctgcttggctttcttatataggccgtgtttagattcaaacctccaacttttccgtcacatcaaatgtttagacatatgcatggagcattaaatgtggacgaaaaaaaaccaattacacagtttgcatgtaaatcgcaagacgaatcttttgagcctaattacaccatgatttgacaatgtggtgctacagtaaacatttactctactagtgacggattaattaggtttaatagattcatctcgcagtttacaggcagaatctgtaatttgttttgttattagtctacgtttaatacttcaaatgtgtatccatataattaaaaaaaatttagcacacgaattaaacacagccataatgagtttaaatgttagcacttcaaatcacatgaaaccaaggttacccttatcgatgggtttattgcacagttgccatgcggcaattgcggtaaccacaacaaaccatagaagccatacaaaatttatcaaaatttcagactattttttgaatctatttaattttatttttggtaccctagcaataagcacagttaccgtcagttttataaatcctgcttggaagtattttcaagctgttcattgagagagacaatagaggaatatctcatactcctaccttcttttggaatttcctctgaccaatttcgaatggatagtatccatagttcttctagaacttccattactacacactacactcccattcacgaggtcaggagtccatagatgacgagtgaacatgcgtcactccaagttgaaagtttattttgctattttcttctccggcatgatcgctccatccggcaagttgatacaagcaaaccggccctccgattgtttaatcgtccacacgtcactctcctttgatccgaagctcattgactcaaacgccataaaacaacttcgccacaattcactagcaacaaaccacagccatggacgacgacaccgcccggccamgcctccggcggctacacgacgacggcggcggcgcacttcgtgctggtcccgatg

SEQ ID NO: 5876 - DNA, 2000 bp, Oryza sativa
atgagatcgtcaaagtctcagggttccctacgccgctagagttgccaaaagctagatgccctggaacactgtgcgttccaggtctgaagcaaataagtgacaagatttacgaggctgagacgcgaagcgatggcaggatcatgaatagcttccaggagatggaatctctgtacatcgagtcgtttgagcgaaccataggtaagaagatctggacgatcggcccaatgtgcctttgtcacagagacagcaacgccatggctgctagaggaaacaaggcgtcaatggatgatgcgaaatgtttgcaatggcttgattcaaagaagcctggttcagtgatctttgtcagctttggcagcctctccagcaccgaccctcagcagcttgttgagctggggctgggacttgaagcttccaagaaaccattcatctgggtgatcaaagcaggaaaaaagtttccagaagtcgaggaatggcttgcagatgggttcgaggagcgcgtcaaagacagaggcatgatcataaggggctgggcgccacagatgatgatcctgtggcaccaggccattggagggttcatgacgcactgcgggtggaactcgacactagagggcatctccgcgggtgtgccgatgatcacatggccacactgttcagagcagtttgtgaatgagaaattggtggtggatcacctgaaaattggggtggaggttggagtgaaaggagtgacacagtggggaactgaacaaaaagaggttaaggtgacaaggactgctgtggagacagcggtatccatgttgatggatgaaggggaagttgcacaggagattaggatgagagcaaaagattttggcatgaaggcaagaagggctttggaagagggaggttcttcctataacaacataaaactattaattcaagaaatgggaaacaagcaaaatgcatctggttgatacatatggaaataagctttattttttcttaattgtaaatctgtaagcaagaactggaggatcctattgtgcttaccctgattttcatccctcaaactataaagaactgtactctccctctgattccaaatataaatctttttatacttgtgcaatttgtataagaattaataaaaacaactctaatgaatttgttgcccttcatctacagtatactatatcaagaaagataaattatttatttttaagagggatatagcatttatttagcaaccacaaacattgaacaatagtaaaaaaaaattgctaagaagctctgaaacgatatatatttgggtaagaattgagaaagactcaaatgacttacatttggagcccaacagtcccaccagcttctgcagtggacgaggttcccaggaccccttgcggatgagaagagtattctacaaatgatcagtgtatagagtggattagacctggtcttacatcactttcgtaattgctgcttcgattcctctgaatatatgaatgcaaattttgtggtcaaagtcaggcatagacttataaagatcacaaaaggaatttccttgtaccagataatgcagaggccagggagtatctttcgattttaagtacgtactgtattgatagcaactgtggcctctgtggttgcataaagaatggaagaagcttcatgtacgagggatctagccacgagtccatgactagcatgcgtcactgaaactgaagttgccaaagtctagcaatactgttctttttcagcacgagctcgaactggccgagttgatagtagtacaaactgttggcgctgcaatactttcaacccgtcactttcctctgatccgaagtggcaggcaccacatatgcactcctcggttgctgtcaagtgtcaagcttctcatcaactcgagcaggcaagcagcacacgacttctcggttaatgcatacctccaaggctccaactgttcttgtcacactttcactgtccacgcttgtcttggccgcttgactagatacaaccacacagcc

SEQ ID NO: 5877 - DNA, 2000 bp, Oryza sativa
cacaatggctgctagaggaaacaaggcgtcattggatgaagtaaaatgtttgcaatggctcgattcaaagaagcccaggttccgtgatctttgtcagttttggcacccttgtcagcaccgsgcctcagcagcttgttgagctgggactggggcttgaagcttccaacaaaccgttcatatgggtgatcaaagcaggaaataagtttccagtagtcgagaaatggcttgcagatggattcgaggaacgtgtcatagacagagggatgatcataagaggttgggcaccacagatgatgatcctgtggcaccaggccattggagggttcatgacacattgtgggtggaactcgacaatagagggcatctgcgcgggtgtgcctatgatcacatggccacactttgcagagcaattcttgaatgaaaaactggtagtggatcacctgaaaattgggatggaggttggagtgaaaggagtgacacagtggggaagtgaacaaaaagaggctcaggtgacaaggaattctgtggagacagcagtgtccacattgatgaatgagggggaggctgcacaggggatgagaatgagagcaaaagattttggcataaaggcaaggagggctttggaagagggaggttcttcatataacaacataaggttattgattcaagaaatgggaaacgagcaaaatgcatctggttgatacatatatatgggaataagctttttttattaaaattctagatctgaaagaatgaattggaggatactatcgtacctatatacttgtaaggatgggaggagtccatatttggccctttaactatggtcttgcccggattttcatccctaagaattgtgctcccttcaattccaaatacaagccgtgtaaagacttgtgcataaatatgatttatttattagaagggataacatttatttagtatggaaaatctggaagaatagtaaaaacttctgtattctaaaatgacttgatattgagaaagaatcgtgaagcataaaatggcttacatttgcagcctggcagtccaccagctcctgtagtggaggggatttccaggatccctgcagatgcaaagagggagtattttacaaatgatcagtattattgtatgaggctcgtttgtggcatgattgtttacagtctggattattaaattatatcactttctgtttctgacactcttgcccaagtttcctagttacttctgaatatatgaagataaaaattaggaatagtggtcaagttatgccgtagacttcgaaagaaaaaaaatactgaatagtgagactgcagaggacagggagtatgagtatgtatagcaaccgtggttaacctgaccaaccgcgttgtccggacggctcaaagaatggaataaactcgaggactttggctatgagtccataactataacatgcacaccaaagttgccaaagttcagcgatgctgttatccytttcagcatgagctcaaactggctgatttgataggaggacaagctgctctgcaattatttaattctttttttgaaagaagctgcaattatttgattaatcggcaacattccactttcctccgactccgagatccgaagcatcaggcactactccgtagcacctcaaagcaagtactatgagcatccaagcacaagccccaagatgtcacataggactaaattgtgaggtggaggagagaagaaggatgagagagaaatagtcacctctcatgcaaggggcagcccctacacaaactttaataaacatgtgagagtgttagaaatattagggattgtgtggtagagatgacctattatacatatcacctcttaatttaattatctatgttatgtataaaattagatgcgatagtcacctccaatataaaacttgccctcagactgcttgcagtcatcaactcaaacagcatacgacttctccagagttattgcatacctccgcttgactagatacaaccacagcc

SEQ ID NO: 5878 - DNA, 2000 bp, Oryza sativa
ctacaaacgctcataggccgttacgtggcattctacaatcccatcgtcgattttcatttaaactgttgcacccattagattatatctattttaaaagttcatcatcgatatttatttaaattgatggacctgttattttagaacgtaagattatatcgattttacaaagttatttttaataagataaccgatgttatcatcacaggttacatattgtgttagaaagattatatatataattaaaattatgctcatcatatactacattaaaatccataaactttagactacattaaaattactcatcagattatacatgtcacattatgcctgttacaaagatctcatacaattgacagctcatgccatcgtcatatttcaaatatgttatttggttgcccataaaatatgatacccttgaaaagatttttttatttacagtagcatcgctaaaactctatggaaaaacagatctaatcattaatcatttatggtaacaaattatggtgtgcatcttttgactaccttaattaggaaagaaaagaagagattgatggggaggaatttgtacgtacatacacatgtgggtctggccaggaggaaaaaatgaaggggattaagttttgatctaatggttaatagtatcgagtccaccgttttaaatgaaaattgacgggtagatgtttttcttttttcatatttttctgtaaattattaaagcgtcacgtggtggattaggagcgtttgtagggtaccacatggtggtttaggagcgtttgtaggaagtttaatagacttttagtatataatagatatatagattttgccttaatgccatgtaagcggtacttaagataaaaccaccatgaaaaccgctcggggttttgacagtggagagaattatctttgtatctggttttgtggtcgatacaggttatagactttctcccttggtcaaacaaaatatagactctttccttattgaaaaggaatgctttgtattacccacattatcacttgcattttctccaattatatcataataaccatttaacttaaacaaaaccatatcatttcatagccatttattttaacttatatccatactttagaatcacccatagatacaactccagtaaccaggagcacattatatacaaatactatcggtatccccaaggtatacctaggtttactgcacaacaactctagttggccaagctaaaaatgctaaaacaagtatctctcccttctgcatagtataaaatgcatgctcaggttattgctcggaagtatttggttcaaggtgtgccccaacctacttttacatccacattgtaacattgttactcaatgggaagtcttgggcccatcgatgccacaggtgtaattagctatcctgtgaaaaggtgtattggatcatgcttgaagaatgatgactataagaacttattgtaactaggtcaatccgaaacactttattaggacaattatagaatactggatctgccactatattttctattaatttagaatttgatacaaaattagttaacggtaattatgcatacaacttgcattgtttctttgatgttccatttgggatgcaaccatcaacttcctctgttgttacttagaattccaactataaattcttgcgaaaatgctagtgattgtatgacatgccttcaatatggccaatgctttcttgtaaaaaaatgtatatggccaatgctccaaatttagtatgaccttactatggaaggtaatgtaaactaaacttaggttaatttcatcctcaaccacacattcaagatcttgcacatgcacaaaaggaacaccacgcaaagatgacttctcattatattgaaaaactatcctttttattcagtaactaatgatcttcgattgttctattaaaaaaatattggtccttggccatttcctaatctgagttgcataaaactacatatgttcccatggtcttccattgagagaaa

SEQ ID NO: 5879 - DNA, 1780 bp, Oryza sativa
  misc_feature (1)...(1780): n = A,T,C or G
tkgcgcyttgccggccgggggcccttgccgcttaaactggccgmaagcgatgcggctgytgcctccgggcgcgaccgcagctgccgccgccgcytngcccgcccgcgcgcgcccgcggccatcgcctcgccctcgccgcctcgcgcgcacgtagggggtgggaggatagactcacccatgccttatccattccctcagggtacaaaggtaatttcttattttctaaaaactttttttttatttcctttgcaattctttaacacaaaacgtgggacctaccaaacggttatcacaagtgagggtagacggttggttcagatttaaaagtgaggggtaaaactacaatccctaaaaaatgagggtaaaacagcaattggtttttaaagtgggggaatagatgcaatttttccttgatttaaaaaaggatcgtataggggaatcatcgggcatgccatggaagccttgtttttctaccagtacgccaaataatggaaagtactgtttcacggcttaatgactagtaatgtactgtgtacatgaggaaaacacaagggaaatatataaggccaagccatgttggtcaggatgtgccgcatgcagctggcagctggcagctggccagtgatggtgatgccctagcttcgtgtccccctacgtacgtctccatggacggatggaccaagcgtgtaccccctttcccattatacatcgacgtcattttttttttcaaatggttttctttaaagtatttggttggaatttggaagaaaaatatatacgaggggacatccccttagggattaaaatccatccccaacttaattcctatccccctaaatacttactctctccatcacaaaacaactccatttttagcatctaccccatccgtctcattttaaatgaaaccaggagtttccgtgtccaactttaaatgcttatcttatttacattttttttataattagtatttttattgttatgagatgataaattataaataatactttatgcatgacatatgtttttaatttttttcaaaatttttttaaataagacggacgatcaaagttgggcacgaaaaatcatggctgcacttaaaacgggacagagggagtaaattatatcaaaataagcttatattttaagcaactattgtacgtattggatttcataaaggttaagaacaaatatattatggctagataaagtggacatttacattggagtttgattaagtgaaaaggcatatgttttttattagagtgtgtgaaatcaatgaaaaatgaagttattttaagacggaggtactacaaccctttctaaccaaggaatatattatatgcacacaagttttccgtgcaaactctgtgcacaccaactagcaaatgtcgtaaaaaatttagataatattataaacatacttcaaataatattacacctacatgtgaaatcttattttcgaatccattatatttttgccttaaaaaggatataatcctgatagaattttactattacctgtcaaagttttcaatttttttgttacggttaaaacataattattgaatatgagactttgcatatatgtgtaatactattatgagtaaatattcaattttttatagaatttttcgtggcatttgctagttattgtgcaactgtgcacgaagtgtgcacgtgaagtttgtgtgatatgttttcttctaacccttttatattttcattgcgctgcctaacatcgatctatatacccattaacagcaatcaccaataagta

SEQ ID NO: 5880 - DNA, 2000 bp, Oryza sativa
tgcaagtgaaattaaatctgggaattgggggggggttccggggttaatcaccaccacacatcccccgagaccagccgaaaacaaagagcagattgccccaatttagtgcaagaattgggcttattatggaatgactagccgaattatcggctaaattggtttttgacttttagatcgcgaagctcggtcagcgcggggaagacgaagagaaagcgggggacccgtactatagttttgagtgatacccctgtcgttgaggttatttacgaagatggcaaccgaagaaaagtgcaaaaaaggtcccaggaaaaggtccgtgagaccgtgaccacgaccgggatgtgttcttgcaaaagggttgggaaggaaccggaacaagcagcacaggattgttgcgttgcgcgtcggccaaacgctcgccgcgacaagctacacgtatacgccgcgacgcgatggcataataaacctcatccgtccacggccacgcgcgaccaaaaaagcgcggccgctgatgtccaccgaccaccgctcgcttcagcggcagcctctcgctgattacttcgcgttcgcgtgatacggaacggtgggtggtggagctagtggtgtgtcgggaggcggatgggatcgcgagccgagtcagatcgcactatcgcgcgacagcaagttcaataatacagccgactactaacttcaattcatctatagccaatctaatagcttattcatacaatagttatatactacactattaatatctggtcccacctgtcatatacacactgcgtcttagagtccgtgctacagctggctacaaatctgtagcccgctamtcttctctctccttatttatctttttaaaatatgtttgtagctagcttatagcctgctattatacctgctcttaatctgaagcttatctgcaacggtgattactgtgagcttttagctcgtgcgagtcgtggaaaccacgggtgaacagtcacaggtcgatttccgagatcacttcgcactgtgctaggcgattggagtactcctttctgtgaacgtcgactcgacctcctctttgtgggacatggtttttgagtacttatctacgtttaccgcacgattgtgtttgaattaggaattaatccttctcgtgaacagacgaagtcgcgctaggactcatcgcatgatcacgtggttgcgcttcaagccaatgaatgtaggtttgctagtaaaatggattagggtcaactaagctctcacagtttgggtgagagcttatcagcttaagatgggcaatcatgccgtatgggccatagcgcgaggcccagggagaacatgagcagattgtgccctatgaacccttttcttgccttgcaacggggagaggggatcctttggaataagttcatctaaggtgccttaactttgataacgaatccgattttcgtccttcaaccgcaaaaccagatacaaggggtccctcaactatcaaaaccggtgcaaattaggtccttcagcggtttcgatggtggttttggctgatgtggcgtctacgtggctaattttgacttggtcttgatctgacgtggcgcttacgtggcaattcaattcggaaaataataaccccgtgggatccatatttcagtttcacacacaataataataataataatggtgggacccacatgggccccagatgtcagtctaactcatcccctcctcttctgcttcatctctctccttctcccctctcttcatctctctcttgcgctgggtcattctgattctcctcttcctcatcttctctgtcttcatctctctcccctctcctctctctcttctcttcggttgacaggcggcggggagagggcggtggccggcggggagaaggggcgcgacgcggcggctggcgggagggaaactagcggggagaagggaaccagcccggcggcgccgccgcggccgtggctgcggacgacgtcgacgtcgacctcagcatcctcggcggcggg

SEQ ID NO: 5881 - DNA, 2000 bp, Oryza sativa
gaggagaatcagaatgacccagcgcaagagagagatgaagagaggggagaaggagagagatgaagcagaagaggaggggatgagttagactgacatctggggcccatgtgggtcccaccattattattattattattgtgtgtgaaactgaaatatggatcccacggggttattattttccgaattgaattgccacgtaagcgccacgtcagatcaagaccaagtcaaaattagccacgtagacgccacatcagccaaaaccaccatcgaaaccgctgaaggacctaatttgcaccggttttgatagttgagggaccccttgtatctggttttgcggttgaaggacgaaaatcggattcgttatcaaagttaaggcaccttagatgaacttattccaaaggatcccctctccccgttgcaaggcaagaaaagggttcatagggcacaatctgctcatgttctccctgggcctcgcgctatggcccatacggcatgattgcccatcttaagctgataagctctcacccaaactgtgagagcttagttgaccctaatccattttactagcaaacctacattcattggcttgaagcgcaaccacgtgatcatgcgatgagtcctagcgcgacttcgtctgttcacgagaaggattaattcctaattcaaacacaatcgtgcggtaaacgtagataagtactcaaaaaccatgtcccacaaagaggaggtcgagtcgacgttcacagaaaggagtactccaatcgcctagcacagtgcgaagtgatctcggaaatcgacctgtgactgttcacccgtggtttccacgactcgcacgagctaaaagctcacagtaatcaccgttgcagataagcttcagattaagagcaggtataatagcaggctataagctagctacaaacatattttaaaaagataaataaggagagagaagaktagcgggctacagatttgtagccagctgtagcacggactctaagacgcagtgtgtatatgacaggtgggaccagatattaatagtgtagtatataactattgtatgaataagctattagattggctatagatgaattgaagttagtagtcggctgtattattgaacttgctgtcgcgcgatagtgcgatctgactcggctcgcgatcccatccgcctcccgacacaccactagctccaccacccaccgttccgtatcacgcgaacgcgaagtaatcagcgagaggctgccgctgaagcgagcggtggtcggtggacatcagcggccgcgcttttttggtcgcgcgtggccgtggacggatgaggtttattatgccatcgcgtcgcggcgtatacgtgtagcttgtcgcggcgagcgtttggccgacgcgcaacgcaacaatcctgtgctgcttgttccggttccttcccaacccttttgcaagaacacatcccggtcgtggtcacggtctcacggaccttttcctgggaccttttttgcacttttcttcggttgccatcttcgtaaataacctcaacgacaggggtatcactcaaaactatagtacgggtcccccgctttctcttcgtcttccccgcgctgaccgagcttcgcgatctaaaagtcaaaaaccaatttagccgataattcggctagtcattccataataagcccaattcttgcactaaattggggcaatctgctctttgttttcggctggtctcgggggatgtgtggtggtgattaaccccggaacccccccccaattcccagatttaatttcacttgcaatctgtgattcttctggtgaggtgcaagtgcaacgacaggtataattgaactacaaatcgttctatttttcgatttctagaaattaaatttgggatagtcctccagaaacctaatcctttttgtcacttagggtgttcaagtttgttcttgggcgttcttggtcctttggggttccaaaggcgacttctttcgagaggagggaaagaagggaaatgaggg

SEQ ID NO: 5882 - DNA, 2000 bp, Oryza sativa
cttatctagaaatatcttgtaatatacctcttgcaaaaataacatatggcttaaatctagccagtaacaaccggtaaaatgttttcgaaacattggcaacatcttgtgctctcgctgttttagttggagagtattctagtccctgaggggatgtcttctcatatatcttttttttttctttctaaatttgataccaaatacttgtaatttttttaaataaactgataatgtatagtatagtgatatctatccaaaaattcaacctagatgttgagaagaaaaaaaaataaattcatatataaacaatatgctactattcatacattctgtttttttcttcatatgggagtgaaagggcctgtagcctaatggttacaagagcctcagtggcacctgaggtcctgggttcgacttcccatgggagcggattttccaggatttaacggcgttgtgctttcagtggtaggcgacgtacccgtcgacagcgaggcaggtgcacccatctagctaccccttggtcgaagagagttacaccagattttaggagacatcacctttagcacctcttggcccttatctctactctatttttctctttttgattgtacatgatcttttgaaatgacataacctcaatctaatcgattaacatcctagaaaaatgactagtcaccactcactactagacgagggtgtcgttctcgtgacaagacctgcatcgatggtacgtgcttgttggcatttgaatcaatttgatccgaaaggtgctgaaattggtttgtggtgtgcaattttatatcttagttatgccttatctagaaatatcttgtaatatacctcttgcgaaaataacatatggcttaaatctagccagtaacaaccggtaaaatgttttcgaaacattggcaacatcttgtgctctcgctgttttagttggagagtattctagtccctgaggggatgtcttctcatatatctttttttttctttctaaatttgatacaaatacttgtaatttttttaaataaactgataatgtatagtatagtaatatctatccaaaaattcaacctagatgttgagaagaaaaaaaataaattcatatataaacaatacgctactattcatacattctgtttttttcttcatatgggagtgaaagggcctgtagcctaatggttacaagagcctcagtggcacctgaggtcctgggttcgactcccctgggagcggactttccaggatttaacggcgttgtgctttcagtggtaggcgacgtacccgtcgacagcgaggcgcctgtggtgacttcctcaatctctccaaaatttgtcggccagtcttcgaaaatgctcataggggtagggtgagtgcgcgtgcgttgtgagtgtctgcgttgtactgtgtaattctaaaaaaaacggttttaaattttatgttttattttcaaggatgttcgaaatacatattttatttttttccgatcatgaaaacataaatattaatcctaagaaaaaaaactgaatatcagttttggattagccaagcagacacttatagattggtaacgtaatctttaggctttttaggagtgttactgtcacgtcatctagaggcaacagcttggaatttgacctgaccccttaagctaaaacaagtggccgttgtggctcgttgacagggaggggtcaaagatccatcgggacgcatggactgatgaactgtatttttgtacagtacaccatcaatgaaccctaattaaaccttagtgaagagtttgtttggcactttccaagcacctccctgcttcattgcttcaccttgttgcttgctgtaatagagctctcttcttgggccaacacctctgaagatttaatgctcgcttggaaaccctgttcctctcacttcaacaaattcttggcctttcttttggagctcccgtttggcctgagaaagagaggattgctccaggaatccaggtcacagctccagcttgaaag

SEQ ID NO: 5883 - DNA, 2000 bp, Oryza sativa
caccttgccttatccatcaacaagtcagccgttccaagcgtacaggatctggctgaatccgaccgacgatatcgtagcggtaggtcgccgactgactagctggctgctgccacgcgagaagaagcccggttagcagatggtgacgtggcatctagtgaagtggctcattctggatagggaggcaatggatctttagtacgagtagctttcttaacaaaaatgaacttaatttaaagtgcacgagtatgtatgtatatatatgtatgtatttgcgtgtgtatatatatcatggtcggggtatatttaaagagggatggaatgcaaccggtagaattagcgaattttccttgagttgtgtttgcttttattgaaccaagccagctcacacaagtcaaaaaccgtgaaattcaagcggtttttgatgcgtttgctataaatatttgatagtttatgacatgatttaggcaaacttttaaaatatcgaccatcaattttataccatgttataattaaattggatttctcagtgcaattttaagaagactaactaaattggatttgttatacaacctttagctcatgctttcatatatccaaatacaacatgcaaagtagtattagatttaaattccctagattgaaaattacaactcattttcttctatttttatatataccaccatttagtatataattattactatcaatctacacagtcataatttgatcccaccatgatcaaaggccttttttttttaataatttgataatctaacgtcaacttttttggggttgctttttgaagcatgaaaagaaaagggaggaaaaggaaaaaaaatcagaatatattgggttcacggtacaaccgaccagacaattgataactgagagggaaaagtgtattaatctcttaagagaatatctcatcgttttttttacatgtcatctaaatggttataaagatgcgaaagggcctatagccttttttaatctccaggatttgccaacccaattttcgaagatgctcatagtcataggggtgagtgtaataaattgacaagatagattgatgcccagttttcaaaaatgctcataggttaatctctggaatttatcggcccagttttcgaagatgctcatagtcataggggtgagtgtaataaattgacaagatagattgttgcccaattttcgaagatgctcataggttaatctccaggatttgccggcccagttttcgaagatgctcataattatatgggcgagtgtaataaattgacaagataaattgatgcccaattttcgaagatgctcataggggtgagtgtctgcgttgtactacgtaattctaaaaaaaaagttataaaataaattgacaatataaattgatatgaaatatactccacgaacatgcaagttaaaattcaacttctatatgttttaacaaaaataataaatataactacgagcgtacgataactatttttagtttaatttgtcttttttacaacatttagaagtcgaatttaccgttacatatttgcggaataatatattgcctattaatctatattgtcaattttttgtaaaataaatttatagccgtttaggtaatatgcaagcgtcctctggagaaaggaaaatccatatccaattgagaggaagcagagggggagagaggaaggaggcaggaggctgccataactccgcccgcaacctccgctctctgtctcgcggtgacctcgtacgtacccccgcgctagctgttaatggaaacgccgcgccctctcctcctcccttcccatcatcctcccgcggcctcgccctcctcttcttcttcttcctcctccttcccctacagatagcgaagcgagatggattgttgtagataggatacgcatactgtggctcttcccccctagcttcttccatctcctcgatcgtgttcagtttgattttggttttcgcttgtcactgtgtgggtggtggtgttgttggcc

SEQ ID NO: 5884 - DNA, 2000 bp, Oryza sativa
  misc_feature (1)...(2000): n = A,T,C or G
gtgtttgacaccgttgactttttagcacaagtttaactgttcgtcttattcaacaacttttgtgaaatatgtaaaattatatacctacataaaaatatatttaacaatgaatcaaatgatagaaaaagaattaataattacttaaattttttgaataagacgaacagtcaaacatgtttaaaaaagtcaacggcgtcaaacatttcgaaacggatggagtatatagtgtatatgcattgtatcatgacaacaaagcttgttgagcagatgaaccaaaaatgtcaacctaaaactactgtagtagtacatctgtttttaaaaggatatgatgttttgggcatcgagatacatagtctctaatgtacatattttatcattactttatcgaactatatatttatagaataaatataaaaaatgtaactatacaatatattttcatggaaaatctactaatattatttttcatattttaaattctggtaatctttttttttacattttgagccatctatcgcacttcatgttaatcactttatagactcaactaactatatttatatgttgctatgtgaaaaatgaaaaatgtcaggaattaatgtatacactcctacactaatagggacaggtttactaaaaccaaactaggatttattatctgccaatccttgaagagggtaattgatccgggcaatccatgggagaccaagcatgtacagtctgctgaatagtcaagtaaaaaacaggaatctaatcaggaaaaaactggtcgacgtggacacgcataaaaatcatttctagaactcccagaaaattctaccacactatcactatcactatcaccagagaccagcacacaatatatacctgtagtataaacgccaaaatagatgagacatttagctttggtatccaggcactaattactgcttttcacccccaacaaacaccaggagctagctagccaaattaacacaaagggattattttccacctagaattttctgttgttaaaaacccctagaatttttcgtatttattaactacataattttttagggtaatctagataattaaactgtcataaatatattaatacctcgataaaacagtacataattaagtatgtacatgcgtgtggtttcataattccataaaaagacaaacttaaaagatttaggtaaagatgtcatcacaaatctatcacactggccctratagccaatgggtgcatgggcgatcacatcatctccccttgttgactcacaataacacaaacccataagaccatggtatatacaatccatcagcacaaatactatatatgtgtggccatacngawtngracaaaaccatatgccctawatgtcatacacatgtaatgkggttaattaattatattgaagcatactaattgaagataatgtaggaattgaaaactcgggaatagaaaaaaaaaacttattcacatatagattggaaaacaaagtaacatttataaagtcggcatttttgtacgagttgaaaaaacacacatgaattttcataaaaaaaaatcacaagtgaagtgaccaatatatcatataacacaattagttatgtaatcctcataaaaagatataattgataatgtaagtcgtcatcatataagaaaagctccaagtgaccacaataataataaaataaaatactgttgttagcatcatctcctacctccatcgatccatctatataacccatggtggctagcagcagtcgcccttcctcctcaacctctcagaggcttcacctttcctcagcttagctagctagctgctcgatccggcggcgtgatcgatcgatctctctgattctatcgaggtgttcgaccagattccatcgatggacagcacgagctgtctcttggacgacgcgagcagcggcgcgtccacgggcaagawtgcttcayggcggcggcgtcgaaggcgctgcagcgcgtgggcagcggcgccagcgcggtg

SEQ ID NO: 5885 - DNA, 1786 bp, Oryza sativa
tgcatttatcgtctctgcaaataatactattcatcaccatgtttccatgcaatttgttcggagcgaaattaatttatttggaaatataatcacattagttcaaaatataacataattattatagttctttttttttataatggattaaatctggtctttgcttcaatacaagctacaactacttgttacaactgtaagcatttctggaggtttttatgtgaattgaagaagtaccacgtaggtgaaaatgactaggaaaaggttgtaatttagttgggaagagaaagtaggtaatgagaaattaaacaaagatatgaggggtaggtggagagatagtttcatttcgagacaacttgagtgtagtaatagccttattttggatggaagaagtgcatagccaccaacaacaaggaagggacacaatttattcattagcctacaatggattaattctataaaatacatattgtaatatctttaaactatattattaatataccttggtatagagttatgatctagatttatcacgcaaattgtatagatttttagatttgcaaaagaaaaaaaattcgacagttattctcccctaaacatttgaattttcatccattggacatacttcaagatacgtgatgacgagagaggggaggtaagattcgcgtgggctagacgggaattgaagctgggacacatggttctcctctcgtcgtggtaactatttgtgtgctagtgggaatttgtgatatataagtgcaagttagtataaattatattctagttacatgctagttattacaatgtaattacaataatttattgtgtagttatattggaaagtttttcatcgaattttacatagctagctttctttcgtagctttctttcagtaagataatactataaatagatttattattattatttctggatgatatatggatactattttcatcccaaaatatagagataatcccttatatactactgaaaattggtctgatcccttatatgccactgaaaatttgctattcccttatataccatttatccaaattttywcatcctctcattccactcccttcwttttaccgtgtatttwccattaattctcaaggawwwwwtacttatttwcccttcttattatakkacatgcctaacaactcagagagggcaaatatgtcctttttacttgagagttaacggtcaatacacggtcaactgacgggagtggaatgagaggatgtgcaaatttggatcaatgatatataagggaatagccaatttttcaatggtatataagagatcagaccaattttcagtggcatataagggattctctccaaaatataagacactttggattatccataatatttttggaggaagcagaagcagagtaggagcgatgtaaactgagtaggagtagatgtaaagtgatcccacgcgcaggtatctcgttgcttgtaccaaagcttgcccataaatttccaagccttaaactgtctacgcaaaacacaagagagagagagagagagaggaatgagctgaatatataaatatgttgatggagacatgcgcgcgcacaggagacgaacgacttgcgaaaagttcaccttgcttagctttatggagtaccagtagtcagtttgctttcttttctgcatattattatatatgcaacgacgcgacggtcagatcgatttatagcagagcagtagttacgttgatcgatcagtttgagagtttgctagcgctagatagagctatagtatagggctcgaag

SEQ ID NO: 5886 - DNA, 2000 bp, Oryza sativa
taggtcagcgaggccggcggatgtgtgctccactgcaagcgacgcgcaagcgcggcgacgtcgatctaggcaaaggggacgactccccacactggctcagcaccctctcctcttcgccggctcggcacgccgtcgccgccgccgcctcctctcctccactctccttccccaatgccgacctcgttcttcgcctccacctcgacccctgcccgacgacgacgcggatttcgaggctagcgaggatcaccaggagggtggcggcagggagggaggataggaggcggcagcggggagggaggagaggaggcggtggcgaggcttccttacctctgctcccgccgtcctactgctcatgccgagccactctgtcgagctcccgctgcttcactgctccaccgagctcccggctgccgacaccaacaccgtcgaacatcgccgtcaacccgccgtcctgctgctcccgctgctcgggccgaggttcccgccgctcccgccatcctgctgctcccgctgagctctcgccgccccgctcgctctctccatctcgatcgacactgagtataaagagggaagagggaggagctgagtaactgacacgtgggcccaattttttttatttaggtttgtttttattttgtgccacgtaagcgtcatgtcgatgccacatgggatgaagaccaagtcaacccgtcacgtaagtgctacgtacgacgaaaccgcctccaaaaccgctgggggagttgatttgcaacggttttatgagttagacgattggttatacccggtttttgcggttgagggtgcattttaaccagacccatgagttgaggacttattcctatgctagtgtccttgtttgctcttgtgggaaagtaggagggaagtttattctgctgagttcccctttgctgagagcgtcaagtcgatcttcaaccacctgtgctagctactccactgctccataggcaatcatcaatcagtaatccgttctgaaaagaagatataggtgtgcgcaatcaggaacgttctagttcgtgctagaaatcagcagctcctaagttagcatctcgatgacttaaatgctcgctgcgggcgtccggcggagatgaagtttgtgataaacttggtcatgacattcatatatgtgcctgtgtacggagtattcatcagcaaacatacacctacttctaccttatccatttggattgctcatggcggctttgatatggaatttgtaatgaacttggttatgacttatgacatactgatactcgtaacattcatagatactgacataaattcatcaactacaatagatgagatggctagtcttagtagaacagtagtctctctttccggcttgctccattggctgatgacgatgaacaactcggactcattgattccagcattatctgattctcgcatttcgaggtccggattagggtctcaccgagatgtggatagaattgccatgtcaggaattgaaggaggacgagccatatgtgcatatacatgacgggagatcaagcggccagtcaagaggctaactgcaaccctattatatacgatcagcctgctagaacacgtagcactgtcttttttgtctgaactctgaagatgaaagttcagagaaatgctcgccttatccaagccggcgatggatggaggaggaggtagccggcgcccgcctcaggcagtcgtcgcgatcacgccgccgcatcccgtcgccttggagaccgggccccgacgcggccgacgcggcgcctacgtggccatgctttattgccttaatccatatccacgccatttattgtggtcgtctctcctgatcattctcattcccctgccacggtgaccgtgcccccggtgttctatatatgccccccgacgtcgaggtcattcgccacgaacacatcgatcatccatcatctacaagagatcgatcagtagtggttagcagcaactcactatcgaacacggtttcagcttacacagat

SEQ ID NO: 5887 - DNA, 2000 bp, Oryza sativa
agagccacataagccatgacacaatccaacaagcgccacaaaagtcaagagagatctatagctacctataatctcgtcgagttccaaattgaggaatctgacgattgctagcagagtactcaatcgaggaatctgatgattgctagccgtcaaccacatgcttgacttttatgccgctatactgtcagactcctccccattgtacttgtgagagattgattttataatggcatctgcttcgaccaacaggagtagcgctattacccgtcaaagggagcctgaacctatacaaaaatatgtctcccgtctattttaccacaatcttgcatatgccatggtatcaacatcctcaatacattacaaatatcatagtcgggtacagtccgttgatagaaagggggagggggattatcttgttagtagcttttaatgttgactcccttagcactagaattagctttcagatgtgcatatctaattatggtttcaatccaacggcataaaatgtgacaaaccatagttcaccttatgtaaatcaacaacgttccatcaaattagtatagttccttctcaagatcaaaagtaaacgcaaaggacggttacatagctttagtaaaagaaaataagaaaattgctgtggttggcatggggctatagtcatctggactgtgtggaaggccagaaatacagcttacttcaaaaacaagagaattaaagatcctactgaactaatacatgaaggtttttactggatcaattcctgatccattatgcagatatcggaggactagcgaagaatactgcagctggggttggcgctgctaatgagaggttgccgttaaattatactccctccgtattttgaccaacgtttgatcatttgttttattcaaattttttgtataaatatgaaaatatttatgtcatacttaaagaacatttgatgatgaatcaagtcacaataaaagaaataataattgcattttttttaataaaacgaatgatcaaacgttaaacaaaaagtcaacgtcatacattagaacataaagttagtataattcaaagatatggatgaaggtcacaagcaatgcgcttgacgtggtgcaaatctggagttattgagctttccattgcatgtctgtgattgtaccaagtcaatcgacgtttgctgttttctttgcaaatagtcctagactaagttgcttgcagttgcaggattatggtggattggtgacggagttggtgcttatggcctttgttttctgtcaggggagttgtctgctctgcaggtcatataaactctgtaaaagtgtatattggcatttcgtcgatgaaatgggagaggatctcctctcttttttcaataaaaaaaagtaaatgcaaaatatatgtccgttgcaccgatctcctttccaaaccgaaagtttccctgccggcgcttgatccgtcacaccgatgacgcgacgccggtagaggcccggtacctgttcgaacaaccaactgatgtgcggctcctccgcttgcggcttgcctcttatcaacgtatcgccgtttccgtcatgcgtgatcggtgatcgatcaccgagagagaccggacgacgagtcgagagagctcgcgcgcgcctcgatcggcgcggcggtgactcgagcagggcctgaagtagctgcacggctcaaggcggcactccatcaccggacaccggggtccagactactcgtttccgttggagaaataaccacctttatccatgttgcttatccgtgaattgcaacagcattgattgttcgcgtttaattcgcctcggccatgtaacctccgacctgatcctcttggacactataaatagaggccagttcaggcaatgcaagagcagagaagcagagtacagcaggcagctcttcttctctttgcgaaggttggctacttggccagccattaggaaacaagttagtttggagaagaagcagagttgagactgcatttgcattgctctgtagcc

SEQ ID NO: 5888 - DNA, 2000 bp, Oryza sativa
cagtgacaaagtgagcgtagctcgactagttagatccttgttgtggcactagcctatatggattaaaattctagacttgacagttgacgttagtacccgtatttatgactaattattctttcagtattaggcgaggtacctgtcaataacaatatgcccgtcatgtctgtgggtttataatgtgtttttttaaaaaaattaacagtggtttttatactactagtatgctggtacacggtcggtgcacttgtttagccgcgcataccacgtgacgcgatcggcgcacggttccctccccggtccgtaggccgcagccacccccaaccctccaggtcaaagccgccggggcagccagccagagcccggccggtccaatggcgccttgccacgtgccccctccctccccaccggtccactgcgcccatcccacgcagcccccctcttctcctcgcgcggactccccggttttaccgcgcatcgccacgcgtcggctcaccattggccggggccgcgccaaggagaggccaggcgagcttcccgaggagccgcacccgtcgctttctaattttttcttttctcccaccttctctctctctccggtctccactccctccgctcctccgctcctcgcctcttttacccgyttttccccccgatctccccggactcccaaagccgcagsgaaaaaatcccgcgcgggttgggaaaaacragctccttaggaaaacaaagggaaacccccagggggaaggaggrggaaaggkgawcycttctytccccccyttttcctttttttttttgcttgtctcgctttttatttttttgctacctttacggttgctgggatttgggggagttggtggttggttggttggttggtggttgcgtgaatccgaggggtgaggagaaggaggtggagtgttcgttcttgatctttcccgcagttgcacttcgatttgagattgctcggtacggatctgcagctgttgtttttgtttggaatcgtgttagatctagggttggagggtatggctgtgtggggttcgaggtcagatctgatgcgaaagtttagggttcttggtgactgtgagatgtggctgtgtttagttcacgccgaagttgtaagtttggttgaaaattggaacgatgtgattgaaagtttgtgtgtgtatgacaaggttgatgtgatgggaaaagttagaagtttggaaaaaaactttggaactaaacacacctcgttttattttcttgccatgtttactggagatcgtgttggggactgtagtgaagactcgagatctgcgtggaggaagcctgtatttgattattcacacgaaatatgcacgcatagctgttcccctttcgagctaattcggttcatcgatctatcgtttttttacctattagatgcagtatgcctccgttgaactgcagatctagtcatttcgctgctgttcatgttgttttgaactgttagtctgtctgcttgctcttctgtggaagaagcagcagtggcgctgtcgttttcttagcttgaggtctggtggtattggactagatcactggtttggcagccactttcttgttgatttgtctgacggaatcactcgaaaagtaagaaaataaaatggagaaagtactctagtgaaagggggatggactagaatatttagttgcctgagaatgattcctttcgttcatggaaaaggcttgcgcttgttgtctaattgggaaaatgatgtgccatccacttggttggaatctggcaaagtcgtgtgatttgtatgatcttcttgggtttcatccattgttcccttgggtgaatggtgtctattatgcttatctccacttgggctagttttccgagaaccgtatatgttcttgtaaatggtccacaagtgatatagtaggttgtatcctgtgtaaagtgctgatatgcattatttgcaggtgcacaaggtccagactaagtttgcgttgaagaacaaaggagaggaaaa

SEQ ID NO: 5889 - DNA, 2000 bp, Oryza sativa
gcgtcgcaggcggcgtcgtgggggaagacggaggaggagagggcggagggggagaagaaggtggtggaggcgctggagaagatggaggtcgggctgagggagtgctccaaggggaagcccttcttcggcggcgacaccgtcgggtacctcgacgtcgtgctcggcggcttcctcgcgtgggtgcgcgccaccgacgtgatgcgcggcgtcaagaggttcgacccggccaccaccccgctgctggcggcgtgggccgagcgcttcgtggagctggacgccgccaaggccgtcatgccggacatggacaagatgatcgagttcggcaaggtgctgcaggctcgcgccgccgccgccaccaactgaagtgacagttgacttgtcgtgtcatgccgaagacgaacggatgttgggattgtttccatctgtttcacagtcgagtgtcgtgtacgttacgagttcagatgtgttactacagtagtagtaacttgggttgaaaaaatatctagggaacagtttgtccaaggtaaaatgttataaaccgaaatgaatagtgttaattagagaaaagaaactagtacaagtggcgtctgggtgagaaaggtctttacaacttaataacatggcccaatgaaaataattacagatttggctgtgaaaaaaaaagagagaagactatactgtgcgggacaatgaaaaggtacaccaataatatattagcggtcataatctaataacaatgcctattcgtaaataaattttaccggcattaaaaagaaggtaccgagagataataaatttgatacgtgggatactgagaggcatcaaattttaccagaaaggctatttctctttggtacctttttaagagagtatcgaacattttaagataagtttatgcatatgtatgcatttaaaataaaattgtaacaattattggggaatgctatacagcacgagattgtgctatttcactagatataggcgtaaaaaaaatacatcccctagaggcaaaaaagagctgtacaaaattacataagcgttgtggttaagttgggaggaattctccaagtcaccttgtgcctgccattattcaggttcttgactcttcctttatttttgccataaggttgggggctaccgtttccttgtgctcgaagatcctttagttcctttctttctagatttcttaggctatgagtaggattaaggatcgcagccctttcttgggcactttctttttgttggctagcatttcccaccattcatgtacgctttggcatggctcccaattgctcaggtccaattactgataagccacccagccgaccatcagtctccagatccttctggtgtatctaaaggaagctaataggtggcatgtcgtctcgttcgtcgtacggcatagggggcacactccgctatttggccatcctcttgtagctagtcgatcggaagtccagactctattttgaattacaagccacgcatagaatttgcattttgcaggagcccaagatttccaaattaggggattaaagtttgtgccgactattcctagacactgagccttgtatgccgaagaggccgagcattctccatgattcgagagcttccagacgatgtggtctgactcattttggtttagtatgatgtcctgggttgcgctccatagggacacaagttggctgatcaggtccactgtaaaagtagtgttcctatttagctccaggtcatcgatccaggtgtcattttcaatgccttcatgtagtgatttacttcttttcaatatgccttcgtttaattttttagaccaggttagcggatcacatgtttcaatacatctgaatatgggagcgcgcattcaacgagccacgcaatcagtatactagctaccccgtccacagaacacgaaccaaaaccatttatttaaccatctcaaatctcaaaacctcactcacacgattcacagttcaccaccaagctacagctagaagaagcta

SEQ ID NO: 5890 - DNA, 2000 bp, Oryza sativa
ttcttctgttggtgtctattagtttgtgtttgcttagctttgtttatactatcgtgaactttctatataagtttttttctgtgtgagttctaaaataattgactataactctttaagtaaaggccggaatgttttattctattattaaaaaaaaaatgaagatgcttgtcctctgttttctctgttactcgctgttggccctgttgcccttcagagattttgcaacttgcacggttgttttgttctcctgtatttatccatttccttcattgaaaattcggcagtgtgtagtaggaattttttttccatcactttgtctttttttaccattcaaaagtttattggttgggtacctacgacagagacagggacgtaacccattttttttctttataaaagagcctatagggtgaagttttatctcaaatattgtggattccgcccccattccttttagcttgtttatcatatcattgttgcgatttatttactccatatttctaaaagtatgatttctcaaaaaaaaattcttatatggtgttagcagatcacttgttgttacgagctatttattaattttattttttattaaagtacttaattatcctgatagatatctgtgatactaattcggtgaataatttgttccaagcattgcaactactcataccatttaattattcagatgaatcgtatgttctatggtgcttgtacctttaattttgggaacttttacagtatatagtggtaaaatatatcaccaatataaataatccaagagtttagattgatttgttctctcacttaaatagtttgtagtataaaattaaaagggtaaaaatattttcactattgggtgtaaattcgtagaatatagtgtgaaacaatactacgtgttttcactaatcgatctcattccttattcctcatcatccttcaccacgatgagacgccagcagccaccatgagtccacgcgcgccaacaccttcatagccaagtaagccaaccaccacatttttaatcttgtggcaaaattttaaaatatttatattatattgacggtatatattttcttgtaattttacactagggatgtatgttgacatctttagtgatactcagggccggatccaggaaaaaaaattagaagagttcagttacatagtttattcaatctccaaccatttagaaacctttaatttatcaattatggtgaaaaaatcgaagggggtgttacggagatatccatgggtcttatgagtataggggagactccacgttggatccacccctggtgacactctcttattcccaaaagccaaaatacatgcatgcggataattgtgaaataatttgcgaaaaatattactaaggttttgtaatcatttcttgtgccccaatgcacaaacacccacaagtgcccgcgatgtccatgtcatccactgccactggttttgttcttgggctctcaaaactcacaggtcaaagtaaacgtactttaactggtaaagcaaagcgatactatgacggggagcagcgccatgatctgtaggtttgtttaatttaatgccccagatcctaagcttcctcttctccaagaaagagtagaagacgcatcttgacagtctcagagatgctgactggagtattttcaggaaaaaaaaaagtgtactccagtttgaaaacaatcagcctggtcaaacgtgtcggtgtcaccatatccgtttattattgatttatctgcacatgttttgactaaagttactgatcgcatgtttttgaatacatctgaacactgaaaagagctttcgacgtgttaaagagtagttgtggaaacccctatttcaattgtgcaatcaagcatcactcgtgacgcactactagtcttctatagcatatacaaatattcacggttcgtgttgtgctccgatcaagtgctagctagctagcaaaagacaactcaagccaaaaccatctcagagcttcagagaggaagaca

SEQ ID NO: 5891 - DNA, 2000 bp, Oryza sativa
ctaattaaggccttgtttagttcgcggaaagaaaatttttaggtatcacatcggatgtttgaccggatgtcggaaggggttttcggatacgaatgaaaaaactaatttcataactcgcctggaaaccacaagacgaatcttttgagcctaattaatctatcattagcacatgtgggctactgtagcacttatggctaatcatggactaattaggctcaaaagattcgtctcgcaatttacatgcaaactgtgcaattagtttttcattttatctatatttaatgatctgtacatgtatccaaatattcgatgtgacgtttttgggaaaaaaattaggaactaaacaatgcctaaattcgcatgagtccgggatagtagattgtaaaaaaaaaacccaaggctcatgagttactcgagctcaatttaagctcgcctcgagttctagttgagtagagctcgagcctatgccaaagctcacgagctttgtcaagctgagctcgagctcatgtcgagttttaccgttcatttaataaagtagtacatcatgtatgccatatatctgtatccatgcggtgaagtatcttgcgttggcacaatatatttatcttattatttttcatcaatcattagcatgattaaatataaataaattatttatttcaagagattatccttgaaatatactatgttgcgctacttataagccgactttgtaggaaagctcaagcttgaaccgagcatgtctaaaaactcgaaggttactcgggctcggtttgagcttgagcctagataggtaagcttgctcgagctcgacccgttgtcagcccaagttacaagcatacccttacacccaaatccataacatgactttcactgaagcaatgatatgcgcgtatcaatccgacaaacaccaaagacaacacacaaagggcccgtttcgtagagcttttaacttctattaactctaggagttggggtttggagcggagttgtggagcagcctaaacttagttccacatctctaaatcattttgtgagagtgctccacccagctatattcccattttaggtggagttgaaattgttcggctaagctccagctccagaataggtgaagctggagctgaagccgtgccaaactagcccaaaaccacaacgtcgcacaccaactttcgtgagagttttgcaggaaaatagtactaccttcgtttttttaatatgcaacactattgattttgaacacgcatttaacaatttatcttattgatgaaatatgagaaaaatacgtaattatcatttgttttatcgctagaagtactttagacatgatttatatagcttttgcttaattttttgaataaaatgaatgatcaaacgtgtttaaaaattaacggtgtaatcaacgcttctcctttttaccctaaaaaagtatctctttttcacgatttcaaccgtcagaaatgcgaaacccacagatttgcgggtgccttcggcaagaaggcgtttctcctcccgcacgggcccgtgtgcagcccgcacccgagattgggcggcccgctcccacccccgtccgtccgtccgtcggaagcccaagccaaccgcctcgcgactccaccgcgtctctgcacatgcccagcccccaccacgaaattacccaccccccatcgcgagagaaaaaaactactaaaaaaatatcgcgcataatcccaattcgactccgactcggccattccgtccccaaacccacgccgactcgctccgcttttttaaatcccccaacccggaacgaatttttccccttcgtttccaccaccaccccccaccaccacgacgcggatggcatcttcgtcgtcttcgtcctagcgcgcggcggccgccacgcgaccctgtttgagagggggaaaggggggttccgctcggctaggcggaggaaggacgcagccgcccctgtcccgcggcgaatttggatgatcgaggcccgccgtcgagggtaaggagtg

SEQ ID NO: 5892 - DNA, 2000 bp, Oryza sativa
ttgcttggattaatcgatatgtttacagcttaatataagccatctaaagaggtaagatcctaacaacccaaagagataaactaacaaaacaaattggataagaaaagaacctaacaaaatattgttcctcatcacgctgttgtcggcgatgacggacgtagtggcgtccccacatgacaatctaatactgaaactcgttggaaattgcttcctaaccgcccaaccttttgtttaaaattattcttcttctagaatattttgttggaacccgttcccaaattcaatagacaaacttgtcatctttgctccctaaaggactggaatatgtcagaactactagtatttcttctgaaatttaatgttgaccttgtgttgacgaaaaattcaaacacaccggcctgggagatctgcttaactcctgtgcaggtccaaagattgttgagatgcgggcgtgctagtcagtttgatactgcaactgacaagatatgtaaacagttgatcaaatagccgatcggctaaacagccgatggagtagttgcagccgatagtcgataatagccgatgccgataccagccgatagcgatagggtttgagcaatcggctatgtgttcaatgtagataatgatgcaaagacaatcggctgatgatattaaaatataacaataatataatccagtagaaaccaattggctaacaatgacatgatagaataagcactaatccgatggttaaagcatacatcggctggaggtccgatgttataaaatccacaagattagattaaacgataaaatctttgttgcgatcggctaaatccaatatgtatgtatatgcaatccttacaagccgatgcaacgtccagataactcatcggctgaaaccccgatgaaacccttattggcagtcaaaaagcaggctagagattatggttctaagcacgacttagtagatcaaactcaactgatgtagcactaagtatgaacagaaacacaatatctagacaatcaagccgttgactgagttttcagggtggtagatgtctaaactaatctaatctaacaaggcgatttagccgataccggtagaaaccctaaaacgagaagcagccgatagagctaaattgatatgctaagactagattaacagagacatatgataaataggtaggcaagtatgtcatccaaaccagagcaatccaagaggtcgaatgtcctgatgcggccttgaacgacgctgacgtagacgatataattgcctgggccgacggaacattggacttaccccttagccggagatcgaacaccgttgcagccccgcgtcgggtgccaagttccgccggaacgtagaaacaaaagtaaaagtaaaaagggtggcgatgcgccgaattgtattgatcgtgaggattgattacatagaccccaggtgtacatatttataaccatggtttgacacaagtccttgtcggacaagaaagaaacctttcttagagataaaaggaaaagataaagtccttataggacactaaacacactttcctaaagataaaaggaaactaacaaactattcctaattaatagataacttgccatgccgcattctctttgaactcggtctcttctggataagtttccattaatagatcaatttcttcaaccgaatatagcaagaatccgacaactgacgacttgacaactctcatcggctaatctcaggacttcgaagccgatgctgagtctaagccgatgattactccgggcttaccaaatttcactgttaacaccttgctagtccttgaagaagccaacatacaattcagtagagtactatttttttaaaagaacacaaaaaaaatggttgtatatgttgagtaagtagagcactatacaggaacaagaatactatgacttcagactatgtatatatttatccagatgaaatcatcaaatttgtgaattcaaacaaaatcaatattccctttcataagtagtcaatagataca

SEQ ID NO: 5893 - DNA, 2000 bp, Oryza sativa
tatcaataaattaacctctgtcaaaacaggcaacaattaaaattaagagcagcttagaccattctttctaattttctagttataagatgcacattctacttcagttttcgttagcgcgtttttcaaactgctaaacgatatgttccgtgcgaaaactttctatataagtagcttaaagatatcaaataaatccattattcaattttgtaataatcaaaaactcaattaatcatacgctaatgactttatattcccttactcaatcttcatctatcttaaattgggccatgtctctttttttaattaagatgcagattttacttcggttttcattagcacgatttttaaatcgctaaatggtgtgtttcatacggaggatctacttttgaaaatttttaatgatttaaactcaattatttatatattaatagctctctcattctgcgtgcccttacttaatcctcatcctcattacttacaaacactgcataacggagtaatagtattattattaatgttatgttaatcctgatcctaatccctaatccaaagagaaccatctaaatacccggcgcaagcaaccccctctgctctgtcgtaaccaaaaatttccctctcccctgcgaactcccaccacccaatttaactcccccaacctcccgcccgtcgcgccagctgacccgtcactgacagggtgggccccacgccccggcgcggtgggtcccacgcgtcagcgaccgtgggtagggtgggcgcgggtgcgcccccccccaacccggtcccgtgctccgcggtggcggtcaccgggtgcgggggktgggccgcgtatataggcgggccgccgcgccgcgcgctgctggctaggtgtaggagcttcagctttggcccacatcgcccccctctcgccctcttccttcgctttcgtctcaccgcccccaccgcctcgcctgggggaggggaggggaggggagcccttcgccggagcggccaggttccggcgagcatctagaggaggaggagggggagggcggggaatggggagcggcggccggaagagggggcacgtcgtcgctgctgctgctgctgttgttgttgcgtccctctagggttaggtaggggcgttgctggagtagctttctcccacccccaattttttttgttcgttctctttcgctctcgaggtctctctctctctctctctctccccacctccgccccgccgcgtcggggggttggtcctccttgccggcggcgttcgtcgtcgtcgtcgtcgcattgaggggggagaggtgatccggccgtagtccattccagctcggggaarggggggggcatgggggcagctggtccgcgtggtggtgccgccgctctcgaattcgtgcggggattttggttttgaagagggaggtgacccgcacgcgccgatctggtgaggccttgctcgttttgtgctgttttttgtgcctagctttggtcggaggtgtttgaattgttggggaattttgagcttttgctgtgatctgagcttcaaatttcggtgggggttaacttggcctgggcacctcggaatttctgtttaatttttggtggggtttctttgatcacaagatacttgcttgcttggagctttgggagcccgaggcgcattaaattccacatcttctgcgctgttttatcgggaaattaaacatttcgtgctcaagtctgtgggggggtttttccctcggatttgtcaaatctggcggctcttgttcgaaaattttcatcttgggagcttacgaacgcaaaattcttcacatttcttttgcttcctggcttggaagctgtggaatccaaatttttatgtgctgaattgacatggttagccatgttttttttccacagaaccacatgattttagcaaaatttcgccatttctactttgatccggtggaatctagttgccagatgtgtcgactggtaccttgtctaactagctccatggctatgcgcttgccagg

SEQ ID NO: 5894 - DNA, 284 bp, Oryza sativa
acaacttgtgcaagttkggcaggaatcctcatcatcctctccattctttggcttccccccttcttctctacccaaagcacataaaaaccacccaccctcttcttccttccctctcctccatcacctcctccaactcccttgatctcctcacactaaatctgcgatcttttttcccctctcgcctcctggcgattgggttcggcgttctcctcatctcttgttgattcttgcgttgttttttggggccaaatttgttggtctgatttgttcttgaagaagtcggc

SEQ ID NO: 5895 - DNA, 2000 bp, Oryza sativa
gcgcaacatttattaaaggattgtccattcacgcgagaaatttgggacaaaataatggctaggatgaaccacaaccaacccttcccggtgcacaatccggacgagagtctagttgactggtgggaatcaagaacaaagcaacaaagcaaatgtcaaagtaaggggatgcagtcactgcacatgctcttgagttgggaaatctggtgcgagaggaacatgcgagttttcaaagataaagaacttcaaatccctcaactaacggcaagaataatggacgaaatacatacatggtcggcatgtggggcaaaatatcttgcgagaatagcgccttaacctctcatcctttgttgtaattttccttttttctgctctcctcccccctgtctttccccttgtcaccattggtggtatttgtacagtgcttatcttctgaaatataaaaccagctaagctggcaaaggttttaaaaaaaataaaccaggggatttattgctcgaaattcgatcggttgcttcaaaatccaataggaaagtgtggaataatatggaaaagaatattcaatactccatccatttcacaatgtaagtcattctagcatatcccatattcatattgatgctaatgaatttwgacatatatatgaattatgctagaatgacttacattgtgaaacggaggaagtatcaattttttgtaaaaaaaaaaatcgtgtacgtatgccacttagttctacaaaaactttccactcaaaaaaaaaagttttacaaaaaccatagtattaatagttgtttttaaattttccagtattttttcagaaaaaatgacaggaacagtatttttcaattcgatctgaatataggattttgtcccaaaaaaccttaaatttctaatcgagattgagatgtcaatatcttacgaaaaccagtaagttttggccgagaatgtaaatgcatgaccaacagaatctcaaaatactaatcccaaaattgaggatttctaataaatcaaatccaacagttgccatgctcagatgctgaatgctttcgcggttgccccacagccaacatgaattgaatagtgccacattcactgtgcgcagcccctgtagacggcctgtcgaacgatcccttagaattcccagcttcagtttttttagttctgcacattaggagagtctacgttctcaatccgtgcgtaaagattatgttaagtagattttcaagatgggattttaaagatggactatctcggtgagggaagggtattatcatactttaaatttccattacagatttcctaaaataagatttaggggattaaattttggatatctctctggtcaaacccttaaaccccgtagttacctttcttaatgcgctaaatataatttggatcgaaatggtactaaacacggttgtatgaaatggtaaataaaatacacacggtaaatttacctctagttacttctcttggttaccttccctcccaattactaaccttattctgttcaacaatttctatttttaactcacaaacggttgatctttgtaacagacatagtaataatagtggaggttatttccattacagatttcctcgcagcttcttggtagcttctgttaaaccgtgatatatatagggggcatataggaatccatccttccaccaccaattaaattcagtttcgcaccaattcagcaaatccttggaccattttctttgagagtaatcgcttgtgtttctcgaaattgtgagtagtttgatccattcatctttgttggtcgcttgattcggcagcgcctgatcgatcaggatcgggtactggatggagtgcgctgactacttcatcggctccgggcggcggtgctcgccgtcgacgtcgacgtcgacgtcgagagaggcgtggaggccggagaagcaatggcggaaagccaccaacgtcatcagggggtgtcataaggcttctgcgcctcggcgtcctctccgccgccgccggcatc

SEQ ID NO: 5896 - DNA, 2000 bp, Oryza sativa
ttacatatttcagaaaagtttttgaataagacgaacagtcaaacatgtttaaaaaagtcaacgacatcaaatatttagggacgaatggagtataaaataaattttatttgttaaaaattatatcagattgatatttaaatttactttcatatggttatagttttgtggctaggaaccttatagtacatggaaaattataggttaaagattagttttggagaccgtgtcaattttgaccgcgtcttatattatgggataaagggagtagcatgtattttttagctcgtgatttttacagcggtaataaacaaatttacccatgtaaaatagatccttgccatacatattgcaacgtcatgcagttatatatgaccatatgaggatttgggccccgaaaccctgatgctagttcaggcaacccatgacggccggccgagccaaggcttcagaaaccattatgagaaaagaaatcaaaggatatatatgattatcttattgcggggccaatctgaatctactccaatatgactttatttaatcttcagtttaattgctctggcaatcatgaccgcgactctaccgacatgctcagactgatcgcccaggctttgaaagctgaggaacttcaaaaatggagcgcgagaaaattgcattatgcatataaacagttctaaactctgaatactattgctctgctttccccagctgaagcacaatcacagaacaacagcgtagcattgctgtgcatctaaactactcattccgtctcaaaatacaataacttctctttgaatttgttctaaaatataacaacttcttcaccagcattctctttccaaccaatcacaaacctccatcattcactttttccatctacctccatcttaataactgtgcataactctaaaatttcttatattatgagatggatagagtagtaagcagaaagttaccacatttgtttctcattttgattgcttcaccgaacaccgaacgagagatcatgcagaaaatcgcaagatcaggagaaagctcgtgtgctaaaaagaattattaggagaggcttatcgtgtcaccgcgagaggataggaacgacacacacggacgtacatatccctgtatcaatgcgcctttcttgacgagaaatctgcaagagcaacagcgcagcagcacacggtagctgtacgtacgcaggccaagccgtcgtacacgtaacacgtccagtagccctcgatctcactctcccaggacattaatgccggtgagccgcccccatcgtcagcatctcagcggtatgcagatgccgtgccgatcgttcgacggccttctcccccccgcgaggaaaacgatatccttctaaacgcaattaagaatcagatacacggacacacggtacaccggtgcacaacagatttgctttgccatcaagccagaaaaaccggtcgccgtgaaaggcacagggaaacaaaacctgtttttcttttggttctctgtcacgtcaagtgcaacgaacgggcacgtctcgcttgcgtttgcggttgcgcccgaccaaccagccgatcgcacgacgcgtaccgactcaagagtcaggtagacgcgccgcggcgtggcacggaggagacacggcgcgccacgcgttcgcggcctgagatgatacgccgaggcgagccgcgtcgcgccgtaccacgggcgccagcgcggccctggcacgcgccacggaccccttctcgtcggctgccacgccggcgccctgcactgcaagccgcgcccacacggccacaccggcatgcgggttaaaacgaaagaaaattgtgaaacacaccaacgcactgtacaggtactggaccacgtcgcagccaggacggctgtggttttgaccagagttcaccgcgcttactactagtagggcacacaaggaggagtgctatataaaagccggaccacggcggaggcgcagtagttatcaccggttcatcgtacaaaagaggagagagagggtg

SEQ ID NO: 5897 - DNA, 20 bp, Oryza sativa
atgtgaaratctggtggggt

SEQ ID NO: 5898 - DNA, 2000 bp, Oryza sativa
atggactttgtatgaggatgacatggaagttttgagatgtttactaaaatcggttaaaatggcttatggagcagatatgtgagtgaaacataggtagttttttttttcttgaaattgcttggatggtcattgttatattaaattgtgacaggaggagcactggtttgtttatcactacacgtgggacagatccagccaggtggtttacgtggcaatcatcgccaccatacatgcaatgagacatttgtcatctggggtgcaaagacaaaattccgggtaatgatcttctgaaatttctaacaattgcacatttgaagtatttcctgacactttttccataattgacagttagaaaatgctgatgtaaatgatagaggatatggggaagccatgattgccgctgatgaggtggccattgttgcaagcgcaagatcaactgcacatgccttgataaatatggatgtgcgaccaaccttcttcttgggatgtcaggacacgccaataaatcccaacagctcgaatactgactacaaggtctggaaagacatctgatgatcacgttgcttctgtccttaatggtaagccatgagaaaccataatagcatgaagccttcagaaaccatcttgtttccattggcaatgatttcaaagcagatgtgtatatagttacggcttgtgacttatgaggggacttccagttacgaagctattctttkgtttgtcatgccaaatttcttctgtagtaggtgggttcatatatgttacttcatcagttcgtcttgcatatattctccagtactgtactcctttttctaatgactttccattttcaggttaacctttttcgtttggaggtgtaatgcattttcagggttattacttgatgatatgttcccctgttctttgaatgatgtgttgtcgataaattaattgttgatatgcaggtaaggtgtgacatgaactttttaatgatcacataccgcaagatatatctgattgcttaacgtgaattctcatatggtgaggtagtgtttggcacgcacatcagcgcatttcttgtggtgtagcatggatcactagtgtgctttcgcgtctgtctgacttgcagacatctgctttcttttggttttctatcagcgtcgtctatatttgctagtttgattcatgtccacagatttttatttttaatgacacgtgtggatgagtgtggatattcgtccacacagtattgaaaacgaaatgagatattttaaaataatatatgcagctccatgtgagaaaagtagagtacacacttcaagaaatacagctctgaaaaatagttcactttttcactcacatattggtggttaaattatattccaaaataatagttttcataacaccatcattcaaaatgtacaaatttcaattaaacttgattgatgacctattttgttcgaatggatttgtttttttaatcaaaaagggcatcgataccatctcaataatgcagtatgacaactcgttctagttattatacagattataaagcagatcaaaatggtggtcgcctaacggaggaatggacaaaagctcaagctgtattggataaaagataaacaaaagaaataaagagagagaaaagtcgggaacaaagagagatatcacgaaccacaaggccctctcatctaattgctccgatgcatgttccacaatcgccaaccacagaaactacagataaaaacattcccaaacaacatggaatcattttttttaaaaaaaagaattaatttgtactccagaaatgaagagaaaaagaaaagctaagggaaaatagaaaaggagggaaagcgccaggtgccgaaactatctccaattccccactcttctactcctatataagaagccctctttctctacatcatcctcctytccgacacagcccgcgmacctccacagcattrgccatcaacgaccagcatctcagctttgctcgccttctcgaagcttctgctgcc

SEQ ID NO: 5899 - DNA, 2000 bp, Oryza sativa
ttctatgtcaatcatctactagaagttagtagaagcttagaattctacaaagggcttctagaatttcaagcacgggtagttttgacctataggagtgtagtagccaagtaggagtattctctgtttttcagctggtcagccttcagttctcgtggagaaaatcctcttggacttaaaaagtccaaatcgaagatatgccagcaacaatggtggcaaacgctgcgttttatacggacgggtcccatccattggcagcgacgcagcgcgcatgcgcgcaacccatccagaccagaataccgcgagcccgtccagaatacggcaagagcccatccagaataccgcgagaaaccagcttgcgagatgcgaagtactaactgccaaaccaacggtctattccccttagcggcaaaaaggactggctgctagataatgcagccgtatcccagtcggtatccgtcgattggcaggtggcgcatcagaccagctgaccaagtccaccatagtaggagtactaaagtggggcccgttgttatacggctcgagcaacaaagcgcatgacgctctttgtaccctctctgtatcaagcgtccttgaaacagtggagcgatgaaacattgcatcagaattcgattagtgcatgctgctctttgtaccttttctgtatcaaagcgtcctttgaaactgtggagtgatgaaacatgcatcagaattctaacgattagtagtactagtagtatgcgcgtgctaaacgtcacggtgcatttttatttgtctttaataattgttaaaatttcatattagcaaaaaaaatattattatatgatatgtgcatttaaactttaattctaccgattagtagtatatgctagttcgccaaactgtgagagttgtctttctttatgtgcaagtcatttacgcctacatggggtttcctgtgttgtattaggatgaacttgtgcgtgaaaataaacataagcttaccacgttcagatgagcatatgtgcattgggaatatattctatacacataagtttcccgtatataccagctagcaaatatcacagaaaattttagaaaaaattagagacatatttttaatagtattacacatacgtgtgaaatcttatcttcaatatattttagctgtaataaaaaagacaattttttgacaaatttttacccttaaaactgtctgattttttttacggttaaaatacaataaatttgaatacgagacttttcatatatatgtaatactattacgagtaaatgtctaatttttatagattttttgtgacatttactaattggtgtgtacggagtgtgcacatgaagctcgtatgtatgtttccctgtgcattaaagggaacgatggaaggcatcagcatcgtcatcaaccccacaagtgcaaccccatccatccataaaccacggctccgacaacgaatcacgcgctctccaactcacacgcgtccgcatcaaccgagcaatgaatcacgatccctctcgatccggcttctttcagcttacgtccccgtcaccacaaagccccaaacggccaaaaccagagtaacaacccccagtaaactccgcatcagagaagcacgagcccaagcccaccgtgcagagtccgctycccgcaggagagggaaagagcgccccatgcctgcgcgtcgcgcgcgtccccatcgcgtccgagcaacctccagctggtccgacagccaaccgaacccactcacccaaccaaccgcagagcgagagcccaaaccccccwtcccgcgcgcggacccggctcccgcccatcgcccttcaatctggctggcacctactgtgccaccccgcgtagcagcagtggacgcgcacgctctcgcgctcgcagcatcccccacccgtcaagtgcataactatataaagccgccgccccggtccgttttcctttcctcccaaatcaagaccaaatcggataatttcaaatccttgtcgagtgaactgatccatcg

SEQ ID NO: 5900 - DNA, 2000 bp, Oryza sativa
gttgggaaatgaaggattaggaaaggagaaatctgtaattgaaggcttaagtatttgtaatgcaactatgtaatggttgagtcattgaatttcctgattctgatgctagtcatgaactagaatttcgctggagataacatgcacatattattggaagtgtgtgctcttaacttcttatgtactactcaaattcaaatgaaattatgttcactcaataagaaacctttgttcagttgaagcacgcgtgtctacacgttactgcttagtcaaatattcaagtttgccatctcttccaaggttgaagagaagaaagatcacaagatttaatctgctgtgcaaagtgccaacagtccaaagaactaaagaagggttctggaataggaaagagaatcctatagtgcggcgagagctttagagagacatgaaccatagagggaaaaaagagaaagtgagatgttggatgccaataggatatccatggtttaaaaccctttgaaaatctagcgagcatatgcgctctacctgctttgttccctataaatctggtgctgcagcagagaggaaagagcaacaaccaacaaggtcaagaagggaaggaagaagggatcaaagggtgaaacatctcaaataagcagtccagtttcagggctcctctctcttggcagggagcatgtgaagtcttttgtagctcactcattttcagccctctgccaaaggagagttgccctaaaactggactcagcttaaggctaaggagtgtgaagtgaggatcattttcggctatgagctacttgttcattcagtctcttgctgatttgttgagggaagtgtcaagtgacaacctctgtgcttatgtatttcgatgctaggttctttctagtgatctggtcggatttcagctgttcatctgtgttgatcctttgctgaaatgttctggtttgtcgagtgttttatattcatgaaccagggcatcaccagttcgatcagtgtggaaaatattcagagttcagatatacttgagcctatgacattttaactgatctgaaattttgcaatgtagcagtaacttgaatgttaagcagtgaactagtatctaccatgagttatgcctttggaaaaaaaaatcattttttgcaggctcagactatttcaagtttcagttggattagatactgaagaaacaacgagaagttgcagaactagtttgttttcacgataccatgcaaaattagattttatttatttactttttaaaagatttaaaaaacatattctcatttcaaagttttatagaaatatactcctcccgtccgaccatagggtgggacagatagatcaccctacggtaggacaatctatgtgacatggcaccctgtgggttgcgccgtggtaattttgcaggcttcctgaggataaatcgccctaggtatggcgatttatcgttgagaaggggccacctacaaaattgttatgacgtgtcccatgcattatcaaactttgtgttgtggaagagtctgtctacaaaattgatattgcatgccttttatatgaggtgccacgtcaaataaactgcctgcctacaagtgatttatatgtctcatcctatagtagggcaggaggagtatatttttttgtaaaactttaaaatggtaattattttttaaaaatattttaaagaataaaagttttgcaaaaatacagcaaaaaagcatcgtgccatcaggccttctcagcccctaaggcccaaacgatgagccaggccgttactagattccaaggcccatctccaccgatgcttctcgaggccgcttgatcgagagaaacaccgaactctaaacttgcggcactgaagcgaagattggaacaacaaagccagccagtcgtcgagttcaagttcagaacgaaaagctcgtgctctcgcacaatccaagtggaaattccctgcacacggaggcggggtaggagaatcgacgaggcataaaacaacgcggggggcacaa

SEQ ID NO: 5901 - DNA, 2000 bp, Oryza sativa
cttgcacaattcaaatgtgtaaagctttacgatcgttagtgtattcaaatgccatgtttgcttagtttgtacaatgtggaggagggaggaaaaaaaagaacaaaaggcaacaaagcttgcatagatctattcatctatgtagcctatcatccatgaggccatgaattgatgcatgtcctgaagtttcccagtacttgcacactgaactaccagtatcacatattctgcacacagacatgtcaagctacaggagctagaaagacttggatgaaattaataaccatgtagtattatatatatattgtgaatacagaccaaagaattcaattaacatgcatatatctatatgcacataaagctaattacctactcatatatattaccacatgagactactgtacgtcagctagctatagctagccatatactatatacttgttaattagtagtacttagcagtataaactttgtttagagaaagaaggagaaggagaattctacaccacaacctgctgcaccactggccaaagagtccaagaggactaaaactagcaagaccagctttactgatttatctctttcatcaaaatggacataaagttgaacaccctgcaaaatacacactagaatgccacccctagacacctgtagctgctagctcacatcattttgataacctctagctagctctgcctgatccagtactgttaaacaccaagatagatatatagatcagctggttgataattaactaataaccagccaagctagaacagcaaacaaacaaatccagcagagacttccaataaacagtgcatgcagctagcagccaaggccacctctccttctcctagaaatctagggttttcatcagctttctccctgcataaaaccccattctctgatgatctctcatactgatccctagctagctggctagccatgccacatccattatatatccatgcatcacacacacacacacacatgcttatgagctaaggaaacatcactcttcaccattcaactcctcccatgcatatgtttcacaacccaatatatataatgcaagcacaccactaagacacaaaaaaataaaggaaaataaaggggtggcaagccccccttctcccttttattccctctccctttcattccctctcaccccaatctctttccctttctctagcttccctcctctcttcattctcctcctcctcctcctcctctctttgtaccagctaactcatcaccacgcaggccagagtagtagtagtagtgatatagtttctctcttctcacaagcagctcagctcagctagattagatagagctcacacacaatttccagcttgctagtgggtgtgttattcgccgccttttatcgatccgcctccccatccttgcatgatcctgggcctaaagcagctatatacccttatctcacaaagaagagaggagaggaacaaacaaaacccaaaaaagaaggccccaagtaggaaaagatcaaaagaaatcaattctataccatggtcttttcttcggttccggccgtctatcttgatccacccaattggaaccagcaggtgaaattttttcttgcttggccaagatctttttttgctctctcctttctttcttttttatgtaggatgatggccatatatgtatgtatgtatggcttcttcatgaaaaaagcaaaaccaaataaaatgcgctgaggaaatattcctacgctcttttgagaattaaatcgatctcttgttgaatataccgtctcgtcttttagtttgtgatcttgatttctcgtcgcctttaattctctttctttggtgcatgtgtgtacgtgtttgatttggaattaatggtggtgctttcagcaacagcaagctcaccacggtcagcttccaagtggcggcaacggcggcggcggcggcggcggcggaggtggagtggacgcgcaccaccaccaccaccaccaccaccaccagctgccgccg

SEQ ID NO: 5902 - DNA, 2000 bp, Oryza sativa
aggagtcagcatcttctggcccagccttttttgcgttgctacactttagttcgagagtctcatacatacttgagccaccaactatatacctttggagatttttcttattttccctcttaggcacaatattgacatagtaaaagtacatcataaatttaacttcaagagctaagctctactaattaaagtggtcctttattcttcttattgtccatgtaagaatagttcagtgagaagagttatttgacccgtgtaacttttaagtcagcaaacatttttgtttgactccttgtcctgtctattagcagcctagcatggcatctttagttgaactcttctacaagggactacactatctaatgtgttatcacagtttcttatgtaatagaaatgcaattcatgtcatttcttagcatctaaatgatcaacggatagaaaaaaaattatatgacgtgtataactcatgctatatctgaaccttcaagtgtaccttcttctcatgatgcttctcccaatggaaagcatccctttaacccttccatccatattggttcttaaatttccatgtcttccatcagacagagaacatataagttctacaacctcggtttatccttagaagcagaaatgttcaatatgtcaaaggtacaactccgtgtcctttgctttgaaattcaacatcacttgcacaacatgtcttctgcatcttcaggtactccttattaacatttcaagactatctatatagtattttattttattagaaatgccacgaaaccaccatttattatgcaaatgcaggctatagtgagattcggcttccacaataacccacgaccttgaaagctgttattaagatctattagagttggacacaatctttggaacatgattcagttatgttgtgtgtttgactccacatttgggacacgcgggaattaggttgggtaagcaattgccatttcttccaataatctgatggtcaggtattcaggttagtgaatggttccagacatattagttgcatatatataatgagtaaattggaagttatcacttttaatcatcttaatcctttgtgtcattctcacctttacaaaagggacatataccttctcattcttctcccttttctcaaactgttataaacttataatagtttccttkgttttctctagcccttatagtttgttgctgttctaactctaaaaatgaaaactaaaacaaggggaatttatatctttgggaatactacctagctttttatcatacaaatgttgtgtaatacctttaccagggtattataactgttaatactttgaactgagctactaatgacattgcaggtactaattgattcttccctgtaatggagagttttattttccttgatttaccaaaatcaagcttacattaaggtgtaacaaatgggtgttttgggctccataatcattttgttgatgctaaatgctgactactggtgcagcaaatggaagagctcttccagttgatatatgccatttgaggacatgtgctttgtcctcagtataagaacattggcctaacatcattgttggagttgcattgcccttagagtggggaaagcgacacctcttgcaagatagtaacagcaattatatcataaattacaagtcaggccttccaatgtggttttggatgaggcaattgatacattgtcatttgatgctgaattttttgttcgtctgacgactggaaagggggcacctacgacgattagcttagtacttagtgatggtgtatgaagagcattgatagtctcatggcccattgctaacatgtagagaaggattttgagttccttggaagtattgactggaggagtgtgaactacttcgcaaatagatgggtgtaaaatctgggaaagaaaacttaaagagctaaatgttttctaccatattagttgatctgaaggtgctttccaagtcaaaatcagcttagcatatagaattgacttggtg

SEQ ID NO: 5903 - DNA, 2000 bp, Oryza sativa
tgtaatcctgtgaattcattatctcaagatggctttggcttgttacagacagccgttttttttcagaactatagctatcaacagtttttttttctttagaactacagcttattaacagcttatggttttgaaagtgtccatctgtgtatatcatcgtttttttcaatgtatattacttgttgtgattgcaattgtaaagtctacaagaaaaacataccggattattcttccattgccttgtatcagtccttactagattggagtgtttcgatttgtccatcgtgtgtaatatattcagatatataactagtgtatttaaaatttatatgaatcaagctgaatggaaaccaaatacctacagcaagaaacagtacatcttggaacgtgatgcacaagcgccggcggcggccggactcacgatctgcttttcttctttttttttycctgtgctctcctttttgattgatgaggaagtggcaactctgctgttcgatagagagggagcaagcgacgctgaccgtaggactcacaatgagaaaaaattaaagtgtctaattcaccacaatgggaaaaaaatttaagtgtctaatttacccctattctgtctaaggctatgtttagttcccactaaaattggaagtttggctgaaattgaaacgatatgacggaaaaatttgaagtttgtgtgtatagaaaagttttgatgtgatggaaaaattagaagtttgaagaaaaaatttgcaactaaacacggcctaagtactttattaatctatccttagaaataaacggttcagattaattctactagtagcataatactaccggtagatatcaccggagcgtctctcttttatcttaaaacatcctttttgttttatttataaaatattgaacaatattataatattaacttgtgtaacagatcttcctatacgattttcatacatccaacctaaatatttttaaataaatactacatgtttaaaaatttcaaaagtttgagttaggagatgttaaagagctttgccgtttgccactgttaagggcgtggcaacaatatttgaacactcaggtagtgttcttatctcattttatctcggtttttgttaacttgttttttgaaactaatttaagctgctcgtgttgtaaaaagaaaaatctatttgaaagttactttaaaatatcaaatatatctaatttttaagtttatagtaattgaaacttaattaactatacgttactagtttctcgttttacatgcagcttttaaacgaacatgacctcagtagcgaaatctctgccacaccatggtcttttgacttgcttggtaatcctgccacatcaatgagattgttgattctgggtatgagaataaacttcgtgaggatttattctgaaaattttattaacaaaggtattaaaaaattcgccgtgctataattcaagctatctcagaggtcgcccaagtccccagagccatcgtcctatccaaattttacattggttttccaattttgttaacaacgcataatcgtactaagtcaaaagatactacatcgtcctcagggaccttgctccgtccagtccagtgcaaaaagaaaagctatagttttcaaggaattcaaagggtagagaacacaggtagctcaagctagctaggtcacattattttccgaaaaaaaaagttgcaagttcacgaagggtggaagaaaggaatcttacagtggtatgatggtgttcatgcctttcttgccttccatgtttcttaagcataacttctccctggcaaatgttctttctcctctattttccatctccaactatgtcagcaaaagaaatctttgtccgtggaggcaagcttatgttctcatctataaattcatgttcatcaacacccagccattcacaacttcacaagcattctttcctaattttctttccctgctttgttcttgtgtcttctccatctacttccaagtctggtggtctcttttgcc

SEQ ID NO: 5904 - DNA, 500 bp, Oryza sativa
gattcagatgcgtttatctttacgttcccgttgaaattgctcccacggctgctgttgcatgatcgcattgcgaatgatgagaaaatagtatatcgtactggacatgtaataaataggtggacgtctattcgagctgttaacagtttcccatatcgtatatgtcaaccatgccaggagccgtgcccacagattcgtcgcgaaaaccatcatggatatatatatgattcagatgcgtttaatctttatgttcccgttgaaattgctcccactgctgctgttgcatgatcgcattgcgaatgatgagaaaataatatatcgtactggacatgtaataaatgggtggacgtctcttcgagttgttaaaatagtttcccatatcgaactcgtacgtgtcgctcgtgcgacttccgccaaattttccccaatccgttgtgcacgtacttacgcggccaccaaacgaacacctgttgcatgcacgcgcacaaacggcggtgtgcaac

SEQ ID NO: 5905 - DNA, 2000 bp, Oryza sativa
catcggatatacgaacatatatttaaactattaaacgttgtctaataataaaataaattgtagaatccttctgtaaattgtgatacgaatttattaaacctaattaatccgtcattagcaaatatttactgtaacaccacattatcaaatcatgaagcaattatgcttaaaaaatttgtctcgtaaaattagtcgtaatatgtggaattagttatttttttagattatatttaatatttcatgcaggtgttcaaatattcgatgtaacatggtgtaaaatttttagcaggaatctgaacaggccctaggtgatcgaggattataatgtgtgtacgatcgatgtgtatctcgctttgccactaaattgcatcgccattcgctcttgcgtgctccactggctcttcaggcgcctgcgctttcattaggtgactgttgaccactgggtcagtacttaactagggttggttgacaatgctgccagataattgagaaacatacgcaatacaaaaaggcgtagataattgatgctgcttgctgcagatgatcatgtgtgtcgtaggttcgcaccgaacgcagcggattttggtgatcagatcgacgtattaatatgcaggtagttaccacgtacgagtctctttctaatagtaaacgttggacgtctcggatttgatttggcagataagacagagttcagaacggaatcaaatgcccaatcactgttctcgcgggtgctattcgcacgtacaacatcctttcagccgaacagcggcatatcacggttcggcatgcgatcccttttgcgtgatgttttacgcaaaagactttgaaaaacccgtactatacatttgcttggataaacggatacatcttcgcagaacgatgtaaaggaaaacatcaataaatgatgaaaggatctccgaataatgatgtttagcatgtgtttattcatctgtaattgtcctagaaggagtacatcaaagtgctaaatgagctgtgctgaatatatataagttagcttcaagaagaagaagaagaagaagaagaagaagaagaccgtgttaatggtaaggaaaacacgcttgcattctagtccgctgagatagccagattactaaacaggggtggatctaacgtgggtgcagggggactcagtcccccctatacccacaaaacctatgataccaccctaagccttctcttcaattttttcatcatagttgataagataggagatgctaaaggtatcataatagcattttagcatagtttaatattgagattatatgtttatatcggtgtactcggtatgttgagtccccctaacttttttttgatccgtccctgttactaaatgagaaagtgaaatgaaatgataatactccctccgtctccagaatataagaacctaaaatcgaatgaaatgtattctggataagcctgttttctaggactacgaatctagacaattgacacgtccatccgatgttgctatattctgggacgaagagagtagcatagaatgtttttttctcttttctgtgaaaagggtggttgatcgttttcgctggaaatgcagaaattgcaggaggaaatcaccggcgaagcacatggacgccaaagagagggcaacaacatcactgtaaaggaagagaagcgaagtgggagaagaagaagaaaagccttccctttgctctctttccttcatcaatgaggcgactgaccccacggctccccctcctgcccccaccacccttcactcgcgggcagcaatgataggtcttccaacctagccaagcaggagaaggagaaggggacgctgggatgacaccaccacaaagccacaccggccttgagcttcgttctacccagtcagaaacccagtgttgttctagtctaagctcgtagctagtctgcaagaaccccgacagaaaaccggcaggaacgccggccgccgccgccgcacgcacgcacgtcgatcgggcggcgccggtgtgctcgtg

SEQ ID NO: 5906 - DNA, 2000 bp, Oryza sativa
tactttgaaacaagagggagaatgccaccttgttaaatggacctcaaaattcgcctatttatgatcaacaaaatggtgtttttttatttcaataatactacttaaaaaatagaaaaaaaaagatgaaggagaactgttttggctatgaaacaaaagggaccatattggaacaatcactatagatgcatatggaacaataattagaggcggctagagagactcatggctttagactaagagttggtgaggcttgtgcaggttctgtggaggcgcctacaaaccgggcgcccaattttttctgtataaatcgggcgctgtttcaccaagtagatcgaaaatatttcaatcttgtaaaaagctgaaacacaaccaaatcacctcatgaaatattttgctacaatatataaaacaacggtttccaaaaaaatcgagcgttgtttcaccctatataaaaacaatgtttcagcaaatagcgaaagaatgtttcaattgttaaaaaaagtgaaacacagtaagatcacttgatgaaataatttggttcaacatatgcaacaaacgatttaaaatcattgcaacacttaaaccccgtgtacatcaataaaccacgtgtccactaagatgaaattacgaaacaatatcaaaatccactgcaactcatccatacatagtgaaacacaatggcggaggcagggcccggccagcacgggcagctgcccgggctccatgccattgcaacaatacactgctccatggcataaacaacatttatgaaaattcttgactgaatgagtattatttctgtatgagtagtaccatttcgaccgtttctgattttggccatatgtaaaatttgactttttttctatttctttagcacataatacggtctacaataaagttaaattggtaaaagaaactattttactcacttgaactattttagcaaaacacttaaacctctaaataatttttcatttcgttttatacctccaatgtattgaaagtggttccccttattattgtctaacaacgtttctcctttttttttctctctacatataattaatatacgtttgttcgactaccaattttcgttgttaactttctcaatgttcatgccgtgcgttgctgtaccagtgccgtgagccggcgactatgatttgtgtgcattgtgccattacctaattagggctagctctgccgccccatctgtattttaaatttatatccgccactgattgtaatggggcgcgaatgatggacatacatagtgggggcggcccgcgcatatgggcgccccatttttttcgccgcatcaggcgcccgattttgagcattcggaggttctacggctgtgtttaattcacactgaagtttaaaagattggttgaaattggtacgatgtgatagaaaagttgtgtgtgtatgaaatgtttgatgcgatggaaagttggaagtttggaaaaaaaactttggaaataaacagggcctacgtgcatgggtgactcacgcagcctttctgtttctgccacggctccatggcgcaaagctgcacgaagcgtgcgtgcttccctagtgtcctcacttgttcagtccctgtcacaaattaaaaccagattatttgctaataagtgcttacattgttttggatgatcaccagcaaggctccgtcttatcctaacaacgccaaggggccacgtatgtgtagcttatacatatactccagaaaatgaaaataaatatcctaatagtgtgagcagctgcagacgctgacaaatggagcccacacagcctctggtccccagctgtcagcccgccgcgcccacctacccgcgtccacgcggcccacctggcggcgcgaggtggcgggcctttatctatccatatcaatctatcccatcgagtcggctgcactgatcgattccatcactctctctctctcgcctgctcgcggttgcctgtgcgttcgtctcgcgatttctcctcctcctcctgggatc

SEQ ID NO: 5907 - DNA, 1173 bp, Oryza sativa
  misc_feature (1)...(1173): n = A,T,C or G
attcggccgacggtaacgtacaaaaccgcacggttaccgctcctaaccgcgcgaaaaccttcaaaacggagggattacctcttgcccgtcgacccaggcggttaccatctcgtaccgcgcggttaccgccgcttaccgcgagggaaccggcctcgccggcgtggaggcggcggatctggcgcgggcgcacgccgtcgccccttcggtcctgagcgcagctacgcgagagaggggaaaacggtaggattcgcagagaaacgaagcagaggcttccaaagatattttcctcccattgtgggccttattgggcctcgtgaacagtgcatacttggcccattccatttaatcttttttcttttttataattcacaataggttttgcgctcaaatttgaatttacctgcatctttttgatgaaattttttcaccataacaacatacaaaacaagctttacatccatgattttttttgatttttttcgattatttttcaaatttttgaatttgagcaaaatttgcccaaaccctaccgccggttttcgttaccgaccccccacggtaagcccggtaaccgcggttaccgcgcggttaccggcgagaaagtgaaccctggtcgcaacacatctctcgtgactagcagaaagcagcgattcacgagtccaggttgagtgagtgagggagtccactagtactccacggcacatgacactcgcaggtcgcagctagtacatgccaatatgccatgctatgtccctctcggccttatcctgtcatccacggcgccacgcccacgcgcagcttatctgagaacgaaatgcgagcgagcgaaaccaacaaacaaacccgctccaactaaacccaaaaccaagggccgcgtccgcgcgagccgagcacctggggacgcgccgtctcgtcacgactcacgagtgtgtcgcgctcggccgccacaccagccgcaaacccccacccgcggtttcgccctcccgcctgcaggctagatgcagcagcttgcagcctccctcctcgtgctcctctaaggctggnaacgcccataaatacccaggtgctcgcagcccacggatcatcatcaaacgagacaagagtcacagttcgagtcagagctatctaaccaatccatccatcgagcaattgttgatccgtctgtgaattgtg

SEQ ID NO: 5908 - DNA, 2000 bp, Oryza sativa
ggcgaaaactcttacccattgggtacgtgggtatgggtctgttctttacccacccatacccaccaacccgtgggtagaaaaaacccgttcattgagcctaaaactatgagcaatataactctcgacgactactaaatcatagcataaaactcctttcacatcttaaagcattgcttagtctagttatatgaaattattattcgatttcttgattatgtaatgtggttgttgttgacagaaaacacgaggcctgggagatctgcttaactccagtgcaggtccaaagctcgccttcgaatgtatgagcttgccagttgatttgatcctgtaatcaacaataaatagaagtaaagaaaccgcagttaaatctataaatgatagccgatcggctaggtgccgatgacatatcatttatctttgagccgatgtcgtatatgcatcgatcggcagtcattaataaataagaagggactaaatctactcgatcggctgcagatattaccaatatataatctttatatcgatatatacttaaatcaagtgattgggatagatcggtcgccatgccgagacagtacaaatcacttagatcgaaatatatattaatgatgagactatatacgttcatagcatagccgatcagatagatctagcatgtatcggctaatactccgataccactctatattaagatattaaagcaagtagaatatactaaacaaaagcctaatatacttaaatgcagcaagatcttaacgtaaagggcagatttaacatgtcaatcaagcatataggataaaaagtagttaaatcaggtaagatcggctgaaactccgatactaccctaatcagcaactaagaagcgggctagagattgagattctaatcacgactcataagatcaaacttaactgatgcagctataagtatgaaaagaaggacaatatctagacaatcaagccgttggatgtgtcatagagtgatagatatcctatataatctaagtcaacatcggtatttaacctaatcggctaccttctattgacggatgttagccgattataggttggatatcgatattgccaaggattatataggatatatgataactcgacgaattacataaacaagattagagcatcataaagatggaagcactaatcccgagaacgcaagccgccataacaagttttacctcttgttgaagatcgaaaccgatgcagctcaacccgaaagcaagaactcgtcgaaataaaactaaagcaaaaaaggtggcgatgcgccgagattgtattgaacgtgtgtgttaaaagttacatagggctcgggtctatttatacacgaaaattacaagatatgtccataacggacacgacaattatctctaacaaactctaagataccataagtctttgcggcagacttttgctcaagcatatctctaaggaaattacataaaacatcctaattaatagatacaattgccttctcaggactctatccatgtgcggcaatcaccttgaagcacctcaattcaacccgatgtcatacatcaagttgcattgtcggaatcggctgcatcggcttacctagcccgactcagacccagccgatcctaatcgtagccgatttggactccagccgattcctgctctgtttccgaactcgatctccgcctccaactttgcttcgatctaatcttctttcccgatgccgatattaccaaatttggttgttaacacatgccccccaagtccggaatatttgataatatttccgatttgctgtaaatcgactgcgagcaagtttcgcactttgccgtttttcgaccgttactgccgtgctttaaatactaaccgttaccctcgagaaatctcacaccgtcctcctccgttttcaccactgaaaccaactttgccctttctctcttcggcgatcttcctgacgcacaaggcgatccccaggcgatttcgttcccgaccaaatctccgcccgcgacg

SEQ ID NO: 5909 - DNA, 2000 bp, Oryza sativa
cgcataagaattatatatagctgaagatttccatgccatcagagaattactgcatgttatgttttaccattgggaagactgaagtcactgaaccgattcacgtctggtgtttttcaggcttgcgatgaatgttcagatatgcctccagatgcacaggtctgatcacgcagagaaacagctgaggataatgcagcaattggacgaagaccacacactgacgcagctcgcaaacgcatgggtagaccttgtcatggtaggaatactatgggttgttacttgagagttgtttatgatgataaatcaaagaggcaggagagaaatctgagttctactgcttcccattgcttctgattctataccagggcgggtccaagatccaagaagcgcacctcatcttccaggacttgtcagagaagtacccagcaacttgcttaattcttaatggtaaagcactgtgcctgatgcacatgggtaactttgaagatgcagagggattgctgctggaatcactgaacaaggtcagttctaatgatgtttttagatcaaaagttctaatgatgttaacctgtccatctgagcatttgctctagataatctacttctcaaacagagtgttagtgcttaacaaaaaatggtcaaactgttcaggatgccaaggatgcagaaactctagccaacctcgttgtgtgcagtctgaacctaggaaagtctgcatcccgctacctgaagtaagtgggttctacactgttatattttcattttgaaggccatttcctaatgccttgtcttatttctgcctgataagtcaagatgtcaaggctctaataattgttatatttctgtacaatttgagcgcttaatctgaactgtaattctgataaccgttgcagccaactgaagctggcacacccagaccatatgctggttaagcgaatgtcctctgctgaagacagtttcgacagagcctgccaagcgatatcatgatttctgcagtgctgttacttactttgctgttagataaaccaaaagcaatgcaacactctgatcttgtcatgacctagacaagctaatttttgttcattagcagttcatgaacaatcaacagaagtactacactttgtcaataaattggtacgagtacatcagtatctttactgaataaaattacggartacggagtactatctcttgatgcattggcagctgttgttaaactaaatgaattggcagctgttgttaaacaacaatttcggaaataaatgcagacgtagtacaaatacatgctgttttccggacaagacagcatgtgagctctgaatctaacatgtgagagtgccaccataccaacaaaccacgattattatataggactaggagtactaaatttaatttcttagcaagagtcagatgtatctgccagcaaaacaatggataagaggagtacgaaatctagtgacgtgttacttaaaaggacacctaatcataaggatcaacgacagagacagaggttagtggtggaagaaagaatccgagagaggaagagacaagagtccagcttacactccatcgaccaccgtagctcagatctattccaaacagcgatcgacacagtcagtgcaaaacttttgctaaacttaaaaaaaaagagaatattttaaaaaaattgagagagaaaatttgctaacgctggaggaagttcttgtcaagaggcgtttcagttcagctcttcttcggagcggcgtgctgccatctccctaccgtttctgaactcaacttcccaaacggcccagcgcctgctatcgcagtcacatacatgtggggcccattttcgcttgggcccagtggcagtgacccgcagataaaaatctcgcgatccattccacccggaattttatgacgttaaaccccacgtccccaccaaaccaccaccactctcctcggcttgtgtcgcgtgtgtggcgcggcggcggcggcggcggcggagctgagcggccgcggcg

SEQ ID NO: 5910 - DNA, 2000 bp, Oryza sativa
ggtgtagtatatacttataagtaactattgtatgaatgagctattagattggctataaataaattgaagctagtagttggctatactattaaacttgctctaatagttagtattattatggggaatgtgtaagccacgagcacggagtagcgcttgcatttttgttgtatatctcgaggatcacaatattcttcaacctctgtcagctcttaacatgggattcaggcgcagccccccaccgttcctcgccgtggctaacaaaaccagcaacccattgttcagggggctccagggaacaaactttgcctctgcaggatcaggcattctcgactcaacagtaagcacgtcggcataaacccaaagccactgcacgatttttcgctgaacaccggctgatgacgacgaaacacgtgtgtgcagggtcaatccatcatcccaatgagcaagcaagtgcagcaattcgccgccgtgcaacgcaacatctcagcacgcatcagccagcaagccgctgacaccgtgctgtcgagatccctgttcctgatcagcaccggcggcaacgacatcttcgccttcttctccgcgaacagcacgccgtcgtccgcggagatgcagcggttcgtcaccaatctcgtatcgctctacacaaatcatgtcaaggtaaaaccacctttcgcttgtctctcatcacacaattttacggcgaagaaacacaaagaatctaactgaaagttgacgcgtgagcgcggcaggatctgtacgttctcggggcgaggaagttcgccgtgatcgacgtcccgccgatcgggtgctgcccctacccgagaagcctgcaaccgctgggcgcttgcatcgacgtcctcaacgagctggcccgtgggttgaacaagggagtcaaggacgccatgcacggcctcagcgtgagcttcagcggcttcaagtactccatcgggagctcccatgccgtggtgcaaagcatcatgaagcatccccaacgactcggtatctgaacattctacgcttcagtttcggatttctgaccaacgcaaggttcagagtttcgtgacacggcattggtgtgcaggattcaaggaggtcacgacggcttgctgcggctccggcaagttcaacggcgagtccgggtgcacgccgaacgccacgctgtgcgacaaccggcacgactacctcttctgggacctgctgcacccgacgcacgccacgtccaagatcgccgccgcggccatatacaacggctcggtccgcttcgctgcgccgataaatttcaggcagctggtggatgaccagcactagctagagcgtggcagtgtcaccgtgtaacgtagtactactaattgttgtacgtcgccgactatgtgtctgtttgtctggtgatattggtgcgtaggatatgctgggctgtgttcatcagtggcttgtgctttaggcggtggtgtagtttggatacacataccaaaatgtcatctccgttattattgttgcccttgttggtatttgcggtgtttgtgttcccaagtcgggataatttgagcctggagcggatgagccaaggacatcgcagctgcttacttggtgccaaatcggaatacaaactctaaacatgtaggtacatacacatatgccggccatgccgttcttggtcccagttggtatgtcctcagcttgcgccagttgtgtatctgtcctgaagtcgccgtctcggctcttcaccactgccactccaggttaccgatctgcaggccaaatggaattcttcagagggtgaaaacaccagtttgtttgattgcgctagagaatgaacagcaatacagaatggacgtggacggcaattgaattaacaagttggtgctttggtgatcatattcgagaatcgacagtatatttctttctggtgcatattcttgtatatatatctacggtcacaaaggctgaagcatccatcacccgaagctgaggagagcagagagcagagagcaggtgtgcca

SEQ ID NO: 5911 - DNA, 2000 bp, Oryza sativa
atcgtcttggaggagcctccgagatcaagatcacacacagtttcgctcaccaaatccttgaatctcacccgctgcccccgaccgaactctcaaagggaggcctcacagcctcccgctagagagggtcacctctcgacaaacgtaaaatgagatattttgtatatataataatatgaatgaaatcattgcggtgaacataaccattcaaaagttggataagcaacttcaaattatttgtgcccatatgtaatagtccgtatgtgaaataatggtacgcataacattagcaatactccaaactgatcacttttttatttttcttaagctgcgtgcaattggtcatgaattagttcctaccatcttttctcctttttattttcacagaattaggcatttttactatcttttcgtacaatgctttttagcaccgtacatggttttatataattaggcgacctaactctcttcattatcatctcatgcgtgcgtgataagaccaaattttcttgttctgtttgtgtaggtcattgcgcttgttccttgatattttagatcttaattaactttgtgtataataaacatatataaaagttgattttgatatggactccagcattgcattacgatcgggctagaagtttttataagatggaagacgccttgcttttctttttctttcagtgagccaagtcagtcgacgtgattttttttcattagtgtcagaatcgctctctttttttttcattagattaagatttgatcttgtgattataaattttggtcccatcaatttaaagaaaaatcaatggtcaaatgttttttttcttttttttctttttagtttattagagtgatgcatggcggtttagaaacgtttataagagtatcaagttgcagcttaaaaaagtttgtacaatgttttaatagatttttaagtatataatagatatcattatctcatattccatcattcgctccataaaaaaaatattccatcattccatttcaatgtttgccaattgactttatttttcttttggttgaaacggtatgagtcctgtaaactgtaccctgatggcgccatctgaacgtgtcatggcttagtctgctacgttttgttccttgcaactgttctatacccttgagatggtgactgcctttagctaacaaaatgcccacttgtgcatacattctttcttttttccactctagtaattcatacgcacagttcatgctttgttctgtatcagcagttgattttcccgggagaacagcgtatcagcgtgtgagataagcattactccctctgtttcttagataataccgttaacttttaaacatatttttattatttattttattcatcattattatataaatatataagatgtaaatcatacttaaaatattttgaatgatagaacacctcacaataaaataaaataaattataattatatattttttaataataagatgaatagttaaatgtgtgataaaaaatcaatgatgttattattagaaacggatgtagtattattagtagatccgattgattacgtgtgaggccaagttaatcaatcaaaatcatccaccaactggtgcagcagggtccagtcatacaaagaaacacggccatatgtgggtcattatgttttgactgcatcagatcccgaattcgtgccacgtgatctgccgtcgtgtattcgtgtccactagaatatcagttcttcccggaaagatggctggtttatcgaatcatcgttgattactcgattggttaagaaagcgaagagctttgccccaatgctcagggaagcagggacaaactgagctgtgagaagtaggtaggctgcctttcagatttcagattcttttccacatcttcccctttctccccatcgctttcctgcatttgtacctgtcgctgctgattctagaaatccagaatttatttggatgaactgagaggtgtgaaagacagagacagaggagaggagg

SEQ ID NO: 5912 - DNA, 2000 bp, Oryza sativa
taataaaaaaattgattcttttaattttgaatggaaggagtatgcagtagtagtaaaaatatctcctagagaatttttattctatgagaacaaattatatattaagctcttttttttgccctatgaacacacgcacgcaaaccctacccctatgagcatcttcaaagactgggccggactgggccggcaaatcctggagagattgacgaagtaaaccctacccctatgagcatcttcaaagactaggctggactgggccggcaaatcctggagagattgacgaagttaccacaggcgcctagctgttgacgggtacgtcgcctaccactgaaagcacaacgccgataaatcctggaaaattcgctcccatggggagtcgaacccaggaccttaggtgctactgaggctcttgtaaccactaggctacaggccgatattaagcttttgaaacmaaaaaattggttactattaatattttgaagtttctaaatgatggtcaagaaattaatcgacttaatttaccctattcattttcatattacaagttgttttgatttttctaatcaagtttgtaaaaaaaaagtaacatctaaaacatcatattaacttcatcaaatctaacattaaatatacattttgataatatgtctatgtttattttaattaaaaatattactatatttttaaaattttggttaaatccaaagaagttcaacatcaacttataatataaaacaaaaacagtagtagtaagtagatactttctccttaaaaaaaatccaacctaagataggatatgatatatcctattacaacgaatttgatattttaggttagacttttttttactgaaggagtaaatctgatatatgaccattttggattgatgccaaaatgtgccctgccaatttattggtaccttcaatagtaatagtataggtttggattgaagccaaattgtttggctattcctatgatcaatttggcactaatctagagtcttcttctctgtatcatcaacatttggcaacatattagtagcaatccaaacatgtataataaatctctaccttacaaaaaaaaattggtaataccaaaacatgccaagaatttggtagatactctctccgtctcataaaaacgaatctaggaccggatgtgacatattctagtactacgaatctggatatgatatgttacatccggtactaggttggttttttatgggacggaggaagtaaggtagagaacmaaagagccccataatttttagcgcagtggtaaactggggagtggattttcacccctcgaggggatatcctcttgttgtttgcacatcactcaaatggttatgaaaaaatttgaaagaaattgagaagatgtattaacatgtgatatatcactccacaaacatgcaacttctacatctcgcaaaaaaaaataaattcgtttgttttttcgttgcgagatgtagaagttaaatttgaacatacatgtttgtagagtgatatatcacatgttaatacatcttcttaattttttttattttttccataacaaagttacatgtaaacaacgagatgatgaaaatagtttctccggtaaactgtggtggagaagtggagaaccgaataggccttgcagagagagagggggaggcgcgtggcgtacgtgagcgtggcgtgggcgcgggagagagaacaagtcaaaggatgcgaacgcaacaagacgagcaccagcagcatggtcaggacgacacaacacaactagtctcctcgactactcgtctctcggtcttccttccctccccctcttcctcctcttgctcttcccttccaattccaatcccgcgcgccgatccgatccattcccaccaccaccaccgtcgtctccctcactccaacctccgccacctgcgaaacctaagcttgctgctccgccgacgaggctgatacgtgctgagatactactagtagcacctgtacgtctaagctagagct

SEQ ID NO: 5913 - DNA, 2000 bp, Oryza sativa
tgacgatcttatgcggacaactgggctgcaaaggggtctcagtggtggtctagatgacattgttgttgacatgtttaggccggtatgattctttcttgtatttawtttttagaagagtattctatattggtwwtctgtttcagaattctattgctttgtgttgttcaagcagatcagtctttagtgacctatgaaaatttctggacacagtagtagtctatcaaacactcacttttctatggatgtgcgttactcatctctattcatatgtagtccacaagcatgttcatgtttgattccttcaagatattttctgctgcatagtaccacctttaatcctttgcagtctgcactatattattatagtatgaaacagcaacatatgtattgaaatatttcatattcgttctgaagagatttctaagtttagtttcagtaccacatatttcttaatcaatatgttaactgccatgctgggaagtacaaacaatgagtatactatgtatctgacaacgccatctttcatcgatgcaggaccgcgaagacgacggcgttccttacatcgatggggactgggagctggtctagccagcctccatttcaatcattagtccgcgtacgaggtttttctgcattcgcggtgtcggctgctgattggtccatgctcacttgtcagcacaaagtggtgttcatagtggctagccttcatcacaagtgcatttcacatttggcttcttttttcagcttagtgattattagttggccagtcagtctgtgaaatttatgtggagaaacggctatgtggtgtgtttttatcatgacttatactataataactatgttagttcaggtataaccggttatcctgataatatagtatgcttggtaaaattctcgttaatcatcgaaattctcttggctctttaatctttttcgtgacggtgtttatcaagcttgcaaagttgcaatgccagcatcttatgagatttcagcagaatgttgctgtttggaaaggtagttgttttagttttgcagttttgtgaagatgggaaaaattcatgtgtccggttaagacctgagctgcgtatattgaaattgcagatttctgaagagaagcttttgaactacagcctgaactgattactgaaccaaattctccatatttcgggacgaagaaaccttaaattttggaggaatttcgaccgaatttgaataaattctggcaaattttggacgaaatagctccgtacagtgtactacctcagtttcatatcatagatcgttttgatttttttaatcgaactttttaagtttaatcaaacttatagaaaaatatagcaatatttctaacactctcaaaatatattcaatattatatttattgaaactaattcggtgtcataaatattactaaatcttttttcaaatttggtcaaagtagatatgaaacggagggaggaaatttcgaacccaagttggaaaccctgctcatatgggcccaaatttcagaccgtcgattcggaaataaacgggccggataagatgattttggctgccgaacacgatcaaagttaaattaaataaaaaaaagaaaaaaacaaaaacaaaaacaaaacaatccgcaacttgcagattgcagaagcttctccaaccttcgattctcttctccaccttcttcttcttcttcttgccccttctccaagcatcgccacccttcgccgccgccgccctaaaatcgccgcgagagcgcgcgcgcttctcccacccggcgaccctgagagtccgaggcgccattgaacccctgacccccccacccgctcgccacgatgtcaygcgccaccgccgtgtccaggctcgcgcgcgccgccygcgccgcggcggcggcgcggggccammamgttggcggccgggamccgctcggggccctcgggtcgctcgctggaaacgcttcsgyttccgctggtggtggggcgaggaggcccgcgtggttcgsgccgccc

SEQ ID NO: 5914 - DNA, 2000 bp, Oryza sativa
attgggcagattatgcgcgatctctcgacgaaatgcttacttgaacccgtgaatcaaggggacggccaagaatccaggagtgcagaaaatcgttaacagaaaacctgacggccatgtgtcatggactcatgggcggcgtgatggttcaactgttgaagcaacgtactacgccgctgtgtctatcgcagcagactggctgaactcaaatgggaaacctgattgctgaaacaaaaattcatgtcaacgcttgcttgttcgtttctacgacttggggacccactcagctaatattatatactgcgggtaatcgtcttactaacatgtaaatcttaatttgttcgtcattatctgctaagagattacgactggctccaaggagacgatgcgacgtataaccgctgcaagactaatcaatatgccgtatttctgactttatctttaacctggttactgattattcacatgatctcacacatcaatatcccatgggcccacacacgattcttcccacatgaaaatggaggtgaactggggttggaaaaaaaattcggacgaacagtccacaaaacgtgtgctcagatgctaatctaatcgatatatagtacaattcggtgtgtgactgtgtgcacagttccaagtaccagccaggaattgccgaaatgcagtagcacgcacaatggttcagatggcgttacaggagtgggtgaccaaaccacaaaccgaacgccctacgattgccagaaaatctgtagcatcacctgccgaattattgatgccatggttctaccggtttgtaggtttcaaaacggcaaaatgaaatggctttacaaaacggcaaatgaaattatgcagtaggccaccagaaaaaaggcatcctgattccagtaggccgtcgaggcttctcgccgatgtgctctgctccgtccaaaaagatatcgtagtgtatggcagcgtacgcacgcacggctaaggttgcatctgatccccctcttgatccacttggggaagactaatgtgggatgccaaaggtggcaggcacattagtatttgtggtggtaatggcgtagttagtggtaacttttccccttttcacttttcgggtagaaacgtgcgcctaatgttttttccccaccattcatgtgggaagctgaaacatatgcgcaagtgcaatagaatctcctagagaaagcatccattcactagcaagtgataattccaaaatgtaggaaaagaaaatatccaaactgatagcactgctttactctacgacaatttacggtggattttgggtctcgccccgtcgcaagttgcaatcggaatcgttactgtaacgaaaaagaaatcagtaaatcataatgctgttgatgataaggttcacaagtgaatgcaacactctgattagtaaatttcaagcgaaagggacattgcggtaggagacaattcgaactgtgctaggattccactgtttggaaacacgctctgccattcgatcggtcatatgtgcttgccgggttgtgacttatgagacggcccggatccgccatgtacgagtagttgatactacctccgtcccaaaataagtacagccgtggatatccatgcctaacattagaccatccgtcttatttgaaaaatttgcgaaaaatttaaaaatatttagtcacacataaagtactatgttttatcatctaatagcaataaaaatactaatcatacaaaattttcaaataagacgaacggtcaaatgtgtaaaactgtacttattttgagacggtgggagtaagaacgagcacaaatactctccccgagtcttcctccgattagtttacttaaccccggtgtttgcagatacttttcgtcttttgccccccttggtctacaaaagacttcacactacatacattcagaagtgctttctttcgcttcgagcctcttcctctcttttctctcgtctcttccatccacattcttctctctctctcgattgcttcgcactggga

SEQ ID NO: 5915 - DNA, 2000 bp, Oryza sativa
tgttgtcgtatcccctccatgctacattaagcaggtctgcagaaatgtgatgttttaaatttaatccctcgggaacccttcattaatctttcactgaaagtcccttcataaattgtcgccaaaaaaggaaagtttcttcagtgaattggttgttgtggtagtactgttggagtaaacagttcgtttttctgttcacatgtaaattaccagtgatgaagctaaatctgtggtgcaagacaagctttctgaggttgcatcaggactcatttckgcttatgatagcggtgaactttgtcaagcactagctgagggccgtgatggttggcagaagtgggtgaaaatttttggcaaatcacttaaaagaaaggtcagtgctaatgagtaatgacagcaatcatttkgttcttttgttcttaggtgccgctcaaacacaactttttatggaagcaatctgtctcacctaaaccttgatatctagaaatgatgaaaatacaaccgaatcatttgatctagactttgacaacccaaccctagtaagcttcctttgttttgacttgtatatactaaccatcatattcaccttaaaatcacattcaagcccattgttgcaaatgccttttgtgccatatatcctgaatggaacaattataacttacctcttctggctgtatccatttgtgaccagggaaagtcactctttatgccgctccgtgtactgctgactggcaagcttcatgggcctgacatgggcggcaccgtagtcctcatacacaaagccggcacctgtggagcggtcactcagcaatccggtttcgtaaatctcgacgagaggttcagaatcctgaaggaggtggagtgggagtcactggtacaggagcaagagtccccagctgaaactgccgttcctgcttctcgataggctgcaagattcagatcaatcagggagagtttttgttttctgtaatactccactataaagcataggatatgttccattttactacccatttctacagttgtgaggaaactatagtttcggttttctgtagttaataaagcggaattttgcttagctgttctgtaattgtcgatttgaattggattggatggcaaaggttacgaggtgatgctgcttgtctttttcagttgctgaatccaaatatttctgagaacagtagaacatagcctgaattctctacatctttgtgactatctttgcaagatcatgtactcgtttaatggcatcgttacaaggagtgttagatatccacttgtcctccaaaatttgttcaaaacaacattttgattttgaaaccgaggaaacaactggagcacgcaccctctttggctgtgctcgggagtcactctctggtacacaaaacgaagcagcgtttagcgcatgattaattaagttttagctagaaaactagagaagcagtttgaaaagcatgcgcgcagaaaacgagggaagcgaacacagcctaaaagttgcacatatcttccagccttccactattccaaatgggcctaaaatttagctaaagggactatctagagaattgtcgaaagttttttaaaaagaaaactttcaaatctaacttatagtataattgcaatataattttactataactataatgtaactcctatataagtaataaaataatatatgtaacattatatctaaattatacggagatgataatgtagttacagtgcagttacatagtagttacaataaatattaccccaaaagttgcacttattttgagggagtagtaaatcaataaataatccctttttaattattgattagaccctaaaaaatcttttattattaatggattagccctaaacccttgttgttacgtggggtttagcggctgctgcatttacacgccattttttttccgctcttctttttccccccttcttttcccttcccgtgcgcccgcgaaaaacctcccgccgccgccgctccagggcactaaaccctagcc

SEQ ID NO: 5916 - DNA, 2000 bp, Oryza sativa
atttgggcaccgttcttttgccaggttcgggctaggtactcttctagatatttgcgaccatattttttaaattgttaaatattttttcgagataacgtgttatatagaagtgcctttatcaaataaaatgagctcattttccaaactctccaatattaaaacataattaatcatgcttaatagtccacatcgttttgcgtgtaaccaattaactcagctaaacatcataaacaaacgggtttaaaatatcttgacaacattggcctggcgtttgaaagcaagaatttggagcacattcaagaggataaatggtataattttaggaattctaagatgccgcacatgaaaaatgaaagattccttcaatagataactttgcaatggttgttcagagaaaaattctgcaaacgataccgctgtcatcttctagcaacaatgcatgtagctaagaaacaccccgaaagctcaagtgggaaactgagaaacaactaaacaagtgaaccaatcatcatttaaatggtcaaaagaagaagtctgaaaagtatgatattgcattacaaattttccattggcgaattggcctgaagtgaagtgacgagacaggctctcgctgggagcattcctcaagattcaacgactgtcactgaactgaagtctgaataagcccattcccatcatcccatgtaatgtgatcaaacgagcacacgattttcaaatgagcagaagaatccattgtacttctccgaaacctccttatccactagtcaaaagatgactacggttgtgtttattccttccaaagttgaaagtttgggttgaaattggtacgatgtgactgaaaagttgtgtgtatgacatgttgatgtgatggaaaaagttgaaagtttggatctaaacacagcctacttatcatcgacgatgccgtcgaatgtcgccaagttgattgacttggaaaacctaagatcttgtccatttctacaaggtatggttcatgttttagtgagttcctacgggaccattcgcaaattattggatatggttgtaacttggtatagtggatgagcgcactgggccaatgaagaatcattatctttgaccccctgattttgtttttgcggcaagcattatttttggcttcactgatagatttatcccagttcctttcgatggaaaactggcatgtcggtaacatgcaaattacaaaagcatgctgatacggaactttcaggcatcatcacttctctttcagtggaactttttatttagagagattgtgatgttgttacgcacgttatgattttgttagagtatagttggagagacattaaagataaagaaaacaagttggagagaaattaggattggattgattcatatcgagctcttcttatctcccatatcttagggtgtgtttcgttttatggccatctaaagtctaacctttttttaatctaagtccagtccccttcgtcgacacgcacccctgacctcatattttcgcttattttcgcttatacttatgtttctcggccaaaatttgaattttcaattttaaatttagagtagattttgggtttttttaagtttatttttcagcatttgcttttaggtcgctaagaacacgtatataaaatttttattcataaattatttttcgtttgtaaatacactgtttcgcttattcccacgttaggctggagctgacaatgaaggagtttaattggactatatttccacatcgtttagatgggccatattaggctggaagctgacatttcggccggggggtatggattgagttgggccgaagaagcccatagtacaacctgcgcgcgctgacgtgtcgcggtcgcccgcgacttcggcgcgggaagcgggtggggccatatggcagcgagacagccgggccccaccaccccccgggatcgtttgtggcgcccaccaccccacctctccctcgggccgaaagagccgctcgctcgatcggccggaacggagag

SEQ ID NO: 5917 - DNA, 2000 bp, Oryza sativa
gcttcagacagttcagtgtcaggactctcctcttcctcttgacgttggacgacggcgccctcggcttcgacgaggatgacatcctccgtgacttttccattctcgtcgtcgccgccgagccgctccctctcgcctccaccggcctcctcggcgtgttcgtcacctctgcatcggcggcgctcgcttctccgagctccctctcgatcgcctcggcccgcattgcgatctcctcgctggttcgccgcgcttccgtccacgcctccgccgccgccgccttcatctcggccaccgcgtggaccacctcggcgcgccccgtcaggtactcgtactcgaacctggggatcgtgaattcgtgacgttcctggacgacgagctccgcgacgtcgcggccgcggcggtggccagcgtcgcgctctcgacgatggccttcagcctcgccgtcgccgcggcctccgacgccctcgccgccccgagctccctcaccgactctctgatcctctgctccgccgcggcgatctcggcgtcgatgttctccgcgtcggacatggcgcgccggttctccgtctccgtcagcgtcttctccttctccgscgcctcggcgtcatcctccagctgccgaaggatcgccgccagcttggagatggtctcgtcggccctctcgtcggccgccgtgacggcttcaggcgagacctcgccttgagcagcttggcgttcagctacttcacctgcgcgctcgccgccttctcctgctccgtgaggcgggggatctcgtcggtgacccgcgccgtctccctgcgcgttcgctcgatggacgtcgtgaatcggaggccctcttccttgatggactccagcacgatcctcgccgagctcagctccgcctccgccgcctgcagcgatgactcttcgtgttcctgctcgtgtctcctcgacgccattgcagtggcagtgtggcacccgtttgctcccaccactgccaggacgccgtgctcctcgcttgctccgtccgcatctcgctccacgccgccgccgccgtctgccgcgcgggccggagctcaccggaacattcttcggccggagaatcgtcaagcctggacggagcgctggaccgctggttcggtcgacgggggatgcagtcggcgggccgcgggctgctttaaggaagatgcaggacgcgtgtgccggggaagggggcgcgcaggcgcggtggcggcgccggcgggcgactggcaatcggcggcggttgccggagattaggtcacggaggtcggaagctatcgagacgatggaragggatggaagatatggaatgtatcgaacatatatgtgtggtcgagaaaaaaagtgagtagtcgtactccgtagtccgtacaaaaagcatcttacggtggggtcaggtgtattttggatgcacgcgcaaaataaaaatacgacgctacctgtacatgatatgtaaaggtgtgcacgaatcttagagcaagttcaatagtatagccaactactagctctaatttatctatagccaatctaatagctcattcatacaatagttacatactacactattaatatatggtcccacctgtcatacacacactgtaggagtccgtgctacagctggctaccaatctgtagcctgctgcacttctctctgctcgtttatctttttaaaatatatttacagctagcttatagcccgctattatagctatcgtgcggatgctagccaggtgccgcagcacctaggtgctaaaaggacgttccgccatgatgtttagattccctgtgaccaatcgcgtaggtaagcatgaccaaactagttggccctccaacaagccaacaactactcctgcgcacgtttttttgtctgatgctgcagttttatagtactatgaatacagtctgatgagtgatgacattgacacccacctgctgcagttttatattgaattcggacagcagtcaccactccctcagtccctcgtcgcgtttcgtcggagaca

SEQ ID NO: 5918 - DNA, 2000 bp, Oryza sativa
ggaactctgtaagcaaggtcacacgcaaaataactcagggtaacacttgaactatagactggagtgggggaktggagacttgtgcctacctggtgcgcacctggggctgagtctccaacggagcatccgtggccgtgtgcggcgccgcggggaggctctcctcgaccgggtcggccatggaggaggcctcgacacgcagcagccgcgcccgcgcccgcgccgcgttccccgaggagagcctcgcccgcggcctccaggtagtgcgccgcgccgacgacgcggggcaggaggcggcggcggcggtggcggagggagccgtgccacggcgcgcggagagggtggtggccactggaggacgtgccgccgcgccgctcgtcgccatccccgacggccgcacgcaacgcaacgacgcgggggcaacggctgtgtggagcgtggaggagagtcgagacgagagaggaagagaaagggatcggtgacggtgagaaaaagcgtgacttgtctgcacggcgtttcgccgcgtgggcgaaacgggacgggaggaggagtgcgcgcgtgcgtgtgcgtgcgtgcgggccaggtggtttcgctgggccgtgacgccagtggacgcgtgggccaagaggccgggacgtatttgggccgaggcagtaaatcactccgcgggccgtagggatgcggcggctaacgtatttggtctgggctacgtgcacgggcgcacggctgctctattgtgcatgggccatctattattaccaggtggcccaatgtacagacgcatgctactactaccagagagttataagaggggaccacctatacatttggcgacaaattttctcctaaaaatttgacagatgtaattgtagtacaatcgtagtataattacactgtaacttatatgtaattacactgtaacttgtatgtaactacagtgtaacttgtgtaattttgaatcgttatatctattacaagatttgttttggtgaggaagaaaaaaaatcacggcacacacatatgtataaggatttgttcccacaacctccattttaccgaaataacatattacagaaagatttttgaaagttacatacaagttacactatagttacagtgtaattacatgcaagttacagtgtaattacactacgattgtactgtaattacatctgtcaaatttttgggagaaaatttgtcgataaatatatagcaaaatcgtataagagttaagaccacattgaagtttgaacacacttgaggtgtgtttggataatggaaaatggagggtgggattgggattgggaaataaatgaagggttagattaaatggaagagggagaatgaatagttaggatttaaagatatcttttgatggatggaaaattatttccctatcacattatccaaataatgccttgatgtggtatggactcatagcggactcggattacaaacagatcggatagttcatacatgtataaataagacgttttaatttttttacaatcaaatttataaaaaaaaattagcaaatttaaacattaaattagttttattaaatctaacgttaaatatatttaattatgtttgttttgtattgaaaatgttactatattttttcataaatttggtcaaatttaaaatttttttactacgtacacaataacttagaaacaacgaaacaagctactctcaagtctcaacctagcgaaagagtctctcaaagttttaaaaagacagattagtcatttgaatagactataatggtgtatggttcaatcatagggtgtgatgatatgcccttacaaatatcagattatcttaaatagcactttgtcgaataatccgcgtaaaaaaattaaacaatccacatccatcggattacagtaataccatatctttatctatctccgtcaaattttagatacctaccatatatcctcatttcgggtacggatgggatcgaaaagtatccgatttattttcgtcccttatcattg

SEQ ID NO: 5919 - DNA, 2000 bp, Oryza sativa
tgctaagaagagcaacaacttctttcttgcgaggtatcaacaccataactctacattcaccgtaactctatgtccaattggatatatgcagcctttttaaattaggaacttagcctatcgaataggaaacttagccctcaaataacccaatctaaaattcgttcctagagatttgaattcaggaccttggagtgctactcaggtccctgcaacattcgcatacatatagttacatctggggtaaactgggcaagaacaactccaactcgcaacaagccaacaatgctagtatgttcgtaatcatgagaatcagttgatacgcgttggacaggaagaactaagcagcatcgcgggcagttgccgacaacaactacagctcacctgatcgacctcgtcccaccaccggaactcggcctggaccttgctccgcaccacgttgtacagcagcgtcgggtagaacagagcccttgccatggcgccaaccgccgcctccttcgccttcgccttcctccgctcccccgccgccaccccgcgccttcctccggccgcctctactacggccatgccgattctcccttctccctcccctgcaaacgcaaaggaatccgatgaacaaggaaaaaaaaaactggtcttcgagttggggaattcggggtactacagtagagcagcatatggacatatggtgccacctacatcgtccacgtgggatgatggcatcgagcacgcatctcaaagcataaaggcccaaagtggcagccttggcccaagcccacttgtggcactgctccgtccgtccacgtactcgctccgtaccaatccatgtccaacgtttgaccgtccgttttatttgaaaaattataaaaaaattaaaaagataagtcacgcataaagtattaatcacgttttatcatctaacaacaatgaaaatactaattataaaaaaatttcatataagacggacagttaaatgttggacacggaaactcatgatttgttttttttttgacgtagggagtaggtcggaagacagcacgattctcaaagcataacggcccatgtggcagcctcgatccagcccacttgtgagctgtgatcagggcaactggccaagagcagtgcaagacctgactagaaaaaacctaaaggtgacacgtaggataaaacactccaaagacactattcacaatgtaggttatctatggtgggacctaaaatttcttttgcatttcagcccccacatcagaggggctgcaccttccctctccgatatagtattttatttgtcacataatataagtgattttgaaatgatctaatatatattagtattacaaatttagataaaaaaaacctgtcgcatctctccgatatactctctatgtccagttttggacaatgcagtgttgcatccctttaaaatcttttatattatgcgacggaaagagtagcacggtttgtgtgtacagtccattttgccagtgtccccactcgtagatctgagaaaccgaggactccagttggacgcgagttttcttccaaagatgcgggctccacctcttttctcctacacgccaatcagctgtcctacgtggactgatgaaggcaaacgccacgtaggagcaatgcgaagggtctcaggccaaaggcatcgagcacgaatctcaaagccatagaaagcccaagtggcagcgtggggcccactcccaccacaagtggcggacgatcctccaatacctccgcttcctccgtttcctccgtccccccatctcctcttctcctcctycctccamcamcaccacccccgcgtcgtcgtcaccattcgtccatccgttcgctctcctcccctccgccgtcgccgtcaccgtcacctcatcctcgtcgtcgtcgtcttamgcgccaccgtcgccatccatccgtcgccgctgccgccccaytcgcagcgaaagaaaaaccgaaacgaacccgatccgagatggcgcccgcacaccgaggccccc

SEQ ID NO: 5920 - DNA, 2000 bp, Oryza sativa
catccactgatccactagaggtactataggtctatagccaaatttttctatacattggacaaaaaatcatgaagcatcactgacgaagttgcccaactttgacaactgcattatctttctttcctggagagaattaatctactctctttttagcacttgatgtctgctatgatcagtgaagtcctgagtcagtagtttaaaactattttctttctttttagaaaagttgtgccttttcccctatggagatcccagtttgatctactagtatgaacagaagattcttcttattatctttgaaaaggtcaaatcaactcaaggattgaataccacttgcaactagaacctcaattcctatatacagagtcattgtycyctgtaaaaaagtatagggtaattagcactcactccacattaagtaattgtgcacaggttttttkttctcccaccatccacaatggacttatgtgccttatgttagtcaaccaaaagaggtatgatcaagaaagacaatgggggacaattagttttcycyawtattttaaaggcccagtcgtcttcctttcaactyctactacgcmcaacacgagaaactcccgtaaaaaatkaacyttcccaattctactacgataattattcacacgtaaaacttwacccaccaaaaaagccagattgrggaaaattaacccytttaaacccttattctatattcctctagatcccgttacaacgcacggacatagcacttgtgaaatttgaacaggttaaatgtggctggtgaagatgcatcgaccaaaatatacacacaaaatttagccatagtatacttctttcaacaaaatagggccctttggagcaaagattttctttaaaaagaactttggtagagcttgaatcactcggaaaacattttgctatatgcatggatgttttgaaccgagaaaaagaattcctatagggtggcttcaccagaagaatttcaaggaaagtaataaatggctaacctactgaaaattttcgtttgtgtatttttgtctccaaattcttgcacttccacttgtgaagcaccacaacatctcaatcaaaaccataacttatgagttataaaacttttaaggaccagttaggcatttcacacaatttcttttttcccctctccattcttgcttttccagattttccatgtttcacaattcacatggcccctcaatcatttttctaaagatgtgtcatacatgacatcttactttatatttcttatttggtgccattgatcaatacataatgcttacaagctactaggaaagctaaacctatggtttagaacatcagacaaatcaaatggaacatgcatgcaaggtgcatcattacttgaatggaccgttcttctaaggtgtcccactaaagttgtgccaatgcatgcaataaactgaccactttaatcaattgttcatctccttttgttgtcaaattcaaacttgaccttttgaatttaaggtgtcccaactttcctatgcaaagttacgagggaatttccataatttctacttgcaattctaaaaaataatctcgtgttgcagatgcgcctaaatacgctttacacaaaaaaaaacaatggaaaataaaagcaatgtgaaaaaacaccacaaccaagtcaaggaaaaaccatcaaccaagtcttaaccaaatactcctaccaaaaaacgtttcaaagatatcatgccaggtcagacacccgaattcaacgtggccccaccagccagcgagaggggtgggccccaccggccagtgaaggggatggtgactggtgtctggtgagtgagaccaaagactccaacaagtctactacacacaaaaaaaaaatcaaaatcaaaacaaaataaaaacctctccawtttttttctcccccatttcgccttccttcctctcctcggggtttttgtccacaaacgagcggctcgcctgcgccgcgtggattcccctttcccgccgatccggcg

SEQ ID NO: 5921 - DNA, 2000 bp, Oryza sativa
caattatttctcaaacattgttgtgccacgtggaccaatcaacaataggcaaaactgccggcttgagaaggattgattgatattgtttaagttatcataaacaacatcaatttaatggtttatagctttttttcaatgatcgatcaaatatgatgattatataaacttatattatttagttatcttatacgctatttctactattatcataccaagctcccgtaatattgtgcgggatttcatgtagtttcgttaagaatgtgcccttgtcaagtaacatggcattgctagtattttgtgcatatcttgtgccgttcttgtaagggacacaaatgcaatatgttggaggaaataatcaagacttgaatcctgacaagttcttttagggggagaatcttgacaagttggaccatttgaattcatgcttctatgattttctaaacaactattgcccactccaatcaggagggcaaataatatattggtagggtagatctccatattcgatctgctgatttaaataaacttgagtcaatttccggcaaatataaagcccgtaagccagctatgttcttagggttctgtttttttacaaaagttcaggtatgatagctggccacgtccaactataaacagggattatctatagagctcaaaataaaatcccatccaatcacttttattctctctcaattttattattggttgctacacagagctggtttcttcgtaagaaatgatttcttcatcttttttttcatctcttctcattaactattttatcgcctctttttacttatgtgactgttttttttttaaatacgcgagagacgcatctttatattaagaaggrataaaagtatttacagagcgggccgaaaaatcaaaaacacgaaggggacaagatacaggagggggaggaggaagaaaataaaagtctaatctcccaacgaatgtgacgaacttccatccgacataggtgactgtatatttaacggtatgtaagctaggtgtgagaaagagggtttggactgctctaatgcctttgctctaatcctgagcactagctgttttgcatgctgcgcgcgcatgtggacggatccattatctgctgtctggtaattaagcagtactggtgacttaggagtagatgccaggttatccaacacgtgagctcgtgctcctcactacggacatactgatcagaaggttgaccttggcgtctataaattgcgggattatgtgaacagagtagacacgaagcagatcaaccaatcatcagaatgaggggacggtcccgagtttttctcctcgccttggtgctcttcctcgcgctgcaggcgccggcgtccgcaggcacaaaggcaatgctctttcttcacttctctctcttaccctctcgatctattcatcatacatgccctcaatattttttaaaaatatatccgccaaagtcattttgttctttaattgcatgtcctctcgtttctcttgtatgtcattcgaatatttatgaaaaatatttttttaaaaaaatgtatttaatggattttttaatcatacatggagattatatttttaaggggatgctcttttacttcttgccactcaaatagttttacaaaaaaaaatggcaacatatataacatattcatatgtgatttaaatttgatcaattataaatcaacaactaaattcaatgagaaaatcaaactaaactgtaacgtgtactacttaccgtcgtatttatttatttatttctaatttagagttacaaagagtgatatatcacatattaatttgtgttgttaaatttatttaatttttataactatttcgatgatatatgacagaaaacagggtatatattccttaaaactgcaaaaatgtttttccatcgtatattcgtcacgtacaatacaagcaagtcaacaaatataggactgcgattaaatgttctattgacgatctctaatccatgaagcggggtactttcgtgc

SEQ ID NO: 5922 - DNA, 2000 bp, Oryza sativa
tgacgaaaagaaaaaaaaattatgtttaattttcaaattaaaaactggttcattataagatttcagaatcactaaatatctgttgaagaaagaggtataaaacttttgacttttcagccatcgaatgtgcatggtctgtgctaatggtggagagaaaaaaaaaggatgtgcatggtccgtgctagtggcggagagaaaaaaattgcacgcaaataggatttgagatatggagacaaagtagacttattccgagtaataataagtgtaaaagttttaggtagggtaggtcaatctggcctaggagaggcccatagacagtgcgagtaataatacaaaactcctaattagtgcatacgcgtcgcgaatttaagtggtgcgcgttttgagcccatccatcgcacagtcgcgtgcgacctattttcctttttttatattatcttttgtttcgagacttctttttcacgcagttggttgccacattgtcttctctattttttcgcacctcttgcgcaaggagtcggataaaaattgaaaaaaaaattcgcacagttggttgctaccgtgtctcctcttttctgttttcgcacctctttttttccttttacgtaattagtttccagtattaccatctactttacttcttctcttttttactaaaaattaaaaattactttaataattaaaagttataaaaaaataagctataccaaaattgaatactttcacttaagatttcgaaacttcaactcgaatttcgaaaactttcaactacatatttgaaattttcaactattcttttaaaagttttaactaaattatttatgtgttttttctattgaactttgtttttagtgaattccctacctgttattatcctaacttaccgcataaaaaaggaaaaaaaaagataaagcgtcgggaggaatttttttcccaagaaaaaagcgaaaaaaaaacaaataaagaaaaatgaatcaataggtaggagagaaacttaaatgggccaaagcctgtaataataagagtaaaaaggtgagggtggcgggaacgaaccctggtggccacaatgaagattttcttcactaaccaagtaggcaagctgctacttgtgatcacatgttacatcaattaatacatatcctatattaacctagttttgaggtagatccaaaaggatccatcccgactattgagcggattaaaacaattttagcaacatgattctgattcggatgacggacgaaaaaaccatacggaaaccttacgaatttttttattaggtatagatgtcattataaacttttttaaaaaaattcaataatatagtttatgatgtaatatatcacttcacaaacccataacattgcatgatcaaatttaactttctacattttacaaaaaaaataaaaaaaaataattttgaatatacgttaattagttatagtttgcgaaagaacatgtattaacctgattagcgcctcaagatcgtacgttcaaatctccatttgaacgaattttagattgagttatttgagagctaaattttcaatttaaacaattatatatatccggttagatgtacatatcggataaataatacccttttttaaaaaaggattagttgtagtttaatttatttttccattgtgatttataaaaattgaatttgtgaagtgaaatgcaaatggcgaaatgacatttcttcgtttagcgtgaagcaacggagagaaggaacggaagcggtgggacgcgcgcgcacgccacgcgcgtagcgagagcgaaccagctcatccaccccgcgatccgtttttgctgtgcccctaccgcctcagcgcctctccctcgctaaccaaacccacacacccacctcttctctctctctcatcgtctccgcgactcmkcycwctccwcymycwccaccaccaccaccaccrccgcascrcsgcccgccagcgcgcgcgacacagcagcagcaggatcggcggagaggaggggggatc

SEQ ID NO: 5923 - DNA, 2000 bp, Oryza sativa
ggggaggcaagccgggccgcgggaggggaaggagagaggattttgggccgagcccgaaagggaggaaggggaagtttatttkgttttctttttatttaaattgatgcaatgacctttgtgctattaaaactatttctcgagctccgaaaattcacggaaaattccggagagtacattagggcacaaagaatattacaaaatattcccggccaatgatttttaagggaaaattttaattctcccaacatttcacttggataaattgatttaacttttatttaatttctagaaaatgtattattaatttatttttaaacccgaacgaaaatcggggcgttacttgtactcacccttgcttcaaccacctttttcagagtccatttgatgttcttgccgaagtcaggagttcaatcacataagttagttctcttttaacttaatcttcaagtctaggtaatttaaatggtttaagtctatagtaaaacaacagagttaggtcattctaaagcttctgctgtaatagttagccacaatctcgtaaataccctattactttatgtaatattatctccttcaaagctatgtctaaacgtatgcaaagacgatccagattgtcgaagctgtatcaacctactgatccagggcttgatacagttaaacatgtcggtttccgaatcattagttttgggacccgacagatggggagaaaggtgaccgccaacgggaagtgggaggcaggcgatgaggatataagggtgatggactacggggagaggggcgacatgctttgtctataggatggcgccgcccaaggtcaggtaggctaggaacgggtcgaagtcgtcttggctggtgggagagaggtgaaggtgatggtggtacgggaggcattgttggcgggatgcggatggacggatgagacgaaggaagaagaaaagagaaaggaaaggaaaaacaagaagaaaaagaaaaggaggtggcagccatgtaggattttggaggagtcgtcataattttggatcaaaaagatacacttgataaaattaccagaatcaacatttagagtgtatggagatctacttgataaccaaaacaagtttaagaaacaaaaagcacttcactgtttattttttcctttyctttctgtcatcgtgctaaatgaatcttatacactctatctacttcaaaacgaggatatttaaatactgcatcggatttttcataatttcttgcggcctctaccagccttgatcggtcgcattcatgtactattcattgttttgaatgtccctctgggcaaagtcaatagcaaaaaacacgaatattcaaataaatagaagaggtaaggctgcgaacctataccagctagcccatcatcttgtgaagctagccagaagacacttggacgtttctcaagtcaatagctgtaatttttcactaaaatggttgaaagaaaatctcaattcaacagtcaatttttcccgcgcacacgccgtatggcccgtatcgtgcatatggtgatagaatgacgatgacatgattggccgtatgtgcgagactaatcagtgcaaatttaagcagcaaaggcgaggtggccgtataaggccctgtatagatgggattaaacttttaagtccctatcacatcggatgtttggaaattaattataaatattaaacgtagactattaataaaacccatccataatcttggactaattcgcgagacgaatctattgagcctaattaatccatgattagactatgtgatgctacagtaaacattctctaattatggattaattaggcttaaaaaaattgtctcgtgaattagctttcatttatgtaattagttttataagtagtctatatttaatactataaattagtgtttaaatatagggactaaagttaaatccctggatccaaacaccacctaattgtcttcttaatcatattcattcatctataggctcttcactgtgctagattttgatccaa

SEQ ID NO: 5924 - DNA, 2000 bp, Oryza sativa
ctggtggattctactggctatcgcagcatcgtcggaagtttgcggtacttggttcacacaagactggacatcgcgttcgcggtgggttatgtcagtcgcttcatggaggcgcccactgccgagcatgaggcagcggtgaagcggatactaagatacattgctggcacaattgattacgggatcatctaccggagatcggagacgccggctactctagttgggttttctgatgcagatatggccggtgatgtggatacacgaaaaagaaccagcggtgtcatgttcttccttggatccagtccggtgagttggcaatcccagaagcaaaaggttgtcgctctttcgtcttgcgaggcagagtatattgcggcgacgacggtagcatgtcagggtgtctagatggcacagttgctgggagaaattaatcaagctcaaccagatgttttcaagctgatggttgacaacaagtcggcgattgcattgagcaaaaatccggtgtttcacgaccgcagaaaacacatagctactcggtatcattatatccgggagtgtgtggaagaaggtcgagttcagttggaattcactgggactgcatatcaagtcactgatatactgacgaagtcccttggtcgagtgcggtttgaggagctacgctcgcggatcggggttttggaagtaagtcgcgagcacaaggtttagggggagatttgttgcatattacgttaaacttgtgcctgcaaaagctgttttattcagttaggatagtttcctttcatgcacgttatgtgtttgttttttattccctgtttttctgggctcgctctagtcagagttgagcgcgtctgtagacctgaggcgtgcgagttcacgtcgaggcggtagtatgcgagtctctcgctgcacgatctgacgagtgggatagcgctcgtaatccggatggtagagcgagtaatccggtcaatttgttaggccgtagtgtgcattttcccttcaataaaaggaagaagaaaacgtgaaaacggtgcggcaagatttaagcaccacaaaactttctgtgttcattgctctttagcttactgttcatcttcaagtttttgtcaagtgagagagagatatcgatcatgtgtgtttctaccaacacctacccgccccggcttgcccgagaggagagaagtgagagagagaagggagagaaaagagtagctgacctggacaggctgacacgtggggcccacgtgggtcccatgctgactcagctgccacgtagaccaaaaccgggatcaaaaccgccgaaggatctcgggtgaccggttttgcatagttaagggacccccacatacctggttttacggtttgaggacgttttttatctcactgacaagttgagggacctccggtgcactttttcctattaaaatggcctgcacgttcgccgtgatccctttccagcccataaataaatgggccgagttactgccaatcttggaataagaggagacactgacatgtggacccaacccactaactgggttatttggaccaagtcaacgagccatgtcagcaaaagccactctcaaagaaccatcgagggaaatcaaaattgcactgttttwaatagtggggggtcaaaatatttgatattatggttgaaggatttgaataagatttacctacacaggagggagcaaaagtagacttattactccaatccagtttgttccggcccatatataacgggcctcacatgggcttctgcacctttccggcccatatagcgcagcgaagccgagccgagccgaggtctacacgctgtcacgcgcacgtgctcatcgcgaggccacccgctccgccgcctccatttcgtcgccgtcgccgttgccgtcgccgccgcggcggcgtctctctcctccgcgtgggctgctctgcttcgtttccgcggcggaagccgggccgggctgggcctgtcggccagggacagggagccagggaggttgccgctc

SEQ ID NO: 5925 - DNA, 2000 bp, Oryza sativa
actgtacagccgcaaaaaggggatcgggatggtttggttgacgggttggaccggtttgtgcgtaaaccatgaaggtattcgcattacgatggctagcttggtgcttggagatggtgtgttttccatttgcaccgttcagttggcaccatcggccgccgtacgtagcccgtaagtgcgcacgcgcgcgcggggtgaggtctgaaaggcggcgacgacaaaaccatcaatcacattaattactttttgaattccagagaaactatcgctgtgtttagttactaaaaaaagttaaaagtttgggaaaagttggaagctttatgtgtgttagaaagttttggatgtgatgtgatgtaatggaaagttggaagttaggggtagttggaggagaactaaacacagcctattatgaaatcggattcagagtcgtcaacagaaacaattctacggttcttgaagaggtaccatcaggtatcaaaaatttagtgtaaaatttaatatctcatagtacctttgatacctcatagtacctaggtactaagaggtaccaaatttacaatagaaaaagtggtacttcatggtaccttctcaaagaccgtaaaattgctcgttcaataaaggtttatgtctaggagaaaagggtcgggggagatcatcgggtctagaggaatggcattggaaacgaggaaatagccaagccaatcctttagccaaactaaatattgattattaaaatttaagcaaactaatttatttgattttttttcaaagcaacttctataaaagaaagttttcgcagcagatgaaaaaatgctaatgaaaatcgaggaaatagctaagccaatcctagtttagaacatgcctatttaggggagcttctggcaactgcagcttctcgtagaatctccagctgctagaaactccctcaaacagtttatattttcacccagattctgagaatccgtagttgtagaattcagaaaataaaatagaagtcagaagctatgtttcctagcttctctagatatgttttcttgcttctccagattctcactagctagcttcttaccagctgtttcttaaaatcttaaactccccaagcagacttggtctgtcaacttgattttccatgcagtacatgcataagaggatgagatgaaagtattccctccatctggaaaataagttactagattaatttctattagagatttgcttcggtccagtaaaaagtatcttgaagtatcggtatctcacggtaccaaatcgttagattggacaggatagacattgtcaggggaaactattctaatccctcgaggggatgttccctcgtttgctcaaaaaccatctaaacggttatgaaaaattctggaaaaatttgacaacattcatacaacacatatataaaacttcacaaaatcttaagaccaaactcaactcacacgtcgagatataaaaaagacaaattcagcgtatgaatagtagcgtactgtttatatctaaatttgtcttttttgtttctcgatttgtagatcgaatttgaacatgaattttggtggactagtaggtatcattatactctacattgtcaatttttttcagattttttcacaactatttgcatcgaatttggaagaaaaaggtatacgaggagatccattgtttattggaccggagcagatatctttcttttaatatactgggagtagaggatcatgtctcagtagtcaaagagtgtgacaagaacgtgccgctggcgatacaagctgttgcyttattccacgcattatgttcgacttagaacactggcaaatgttgaacgctggaaaaaaaaatcmagaaattgtgcatgcggcagccatttttgactccaattgcgcgctcaaactcagcacaacgtgcctaatgatgcgtcgcaccgagtgggcgagcagagcagatccgttgcctggcgcaagtccacatcttttgtgtgagcatctcccctctctgctgcggcg

SEQ ID NO: 5926 - DNA, 2000 bp, Oryza sativa
  misc_feature (1)...(2000): n = A,T,C or G
gtaccactttttctattgtaaatttggtacctcttagtacctaggtactatgaggtatcaaaggtactatgagatattaaattttacactaaatttttgatacctgatggtacctcttcaagaaccgtagaattgtttctgttgacgactctgaatccgatttcataataggctgtgtttagttctcctccaactacccctaacttccaactttccattacatcacatcacatccaaaactttctaacacacataaagcttccaacttttcccaaacttttaactttttttagtaactaaacacagcgatagtttctctggaattcaaaaagtaattaatgtgattgatggttttgtcgtcgccgcctttcagacctcaccccgcgcgcgcgtgcgcacttacgggctacgtacggcggccgatggtgccaactgaacggtgcaaatggaaaacacaccatctccaagcaccaagctagccatcgtaatgcgaataccttcatggtttacgcacaaaccggtccaacccgtcaaccaaaccatcccgatcccctttttgcggctgtacagttgtacgtggggaggccatatgtgtggatcctgtgcataatcaccccgttgaatccacccccttcgtttctcgaaagaaatttgaaaatatactttattttttcatatattgcatttatatacctggctgtgamytaatttacaagatatanacccaatccacggaacggwttgacgacgwggaganaagaacktgatgmatcasccgrttcccgmtaaccgggnatacggtaccacgccggtccgcgggcgtggtgagcgcggcaacgctcccgcatgccagatgtgtgggaccggcgctcccacatgccgcccccatctcggtttcccgaattggatccgatatcctctgcacgaaaaacggagcagactattaacatataattaattaagtattagttattttttttttcaaaaatgrattaatatgatttttttaaacaactttcgtatagaaactttttataaaaaatacaccgtttaggagtttgaaaagcgtgcgcgcggatgagttggaaaaattaggggaagaacacatctctaagaacacgcgacctgttcggttccgcgcgttggaaccgcgcgamagcgtcggtcccgcgccgccattctgcggcaccgccgcgttcactcatcctaccatgggctccatggctcccgtgcatcggctccgcggtaccgactcggtcccgcagccagttgtgcgggaccggctcggtcgcgcatctcggttccgcgcgaaccggctcgggtttccgctcccgcaatccccagtctgcggtkttcgtcatggctccgcgcatccgttcagcggattgggtatatttttgtaaattaatcgcagccaggtatataaatgcaaaatatgaaaaaataaagtatattttcaaatttctttcttcgtttctctccctcttccttcacggctgcgcgtgacgtgcggcgtatagtacgagtctccgccgttagaggccgtgattcccattccccgcacgcgccgccacgcgacgagtccactcgtggcccgcgcgcgtccctgtcaccccctgtgcgctcgacgagccgcatccataacccgtcggttcaatctgatggaggccggcgtcccgcgcacttgcgttttcccgcaaacgcgatcgctctgttcgtttgctccagtatggctgcgttgctgctcctatgctctgcttctctctcgtgtacagaggagcaaagcggtaaacggtctaatccgtgaagtcagtggtacgtctacggccgtcgactccaataagcaccgaatagtgagtaaacaacaatcttagctgcgagaaacagccaacgacttgaatggtcggacgaccaaaagtttactctcattaacaaaaccgagctcgatacaagtacaagtgtacagaccacccgttcatccgttccaccgtgcagtcacg

SEQ ID NO: 5927 - DNA, 456 bp, Oryza sativa
cgaacctagatatactctatatttgtatgtgtcatattcacctaaaatctcttatatcataaaaacggaagaagtagtaataaaaatattatcataaaagtttaaataagccaaacgattaaacactagacatataaatctaccgctaaccttaaaatgagatgagatagagggacagagcggctaattaacgcgtatcccaatcacgcaagggattaaaacccctcgtccgaattgctaacaccacaccgttcgtctccccctcggagaaacgcgcaccgagctcagctgtcatccatccatccatccacgcgacgcgcagacacaaagagaaatacatacgacgcctcaccgaccactcgctgcccaccattactgctgctgctgctgctgctcccaccaccaccaccaccacgggacgaggaggaggaggctgcaagaatccaagaaaccgcg

SEQ ID NO: 5928 - DNA, 2000 bp, Oryza sativa
  misc_feature (1)...(2000): n = A,T,C or G
gcgcccagtgtgaaaaaaaaaggaaaaargaaaaaaaaactcacttgcattaggagacacctcggggggcaatttcgaaggtaaaaggagagtcacctttgggggaktcgaacaaggaggcgtaaaactcctcctccctcctcagcagatccgccatggtggactcccttcccgcgggcttktcgcgctccccctcctsggcctcgaagctcgaaktgctgcggcaatggaggatttraaagggaktaaaattscggggtgratggattgcccktcgtggtgtttctagggctaaaatatggtggggcaattgattggggaatcgtgttcgaaaaaaccgatgcscacscaaaktantggtaaggaatatgcggatactggcaccggaatacccgtgggctgatattagcaattgggcctaaacagcaaagcccaattaccagaaacagcaaagtccaggttttgcttcccattcatggggcctcatggctgctcatggccagtgttctagataatttttaggaaagtctatacgtagcttgtcttacttaaacttttattactaacaccatgtgttacactgatgagtacatctcgattttttattatttctatctacttacaaatggttgagcttattgtttgtaaaagttttgtaaaagaaatttagtacgtgtagcagtgctctaatttttataagtaggtgaaagcccgcgtattgctgcgggaatttagtatgtttgtgaattatgtgaattattatgtgatatacattgaaacattatgtgaattatgttggatgataatttaatatgtttgtgtttgaaaagctcttaaattataaaaactataaagatatagcatgtttgcatgatgtttaaatgtgatgattgttagtggatgatgatgtggtatcttgttaattagtggatgatgatgtagcatctttgcatgaagatatacattgaaacattatgtgaattatgttggatgataatttaacatgtttgtatttcaaaagctcttaaattataaaaaatataaagatataacatgtttgcatgatgtttaaatgtgatgattgttagtggataataatgtgacatcttgttaattagtggatgatgatgtggcatctatgcatgttaagcttaagataaaattttcaccttcctatcaacagaagacgaccaggcaaagttggcatcacaagtttcttagtagtattttcttttttttagcaagagaggagatcctctcctgttcccattagcagaaacgatacaatatcccattggagttggacacaaccaaagcaccattctgttgtactccgttttcctgtgatgatgccatggcaatgtcacgaggggaaaaaaaattcaacaaaaagcatccaatcccttgtaaatacttttacttctacttcatataatgaaattggcccggtcttatgtcggtgcgttaaaaaaaaaagaaagcatccaatccacataccaacgcaacaaaagcaaacaccgccggccgcagccgcaccgcacgacacgacgagacgtgagggccggcgcacacgacgcaagcagcacgaacggataagattaaaattgccctcaaaaagraaaacggataagatwaaaccgrtaaatatactatgcgtgccaccaaacaggcaaaccaaaaaaaaactacaaaaagcacaggagatttctatgggattcgtctagaaagctacgattcctagttcctacccttcccggtaacttatttatcctcccaaatcctctccaaattcaaacccaccatttccttttctttaaaaaaaaactttacttaaacgctagtagtacacttccactagtgaaaaaaagacgaggagtcggagtcccmcacgcttcgtcctctgcttcccacgcgccacaaatttcttcgccttcttcccacgcaacgcctcgccggagaaacaggagacgagtagtagacgactagtgcgagccaagggc

SEQ ID NO: 5929 - DNA, 2000 bp, Oryza sativa
ggggagcagcggcagctggctttttgtcgtcagggtcgcccctggggtgggggcgatgcggactagatagtgtaaatttgaatttagtaggatgttagacacatgacatatgaatgttgttaaacattttggaaatttttacgactacaagaatataggtattagtaaattaagaccgcccgtaaaatatagcacgtgaaagtaaatatttgaagcgacgagaggagaatcccaacaagagaacaaaacgagtttcccgtggtacactagcccaaaagcctcaaaacccgcccactcccgttttcttccgctcgcggaacgcaacggttcacgcgcggctcggtcgcgagccagcgcgcgcagccgcggggcgacggggtcaaccaattcagcatgcagccactgccgccacgacacgacacgggagcccagccgagcctagccaaagcgtcacgtacggtacccgcgccggctacgtgcaactcctccacccggctgggaaagtgttctccttgcgcgatcgtggatagggatgaaaacggtcggaaacgatcggaaaacagcctcaaccatttccgtaaccatatttttctcggaaacgaaattggaaacggtaaagtcggaaacaaaaacgatatcggaaatatcggaaaaccagaaacggaacaatacggacggaaacatgtcggtacagatcggaaaccggtaacaaatacggaaacattaaactataaaaacatatatttaactttacataagtatgttatatatatatacataaattcaagcttatactatataaattataaattaacttcattttagccatgtacaaaagttagagattttattgaagagtcattcaatctataagctgtgggttaagtatagacatgtcctataatatcgacatatttagaatacggtaattaccatattataagaaacggtaatttccgcgagaatacggtaaatacggaaacgatcggtataacagcaaaaccatttccgttttcatttccatattttttaccatttccatttttgtttcggtcgattaccatttccatatggctcggccggtagaaagtcgaaaacgaacgccggtcggccggttattaccgttaccgttttcacccctaatcgtggagaccacataatcggttcatccccaacaaaaaaaaaaacaaagggaaaaataaaaataaacaaacgacgaaggacactactgtttgcgaaaatgagtgagtacagtagcagctgacgaacgacgattgctatcggtgaacaactactagtccgtagcatgcagttgacaagaggcgagacacgcggtcgctgaggctgcaccggttactgtcgcgcggcacgccatcggtcgagctcgagcacctgcatcagattcgaaggaaaacgtggtagactttgcatttggatccagcggagaggatacggatacccccaacgaatatttattatttttttaacttctttaacttttttattttagaaataaaccattcttaaaaaattatttcctaaatctgaacattttaatcacgtcaatccgtcttacgtgacaaaataacacgatcacgtcacccgcagttgacatgacagttgtcatctggcagaccggcatgatcaaataacgttgtcatgttattcaagccggcgtgacagtatcgttttgcctgaccaaaagattcagatcttgaaaataaatacgttttaaggtatattttaaaattaaaaagttcaaaaaaggaaaaatcacccccagcccaaccatccgtgccatgcagaagccgcctcccgcgcccgctcggctaaagatgcgcgccgcggcggcggagaaaacggctataaatacgcgacccctccgcttgccacactctctcctcagaagcagcagcgagctcgcgaacgcgccactgcttagcttactcccgcctcactatctgtcttggcgcgtcgtgtacacgatcgagcaccagaca

SEQ ID NO: 5930 - DNA, 2000 bp, Oryza sativa
gaaaaaaatcataaccaatgtccaaatcagttattaagcaaaacatgtttaaaatgaagtcagggaatatttcaacaatattattctaacataagcattcacaataaaaattaaagcaaaattaaacaaggtgtccgtgcatttctagttcgtattaataattgaaaccactcagtgctagaaaatcagtgcaatcggcaccaacgatcatcatagtcggaaagtcagtggcccttaaaaaccgggcactgacgaagtgtcctaagctattgaccttatttwatttawttatttattttcaaaaacgtgataataaaaagaaaggatcatatcacagattcacagctactgctggcgcaggtatttccacattagttcggcaaatagtctagtgcagtcgtgcagacataatatgatgtgcacttgcaccttcttcaggtacaaacgtagttcaatgtaccatcagaatgtgcagtggcgaatgtacaacgtgatgaaaatattattggggctttatattaaagtcataatacataataattataatatactttttcaaaatcctacgcggatagggaaaaaaagaggattaaagactgaagtgaactgaaaaagattgaaattaataggtataagagcactgctacacatactagttttttcttactaaatctttactaataatcatctcaaccgtttgatttaggtagatggaagttatgaaaaatctagatgaactcgtagcatgacacttcagtgttagaatttagtaagaaaaagttagtacctatagtcttttccatgtataaaggccatgagctgcacactgcaacagctactagctagaacacaagagtaaaaataatctacaatataattaatgatcacaattcacaaatgatccagctagtaataaacagcctaatgttttttcatgcacatcatttctttcaccctgaacgtctccagccaactagccatcactgcttggccgtatgctggttgctgtgcaaattttgctggcactatgaactcactacgcaacagatatatgggattagattcctgccaaccagagagctggggctagagccccaaccaataacatgttcaatatgtaatttgggtgttaaatctgtacggaatttctcaaaatatattttgtttcatgaaatttactcaattatatatatactccctccgtttcgaaatgtttgacactgttgactttttagcacatgtttgaccgttcgtcttattcaaaaacttttgtgaaagatgtaaaattatatgcctacataaaaatatatttaacaatgaatcaaatgataggaaaagaattaataattacttaaattttttgaataagacgaacggtcaaacatgttttcaaaagtcaacggcgtcaaatatttcgaaacagagagagtagtactgtacggtgactagggttgactagtccctctcgtccaatcctaaagttggcatagctttggacagccgctgccgtctttgtgtgcacaacaataggctataaatgtagctagctttggcgtcctccgatcctatggttgtgtttagatctaaagtttgcatccaaacttcagtccttttccatcacatcaacctgtcatatatacacaacttttcagtcacattatcttcaattttaaccaaaatccaaactttggatccaactaaacacagcctatatacactactcactccgtctcagaatataagaggttttagagttggacacgattattaaaaaagtagggtagaaataagtggtgaagggtcgtgattggatgggtagtggagacaggtgggaaaaatgaatggtgaatagttgtgattggttaggaagagaaatatttgtggagaagtagttatattttaagataaattctaagggctaaaagttgttatattttaggacggagagagtagctaggaggctttaatacacacgtcacactgtacgctgtgaaggaaca

SEQ ID NO: 5931 - DNA, 2000 bp, Oryza sativa
ggccacagtgcctccctcgcgcttctcagagcatctccaacagcctctccaagccaaattttagctactctagcaaaaaaataaactcctccaacagcctctccaactggatggccaagccatctggctggccaaaacactccctcccttagccaaatttggccagccgaagtcactggctaacggtggtccccacgaaaacacgcatgggagatggatcggggcaacggtgagggaggggcgacgaaggcccgcgagaagcgagacggctcacggcgagggcgcgacggctcgacggcgaggcggctcgacggcggggcgcgacagcggggcgcaacggtgaggcggctcgacgacgaggacgcgagggctcacggccgccgctttccgcgccctcgccggctgcaacctccgccatcgtccgcactgtcgccggccacgcaagcaccggcctcgaccttcgtcggccgcgccgtaacccgccgmaaccgccgctgccgtycgggccctctgctgtcgtccgcgccatcgccggccgagaccgccaccgtcggctgcgccatcgcctccctttcctcgcagcggctccttctcgtcctaatctgcacgcccaagccgtcgtcctcgatctaccgacacagcgccgccgtcgtcagcatcctagtgcagcgagggagggagggagcggcggcggggcggctcgacgccttcgccaccgcctccgcagcgtcaccatcatccgcgccgtcgcccgccgcaacctccgccgccgtccacgacctctgccgtcgtccacgtcgtcgccggccgcgaccgccgccgtcggccacgctgtcaccttgctttcctcactttcgccgtcgcctggcacgagcaggagcacgagcagaggattggagagagggggaggaagaagaaagagaaggagaatcacatgtggggtccattggttattagagagtggaatgtggagagtctgttggaatagaagacaaacttgactctctaaatttttatcgggctagccaaataggtatttggagtcaaaaatagtcattcagttggagatgctctcaggcgatggaggtgagccctcccaattccttgcttgttaatttcgtcagacatttgcacacgaatcctcacagataattaattctatgtgattagatggtgacaatgtcagcattaaactttgcaaaaccataaaagctttggtaatttgatgccttgtttgtgatttagcaatgataggaagcaatgttgaattggatagatctgccaatgcggtaccagtcaatctcttaattctgaaagtctaattactgaatctcgtcggttacttgcacacgaatcatcacagataattcctgcaaattggttcatcctgagattagatggtgacagtgtcagcattaaacttgcaaaacgacacgtgctttggtaatctggaaccttatttgtgatttagcaatgatacaaagcatcagagtgtgttgaattcaattctaagttgcatttgcaatagctctcagccttgtcaattacacattggacaaagacctaggcaaaaggagtcacgtaggcgccacctcaatagaaaaccaggcacaatactaccgagggacctcatttagacggtttcgtaagttggggacccatcatactcggttttgtgaccaaggggcgaaaatcggatgggcgacaaatagagggagccatagtgaacttcttctctctgcaaagccacagtctaatgggccaggcattaggccatttcggcctctaaagcccatgttacgtgagcagaatatgcatctgtggcgagcggcggttgcttccccttcgccttctcctccgtcttcctcgcgtgcagaataaccacttcaccgccggatctcacggcgccccaagtttaggcggttacctaaccaccccacgaatcccagccgccgccgccgacgagcaggaggagcgatctgactagtaagccggagcac

SEQ ID NO: 5932 - DNA, 2000 bp, Oryza sativa
  misc_feature (1)...(2000): n = A,T,C or G
agggttagcataccgccagtagctgggtatagctacccaaaaattcaaagccctggtgagattcttttgtactattctccaatatgttctcttccaatggctcaacatgtgctacttcattcccattcttagcctgtcagtggaccatggttacctaaattgtgatttacaacaaaataactaatgaacgtttaatttcatttattttttctttttagcatacatacataccttaggcttttctttcttttttttttatgtagtttgtcaaccaaattcttcttttgcttcactttgccgccgagattctatttgctgattttttttggaagataaataagtgattctgctgattagtagtccctaattaattataaatggtgggaccactgcatgcagctgttgatagaaggatgtgtggtagggatgaaggcaacggcaatgtttgccgtcagctaaaacggcagacgatgtgaaccccattatgggtacatattaagccagctccaccttttatcgagcttttgttatagtactaaattttgtatgactccttctattttctataattttggttaatataacctactccgttgagcctgagcaaaaacaacttccgttaagaattagaaaaataagatttatcgtattttctccattacatgaaatgtaataagccaaaccggagtaaaaacagcctccacttatttttttaaaataaaaaagtactgctatacatacgaccataacacacgaataacgaatagtatccgaccgcgcctcatccaccaatccttacactcggcttctccccatgtgggcccagaaaaacacaacatttgtatctatacactagctgagtcggacatagatcgtacgcaccgatagtacatagacccatttcgtttacaaaatataaaaacaaaactagatgaattagaaccatttttttaattagagccatttttaattaagccaacaatatgaactactacttttttttccaacaccaactgtccacagtgtcactctgacccatttcgtttataaaatataaaaacaaaactacatcattttcacaatgtaagtcattctagcatttttcatattcatattggtattaatgaatctagatagtatcattatgaatgtgaaaaatgataaaatgacttatattgtgaaacggaggtagtagatgaattagagccatttttaactagccaacaatacgaacttcttttttttttccaacaccaactgtcacagtgtcactctgagggagcacagctgaagctcactcacccttggcatttactcctcgttccaccttccccgcttcaattcgcctccaccccccactacctcgccactcccccctctcccactccatttctccaaaccaaagctctctcccacctccgcttccgccatggccaccgctcgcgccgcgtggtagccacagcccacagccacagctgccagatcccgcggggacgcaggaggaggtgggtgggtcgagctcgcttgcggggaagggacccaaggcgaaggcaagcaaggcgamgccatggggggatgccagcgaaacccttaagcacgaggaggccaaggggctgttagccccsgcgccaamggccgaarcsccgggcaaagccgccgcgggggtccggcgcgggcaaccccgckttgaaracgaagcctttggcnttgcccttcttcgggttctcacgcccagcccgagccctgcgcaccacctcttctcggcctcctccccgcggaggtcccccgccccgtccgcgcccaccacgcccgcgaggcggttgctgcggctgccgttcccgccgccgtcgcccgccaagcacatccggcaggcgctcgcgcggcgccacgggcccccgcggccgccgatccccgaggagggcggcgacgtggaaggggagggcggccgcgggctcgacaaggggttcgggttcaacaaggggttcgcggcgaagtacgac

SEQ ID NO: 5933 - DNA, 2000 bp, Oryza sativa
aaaattttcatgcacgcacaaggggtgtgggctgctgtggagggcgacgcagccgatgagaagatcgaccaaatggctctcgccgccattgtccaagctgtgccggaggccgtggtgatggccatatccgagaaggagacggcgaaggaggcgtgggatgccctcaagcagatgaacatgggtgaagagcgtgtcaagaaggctcgagtacaaaccctcaagagggagcttgatggtatgtacatgagtaattctgagaaaattaatgattttgctttaaaggttaccacgatcgtgaacgagattcgctctctcggcacgaaagtggaggagaccacggtggtggagaagctcttgcattccgttcccgacaagttccaacccctcataagcaccatcgagcaatggggggatgtgtcggagatgacggtgacggagacgatcgggcgtttgcgggcgttcgaggagtcttcaaaggggcaacgacgtgacaaagagggggagcagcagttgttggccgcgtgtgccgagccacggctgacgcgtgctgagtgggaggcgaaggttgctgaagagagcagtggtggctccggtagcaacggtgttggtgagaagaagtttcgcggcaagttcgacaagtcgaagattgagtgtcacaggtgtggcaagttcggacacttcgccgacgagtgtgacgagccgcggaaaatgaccaaggcagtggtgcagcttgctattgccgacgcagatgatgaacccactttgctgtgaagaccatgtggaggtgcagaataaagacaacaagattagggggtgattgttagacttaatcttgtcgtttgtgttttttttcatcctatcaagtcgtgtttagctaattagtggtttgtgtccacgttagtttttccatgtgtgtactgagcagtgagcaggtcaatagtatgtgtgatttagtttgaccagggaggccatgatctgcatgcaagtgaagcatggattcttggcgagaagactggatcagatggctcatgcatgtgttggttagtgatttagtggtgctctgcatgcagcgagttgtgccttgcatgtaggaaggtgattagaggataatccacgagaggtgcttgccggtttgtgcggcaagacgtggcttaacctgtgcgtgtgtgtggtctatttaaccaatgtaatcagcatttgttaaagtgtgccaaaagtgaagtggaaaaacaagtgtttgtgctacgtttggagttttcttggagtgtagtatggctcttcccctttccgccaatcggagttatgcttaaccgccgtagtacagcttttgttgacattttctttctttccttggcataagccagtctggctgattgcgttgtgtatcaaaactctattccatctaatatattaatgtgcaatctttttacgtgttcgcgaaaaaacatgcgatttcgctatattcgcattttatatgttgtgagttgtgacctcatttcattgtactagtaaataactggtttggagagttggatggcccatgcatgactggcgcggagtcacgacgagtccggccagtccaccacccgtcagtgcttacgctgttagcctgttacggcagctgcacggtaagctcgcctcctagtcctagcctcctaggctcctagccagtcattcattccatctgtctgaaatcagggataaaaatggggacagaaaaaatgaagaaaaaaaaggcaatagattcaggcttgccatagtactgccattgatgtatatatacacagtacacaaggtacacctcgaagctagttctccgataaactaaaccacaccaagacaccaagttgatcgtcggcgacatgtcgtccccaattgccattggtcgtcgacacgggccaccaccactgctactacacctgctcatccttcatctcctgttaggcttccaacacctctgctactcccttgccacgtacagcaaccgaagtactgctgcc

SEQ ID NO: 5934 - DNA, 2000 bp, Oryza sativa
ttaatctttcaataacctgcccttggcggttaacaaacctcacaataacagacattctatccaccatcagtgtatcgtgaggcgtatcaataagtaccgagaaataaccatctccaatctcatcaacaatgacctgtgtggtcatttctacacatgattttacgaaaatagcttgcatctctggagaagtcatttcattgaaaacaacagcatgttccttaaatgcatggtcaacagactcagaaaaacttcttaaccagtcaagcatctccagaaaatttcctttatttccaagaatggcttcaggtccacaaaaggcaatacccaacttcagatgaagtcttgcaacatccaaaatagcattcatgcaaggtctctcaggagttgcgattcgtcttgatgttttgaaatcctcacaacgccgccttgcattattgtgaatactgttaactccaccaacatgcccggcaaaggattctgatgctttcttccagttttggaaaccagatttcgagaagacatcactcccagatttaccaaccccaggcttcttaaagagataacagtaaaaacaataggctgcatctttctccacactgtattccaatcaatcaaacctcttgaaccacgcttcgataaaactccttgaaccatctccctgctgcttcctaggaaatttgtgaccggctggttgacatggacccataagcagatattttgttctcacctgatctctgattcccacatcatattcctcaataggcctacggaggcctggatcagcaacaacatcatccagattaagaacaatacctacacgaggtttctttgctacctctgctttaggattctcatcttctgctacatcccctttggtcccagaagttttttttataggtttaaagtacctttccattcctatcaaaataattttgatacttttagggaaacaaaggaatgcaagaagcaaattacttaacgagttgatggggtggcaacttaattaaaattcagggaccactgacgttaacaaccaattcatctaaaaaccgtacttgtataatttagcaaaatgaagaaaaaaaatcatatataaacaaaaaggtctaatagttgtactagaaagtaattcacttcagaacatatgaatatctttttttaatctatggaacagatgaaactataaaagtattaacataaagtatcagagtttccataaacacagcactataaacagcattctacaatacaataaacatcagatcccctagcttcaggaccattatgacgttgatctgctaatgacatatccaatcgattacgggaaacattagactcacattttctagaaaataaatatataactattcgtattaatctgcttccaaatgaggtatgttttcacacaagatgtttattcttcaatgaaggactatttattataataccccaatgatacaataaaaatgtcaccaagcggtataggtctgaatgtattgatgtgcctgcgagagagtaattaattcggtatgatttgcgcactcattctgcagatggggaagaactaacctgcttaatctgatccttcgaaatcaagaaatggcttggatcatctgaaatccacccagcggatttggaagcaactccaggggatctgcacaaccacaatcacaaacgaccaaatccatcatcttccatggcaagttaacagcgacatccgattgggaccattgattaaaaagaaagaaagaaagaaagagagaaagaaaagaaagccatttttacaactgaactgacctcctcctcttgtgcctctgctagtgatcgccggcgatgaatgcgtcggtggacggcagcgcagcagtgagcagttagggttcttggcgttggggctttcaatagcgcgggagccgcgccctttcccctccccaatgcgcgctagaatttcccgcctcgagaagagagagaggtggagaagaagccgaggagacggctcacca

SEQ ID NO: 5935 - DNA, 2000 bp, Oryza sativa
aaaaattagaagtttatgtgtgtagaaaagttttgatgtaagttgaaagtttgaagaaaaagtttagaactaaactcggccaatattgaacaaaaacatttggacggtggatgttgcgtcggagctggtccaatattgaatccgagtagttcccaacgcaaaggggaactaggcatgttagttttgaccatgagacaccttgccccaattcgttaattaacatatggctaatcaaaactcgtaaggcccagcgtgtgcagtgcagtgcagtgaggcagcaagctaaggcatgcaactacctaatcagtgctattaaattgtggccatgtggcaaataagacaggggaaggaggattagagaaaacggtggttagtcacgcacacatgacaaaacgcaagagacacgagagacagagaacagctcagagggtagctagccaatcagtggcggttgctccaccaaactttggaaacgagtaccaaaaactggtcgatgattccgtttcgctcatcatcaccggcttattttaatgggacattcccccactaaaaagctgagcggctttctccgatcgctaactacaatcaggcatccagaacgagtcgttgataactttaaaaaactactcctagtgccgtgctgtgctaccactgtaaaccctaaaaaaaaatgccacgctgtaacaaagttgttaccggttacttgaactgagtaaaagaaaagggaattgctatacgttatttgaatgaaatttgaatataaaatcttctagattttggttcattggatccatactaagattcatgcatcggcttctcttctctaactgtagtgggctccctttcttctccggtaccggcgacactcccaactccgatagggaatatacggattagggtttagggttggggtcaggataggagaggaggttggggagggggaagagcgggtttcctcggggcttagagggatggcagtgggcggtggacttcggcgggcggcgaggtggtggcggcaccgccgaagccgtagggatggagaagggcggtgggccggcgttggcggcaggggcaaagcaagcatgcgattaggaggcgacgactaggtgatggtggatccggcagctgggagccgccggagacagggaagatgatggggcgggggcatctcgccatcaccaccttgagaagaaagagagggaggaagggggagcggggagggggagggggctcatcgaggggcccttatcggcgccgttgactcctttcggccagtcggcgaggcgggtgatagcgcggtggggcggtggcggcggtggattgggcggtaacgcgatggcaatggtggatcggaatgctcgaggaagcaaagggaacatgagaagaagaggttagggtttaagggcttgcacaaaacttaaagcaaatttgatggtctaaaaatcgaatgatataaaggtgggattttatattagaagaggtataggcatcaaagaaaaaaaattggtaaattttgtactcgtagctagtactggttccaaaatttaactgtcaaggcaagtacaagggaggtcggggaggatgattgggttgggtagagcggccacactattgcggaatttcgcgaggccaagtgagggtacaccaggacaccaggtactacaccagtactgggtctcacggcatctcgcatcgcgatcagcggtcaaatcccacacacacgccgtaggatccagtcaatggagagaggaaaagaaaaccaaccaacacaacaacacagaaaagcttcgccaagtgaatcacccaaaaaaaaaaaactcctctttaggactttaccaaaasgccgccgtcgcsggctcgctggctsgctgcccatatatacgcgcgcctcgcgtctccacttcccctgctattactactagtacaaaaccaacgcgaagctctcgtcgcgcacaaccaactcgacaccgcggcgaggcgaaccaacgcgcggcgtgggc

SEQ ID NO: 5936 - DNA, 2000 bp, Oryza sativa
taaaagccccaaaacagacactctacggtacatttggatctcaagtcttcgatcagaaacttcgttttgtacttgtgtatgctgtgcttgagaacgacaatgatggtccacggtgcttttgtcccttcctttgtgctagagaaaattgtatggtcattgatagaacacatatactcctatatgggagcagttatcttggcactgtggtacttgcaatcgcatatggtgcatgcctatactgttaatgacagtacaagcacaccaacatgacaaggacattgggccatgatataaatcttggccccatcttggacattgcatcattgttgttgcagtacagtagtgcattatattatattgtcatcacaattcgtaggatcggatatgaatattagggatggagctatagcatttgataaccctagactcgtcggcaggcaagcatggttaacggggattgtatctacattaggtgtcgctaacatgtgagatctgattcacgtgtgagccacttccattgtatgagcaatactgaattggatcggggtgcacacatgggagctctaagtaacacagcctatatgggctgcacgaccacgatcgaacttgctgagaccacacattgttttaaaatgtccattaccattttacccaataacttttacatttgttaaactatagtgaatgaaagttttgtcgttacacttgttatgcaacaggatttatcaattttttaagtccttacaacttcattttaaaacataagttattaaaattttaaagacgaatagtgccatgatggcaatcatttgagtacgaagggagtactagaagatataggtgttatattgctgacgtatagcatgcttgggttcagccacgtggaagtgggtccttatagaacataaattccatagcttaattaatctcacgggaactaagaaaaagtacatactttaatttaaaaataaaagtacagaatttagtgtccacctatatccagaacatattttctccgtgttgtccacattatttggtagtgttaggatttttaatttccatttttttaacttagtttatttccatgttagttatagtcccatactgtttgttcacgggtgactactgccaactgcgtatgaacgcttttgtttggtacgtatgtataataattccgaacgctttttttctgagcaatctttttccattagcgcgtacccaaccacacggaaaacggaacgatccattagcgtgtaattaactaagtattagctaattttttaaaaaaaatgtattaatttgattttttaagcaactttcatatagaatttttttaaaaaaaaaccgcaccgtttagcagtttgaaaagtgtgtgcgcggaaagcgaatgaggggttaggaaaaggggcatccgaacacaccatatatttggttttgcacctcatgtctttcatataactagagcaagaatccattgtatttggaattgagatcctctaactaaagtcacatgactttgagttactggcatgtgggtccacatgttagtggctataaagtcatcagaattaaagacagaggatctcaatccttccatttgtacaacttaatatgctcttctctttgtaattgtatgagtggagtagatgctatcctaattagtgaagtgaatgcctcgttaattctactgaatcagtgaaactaattaatatccatatctgcaattctcgtgcgccggaaaccagcgccgtcgccgaccacctgtccgccggcgcgcgccaccgcacccgcgacgccgacgtgttcatgacggccggcggcacgggcgcgatcaccgcgatcgcgacggtgctcggcggcgcgccgggggcaacgtcctgctgccgcggccgggcttcgcgccgtacgaggcggcctgtgagctcgccggcgccgagccgcggttctacgacctcctgccgcggcggggctgggaggccgacctcgccggcgttcgcgcc

SEQ ID NO: 5937 - DNA, 2000 bp, Oryza sativa
aggtcactgataaatcgcacatcatgtgtacagtggcttagccaaatgatccatcgcgctggctgaactgagccacaaaaattaacggcaggacgagttgagtttggattgtaattgttgttgcaggtgaatggttacagttgaagaagaagccagcgtcatggggctcttgaattgtgataggagtagcttaccaaaacgaagaatcatcgagcccttaaacacccttttttttttcgggaaagagagaaattgaacactttgaaagtctcacctcgtgaacaatatgtaacacgcagcaacgtttcttggaaggtggcaatggtgtatgggtgaatcgcatcgattcttctctcgtcataccacttacatcataaaagaacatttcctttttgacaaaaaaagggtaatctatccatcccaaaataaatttattttcactcatttcacgcatacctatacaggaaaaaaaagaatactctcactttattaaatgttaatgcaattatttctcactttatatacttcgacttaaatgattactaaaaatacgtttaatttaggacaaactgaagaagcmaaaaataaatttattacgggacaaatgaagaaaaaacactaaattagtggagtgattatagtattatgcacagagcagtgacgaacactgcacttctgacaaatataccctttttagagctcaacagcaaacaatgaaaacaaaagggaacttgccggaatataagttcaccaacccttttgctccacgctataagagtacccgcaatggtaaagtaaggtgctatctataaaacatgtacatctcagcaatagactcgattaatagtaaaccaccttaatagtatgtctacattggtatctatagctctctcatgcattgcctcgtttttctctatagactatctctaagttagtagatagttttgctctctctcttcatttaatacattccaagtaggaaaatatgctgacatagatctcttgtagagagcctatagataaccattgtgggtgccctaattcgccctttttttctgacatttaacactaataaatgatataactaccctaagaccagatctaagaaaatacaatatcctaagacttctctgaaacttcggctgaacagaaaccatgggcaggttcaagttcaactatcatggtcagtcacaggcacgtgggttattgtacatttcgccgtacataatgccaactcataaacacttagaaatcgtctctcctaagatctatgtgaagagtttctaagaactgtagtttttcatggagaaaaatccaagggtctttcagccatttgcacaaggtggtgggctagctgatctaggtttaaagtctctcacattctacttatttgatagatcatttcttaatatttacgttattttaactgtagcttctcatataatctctagtttctcaaactgtttagattgttatctaaattctgaaaatttgtagttgtagaatatagaaaataaactagaaattgaaagctgaaattttcagtttttctaaactcttaaaaactaactaccaattagtaaattattgtaatcttctaactcccggacagggtcctagtctcgtgccgccctgcacaaagacaaacaaaaattcttgagaaacccaagtgtttcagtcatccggtcagccagcgaaaccatccaaaacttccttgtaaaaacgcccatgtcgcccatgacttccacccatagcacgagctgactgcaaaatataaaaatccggcaacactgacacagccacaagacgcgacacctcccctgaatgaatgaatgaatcctactaggccagcactgctgctgcctgctgctcccaactcgacgacgccaaccacctcgcctcgcttagctcccacctaaacagtaagagcacacagcccaaaccggcgggagatccgaagcgcagccaagaacgcatcactgtcctcttcgtcttcgtgc

SEQ ID NO: 5938 - DNA, 2000 bp, Oryza sativa
  misc_feature (1)...(2000): n = A,T,C or G
tgattatttttattagcattaaatttattaatatctgaaaaatatatcatattgtccaagttagttgcaaattttgtttgcgattacgtgaaatacccatatgcacaaacaccatgctaggtaaataggaaccctctattttcagagtttagcaaatacttcaagttcagccacggttttatgctctctttttctcaacgatattttagaaaattaaaaaaaaacagatgaagaatcttacagaaaatgtttgacattagctcgtctcggctgttgagtgccaaaagaaaaaaaaaaggtggtgcgcaaaaaaaaataaattgcttacagctggttcaagactttactttctgaaattggttggcataataagcatacaattttgagaccaaaacagtttcagaatcatccctcattcttccttttttttttggatattttcagagttgtcaggcaaatttgcgtattaattgacagtacaaactgggctaagcaacattgcatactttcaaaaccacaaatgttttgactgataaaatcatgtagcacctgttaattttttaaagcactgaaatatgtgcttggaagccacaagcccacaacagaggctgctctctagaattttctgcacctcttcaccatgcttgtaagccacaaacagcagaggttgttcatctgcttactccatgaattgtccatactttcattgagatatctatgagaaatcacctgaaatctgcattggtttcctcttcataggcttccttggagcccgtacttttcctttctcagctaagagctagctttacacctgaatttttaacttcacaagattcagaaacctatgtgaaacattataatgctgcgaatgttgcaccgatacttcactttcttgccgtaccggtatctgatacgtatccgatacggcgatacgtccgatactatgtcsakasagtatcagaggwgtatcggwcrtaasacgaagaaaaaataaataccgnatactcacacgatacttatcagatacttctccgatacctagcagtgttaatagcccattaaggacccaatgctatacttctgatatatttataactttaatatacttgctctatttgtgatacaaggctatatttactatatttgtaacagggcaacaatacataaaatattttttaagataatcttattgctttacccttttgtagtttcctatatttkatttttaaaaatatttttatatatactcgccgtatcgacgtattgatgtttttttttaaaatcccgtatcgccgtatcaacgtatctgtatcgccgtaccagtatcgcgtatccgtgcatcataggctgcatctgtagagaataccacattggaattcacacacacatgccttctttctcgttgatgactgatgagttgtcattagaattgattaagcttacaataatacatacactttaatgacacaaggagacctgtggctcgtaaatctgtcaaagttaattcagagtgggtctcaagagtgcagcactgatgaaatgcataggattttagatgattgtctgtactcaactgtgatccaggtctccttgatttttcttttagtgctgaacttctttcaatagcaggattagtttctctggaagtaatttagccatacaagtagactaggtagtgaagcaacaaagagtcagkgggactcaggcacatttatctcagttcccatgccgacagaatcttkgtgratamctaggatccaaantatctgaacccaaccytatyctagctgatycaacaacaagcaaccttgagttgagaacatccagatttyccaaccggtttcggcgcgaataaatagaccccctgatcgaatccttggtctccatcaatcgccacatccatcaacacattctacaaagtccagaactcacaacaacactagaatttctgcactgttcatcgtccgaaactgtgttgacatatgttaacagttggaaag

SEQ ID NO: 5939 - DNA, 2000 bp, Oryza sativa
atctttctggcacgatcttgcctcgtgcatatatttcaactaatctacatgtccatacatattttcagaattttcgtaaatcgaacaggtgcaagattaaatccaaataatggaattggacaaattacgaggaattaaattcgttttcttttgttgctcctactgaacatcttaatgcttttgttgtacaagcaaaataccaaattggcattctcagaatctaaggaacccaatgggcaatggatatggcaggggaacctccttagctactacattgccatccttttctactccacctattatataactctgccaccaatctttctactaaaatattgttagtaaaaaaaatgcatagcttggttcacttacaatccgaaaaaaaagtcgatttcgtttgttagtaaaagatgcttagctttgttcacttacaacttgaaaatgaagtcgattttagtttaattttcaacctgtgagtgggaaaagggttgcttccaagttccaaatgtattgtaggggcaagtttcaatgaagaatttgataatttaactttcaaccaagatttgaagaaaatgtcaactgtcaaagaaaaacaatctcctattcttttataatacatgtgtcatcatatatttttggcatgatcttgtgtgtgcatatctgtggctaatctacatgtcaatatatcttctcagaattttcgtaaattgaacaggtgcaaattcaaaaacttgggacacacatatttttattaaaataaggcattcctccaaataaaaataacctggtctgattgcttgcgcgtttcaagatttttgctctggaaatacttagcataaccatagagtgagagctactattataatcaaaatagatgaactgaaagaacaaaataaactgaaatatacatactatctgtcagctgtgagtctgtcctaaaaggtttccagaaaccaaaaaagatatacttgttccttcccctattcaactaaggttgttcacttgcttactcaatgcattcccccaaactttcaataagatatacatgatcaatctttggccatgcgaaaattcccagataggaagtctgtcccttactaagctctctttgagccccaagtgtttcctttttgagctaagagctcacatctgaagtatctagacagttgatttttgagagaaacatgatcaaacaagagcataggtcatcatattgtgtttcaatggaatttttgtgtaattaactttcacttttcaattaggctatgttaataattaatcctgaggcccaggttgtacatcagtcaggggttcagttttcatgtaagctgaactctgaagtgcagcagtactgaagaaattttattgtttcaattgagcatctttgctaagtaaaatttatctcctaatgtccttttttctctcctagtggtgaaatttgagagcataaatggctaatttggaaggaattatccttaaaaggtagaccttttgctgaagcaaaacagaaactcaggattcaggcacaggtgtgttcggcacccaagtttcccaaccactctccctcgttttccgcgcgcacgcttttcaaactgctaaacggtgtgttttttaaaaaagtttctatacgaaagttgctttaaaaaattaaattaatccatttttgaaaaaaaatagctaatatttaattaatcacgcactaatgaatcgctccgttttccgtgcggcacccatccagggaatccgaacactgccatatatttcggttcccatgctgacagaatcttgtgatactacaccccaaaaatccacaccaaactagctaatcaaccacaagcaacctgagtagaaaacatccaaagatttccaacacgtatcggcgcatataaatagctcccctgatcaaaccaatggtctccatcaatcaccacatcaagaagcagcacatccactttacttcatctctgacttgtcataacttgtcaaatttagtctgagaa

SEQ ID NO: 5940 - DNA, 2000 bp, Oryza sativa
ttcatttactccgagcctcccacatccgctcatttaaaagtaacaaatttactcgcatgaatgcctccatacgcaatacctagatggtcgtaaaagaattactaccagcttacaacgctagtaattcttttaccaatattataaatattgtttagatttcatggtctgtgagtaaaacaattactaccttcctttcgatatagcccatgatctcgtagccaccctatagtaatatatttactgatgtgttcaatacacaatataagagtaaaaaccgagatttcctggtatgcgactatgcgagtaaaacaattaccacattcctctcgatatagccatgatctcatagccacagtgtagtaatatttttactgatatgttcaatatacagtataagagtaaaaatctaaaactaagagtattgttgatctgtatcacaaaataatcgtataaatgaaaaaaattactggctcaatcacacacaagcgataaaattactcacaaaattactcacagctgaatcaaactagaaaaaaaaatgattcagccaaaaatccatctggtggctttgctggatcttgctataaggatgaagagcacggtctatgtcttgtgactggtagtggagagggcaaccgggtggcgagcagtagtcgacgatggaatcatggaaggatgtagcggtgtggtatagagatgagctcgacgttgcgcagtagcagccattcatcatctagcaagcacgaaaaaatgcaaaaacattctcgttcatgtcaatacagatgacgagcaaaagaaaaatagcaaacaacttccatcaccggcggactccaccctatcctctgcagccagccacatggagcacgatgtgcaaatgtaggacctgtgcagcccatcaattgagatcaggtaatattgaagattgcacgttaatttgatttgcaaaaaaaattagggcttcatgcgtgaagttgaaggagagtatgcatatgcaaatcagagtgtcatttccttgcttgttctatcaatgtcgccgatgtggagcagccgctggttgttgctattggcccaggtgaacacctctttgctggttaaggtgatacctagcgtccggcagcgaggcccgaagcgtgccttcgcctcaaccgtcgccggccactgccatcaaccaccacggtgtcatcctcctcctccatggtgtgtcgccgatctgtggggtgggatggtggatcgatccagatcccaaaaaaaaggaaaaaaatgaagtaggggcgagagtggttggttgggtacgggaaaaatataatatataccggaagcagagaaattgtttttatcgcagttaatcatttactccgataatggtgggagcacgatgcgggacgtggggtgggatcggaagcagtggagttgtttttattatcgaagtaaatcgtttactcgaataaagttgggtggttggggcgcgcgataggagtaaatcgtttactccgacaacggtaggagtgaaatgacggaacgtggggtggggtgggcctgggctgatgcatgtttggcgcttagaattctatcaaattaatctatgtttcaagtttgtaataattaaaacttaattaattatacgttaatattacctcgttttgcattaaaacacttaatttttatctctaagagaaaaaaacaccacctaaattaaattttttaagcatggagaaagtacatattttttgtttttacacagctggtagatgtgtagcaaatccaaaataaaatccacgaggcaaacgcgtccgtggagcagtcgagccgaagcaaacgccgcccgcttccgagttccgagtcggcgcggcggacggtatatttatcatcatcctgcccccctgcaaaatccttcctacttttacgacacctccccamcccccgtctccttctccctcgtctccagatccgtgggtcgaagcagcggcggcgcccgatccacggcggtcactccctccgcc

SEQ ID NO: 5941 - DNA, 2000 bp, Oryza sativa
acaattcatgtctaacctttgaccgttcgttttatttgatttttttaaataattagtatttttattgttattagatgataaaacatgaatagtacattatatgggactaatttttttaatttttttcataattttttcaaataagacggacggtcaaacgttggacacggatacccacgactgcatttattttaggacggatgtagtatatctctaggtgtgacaaaccaaaccaccacgtgaaaatttacatgttaccatttacatgtaagtaaattcgtggatccgcttgctattttagcaggtcagcactccgcacttcagtactctctccgtttcataatgtaagttattctagtatttttcacattcatattgatgttaatgaattagattctataatgacttatgctgtgaaacagacaaagtactcagcacacgccgccttcgtatgcgtgccgcgacgtccgtcgggacagggacgacgaccgggtgtatggaggcaacgtgccgcacccgcccccaccgtccggacgatcgagatccacgtggaccggaagactttcccgcttcgcgtgaggcggacggccgcgggccgcccggccggcctgcagccctgcacacgcgctggacgaagcggccgatctctccacgcgcgctaatccgcgcgccgcggcgttgcaaaatggcagcctcgatcgctctcccgtaccacgtcgcgtacgtacgcgcgccacggtaacacgatacgggagctcaccgatcggccggttggtgggggtggggtggatggatgtcacggtgaaagtagcagtggacaagttgatgttgatttggctgatgcgcaaaaccaagggttggtttggcttgaggcctatattggccttaccaatatttagcaattttaatagtgtttattgtctatttgttttggagccaaattttagcatgcctaagaaaatataccatttcaacagttaatttaggctattttggcttcaatccaaacacaattttatttttgccaaaattagccatgctaaaagttaccaaaatttgatattgataaaaattggtaaggctaatttaggccaccaaccaaaccagccccaagtcaacactcgagactagcgtgcacatcggttcggttcaggaatcaggacaggagggttcactttggttgtatcgcacgttctggaagcggatgtacttagtattactgtgagtacgctctagtgctctacacactggaagagccacttgtggagatcaattacaaagagccaatgtgccatgttcttgacttgaggacgtcaccacaaaccgttatcaacttgtcgacttgtgagttgtggcgaccttcacaaaatgcagtacaaaccggccgaagtccacccacctgcacagcagaaataaatatactactagcacttatatttaagcatcctttaaagcacagaattttgcaggaatcagtcacattcccaacaagtctttaaccccataggtacggagtgagtactccgtagcttgatatacacctttcgtttaaaaaaacaatatttactataaaactgaacaggtatatttccagcttcagtttgtatcaggttatttccggacctcataatttgcaggacagtcgggacagacagacaatcgacgcgtgcacactgtccgtcaagcctacagctgcgtgcgttctccccagccacgcacgacacgaggttcgcaagtccaacccacgcgccgacgcgagacctactcgaaacacctggacggcccggatcccccgcccgcgcccggtcacggacgccaagacgccatctcgtctcgtccattccaacccctccaaacccaaaccccccaattctgaccgcgcgaaccgcgactcgcgccaccaccagaccagacgacacgacacgctgcgccccaagtcatataccgcccgccgcgacctcgtccaacaaacgcaacgcaaacactcgctcgatcgccac

SEQ ID NO: 5942 - DNA, 2000 bp, Oryza sativa
gtcgcggctagggatggcgcggacggcggtggcggtcgcgactagggacggcgtggacgacggcgacagtcgctgcatgggacgacgcggacgacggcggcggtcgcagctggctccggcgcatctctcctccgtgccgtcgccgttgtgcggttcctagccatcgccgttcacaagcggcatcgttgccgccttcttgctctagccagggcagagagagagatggggtgggaggggagtgtggagcccacgaatagccaggcagagagactctccaagtttggtcaatgaggggtgcgatttggccatccggatggagagactgttgaatggtattttccccctatatttgctaaaatttagcttgggtagttacttggccattctattggagttgctcttaattatacatatcgtaacaaaaacttaaaaagtatatatataggtgagcgtattaggaaatcaattaaactagcgtcattgatatattagacgtgacaatcaacttccaaattgattaagttagccgatcttcgtattgtgaaatggatatgattggtcaggtatgggtttagctaggtgatattttgacaaggcacggatgttgacgcattaacagaggagaatattgccaagcaaattaaatgcaggatatatattaataatggagaatatagagagttctatacttattttttttagaacctaaagatttctttaaaggtttggttttctattcctcttttcagttttatcttgtacggtactattgatgttaatgattcgatagttcaattattttatcttcgatttgaaatgagaaatagattattcaaagttgcaatcaagttgctagagagctataactagataagatcgtacatacaaatcatgagactggtgagagaagcgtttatcaacgtaggattattgtgtggtcagaatggttaacatttctaaatgctatccgaaagctatggttttgcatataataaactatatgtcggtgtaaattagtcaatcttgaatcgaagagagtatggaataatcagatgaaatgcatgcaccgttgaagtctgaataacatacatagcttgtaatattgaacaatccagtagcaacatggttaatctcaatcattttttctttgcaaacaggatcatgtacttcctacaccagtgcatagtaacttgcaagttttgtcaacagccattaacaattgaaaaaaaatagtggtactgatcaatacaacttgaacccaaattcaacatcccattcattatctggggcaaaataaggtttacacatgcatgaaccagaagaaattagacttgcatctgcagtgcatctgggaccagtcacacagagagaaagagaagtcagttccaagatgataagagtgtagagccagggattcctgtggcagactccatgacaaaacaccttcaagtagagacaagacctatacctctctctcctttcctctcttcaaagaagaaaaaaaccagcataggagaaaggaaggacaagatctttccatcaactgtgtgattagcatgccccagaccggaaggtgaagctgctacactttcagatactccatatcaagattcaagagagagctaaagctataggagtgagcagcaatagcaagagccaagaacagctagctactccagctgagagccaagaaccggtcaagctttgcttcttgcacttcttgctagctaaagctactccggtcacttttctgctatagtagctcttggctcttgcttatcacaagagaccacaatcttggtatgtttctttctttgactctctcatcttgaattcttcacatcatctggcgtgtagcatactagcatgtacagtagcagcgatcatgatgttcttttttgttgttctttgtggaggtagatcgaagaaatttgagctagcgcttcgttctgattcttggagatactgggagatcgagctgtggttttgtggctcgtagg

SEQ ID NO: 5943 - DNA, 2000 bp, Oryza sativa
tcaatccggcacatcaattcttttcaccaagatatatgggatatcacggtatctattgaaaacgagaggagtggagagggaataggatctaggggtcggactttttttttatttttctagctatttttttttgacgatcgaagaaaacatatcttttttttaagtagtactggcaaaactgcccgtgcgttgcaacgggtgaaaaattccaatgataatatatgtttttcataaataaccatgtgaataataatgtttgtattgattgttgtagctaagacatatcataaggaaaaatagaacatcttccataaatggcccaacctcgacgatggcaatcttactaatgctttgctttgcccaaaaaagttggattattcatgtgacaacatgcatatagggcttgtttagatttcaacttttttattcaagccttcaacttttctgtcacatcgaattttcttacacacagtttttcaacttttccatcatatcgttccaatttttttgaactttcaattttggcatggaactaaacatggccataatctaaaatactctttcaatcctattcttgcaataaaaaatatgatgaatcaaaatcctacactgcctcgcatggtcaagtctaaaaaaaaagccaccgtgcactcttctctaaatatcaatttataacatatttaccttttaatattattttcatataatatgttataaagaatagtagctatagtagtatgataatttataggagaatagatgaggaaacaaaagccgtgttggagatggaaaaaatcgatggattctatcagacctaaacgtccatcaatttgatcttgtgctcagaaaaaaaaaaggcacaagcaagacttgtcttagttccagatgccagaacatggtagactatggacgatacaaatgctacgaatcatgaaacgaatcagatgcattttttctaaattcggacatttttgcattgcacagtgccgaaccagtttttttttttaataaacggtggtgtttttctagctttttttaaaataaatggtggtgtttttctcgctttgagtcacatggttatttcaaagctgttgttttataaatagtgatgtttttcacgtgtaattatacagatttctcagaaaagatggttttttcctcgcattgggtcagatggttttattatctttttttataaaggtgttttactctaacaatttgttcagagcgtttttatagggctttttttttctcgtgcggtttatataaacttcgacatcttaaggtggattttaatatatgataatttgaatgcataaaaaaagtaattcgaaaggggaaaattgaattcgcttttaaatttccaaatctactttgacggtatttatggaatcagacatttttttaaacgttgcacgagaactttttttttccattaacctttttcttgaggatcggtttatacgtactatttttaagaatctaaaaatatcggatagaaatatttttttcctttttttaagagatggaaacccttttttcacacttttttttaatcggacagaaaaaattcgcgcttgctttttcttggccacggacgacagtattttttttaaatcggacggaaatatttttttcgcacatttttcgcctttttttagcgcttgtttttycggtacagaaatctttctttcctttttttaacggaaaaccggaaatccttttttgcactttcyttttcaaatcggacagaaaaagtttttcgcatttttttttagcacacagacacggaaatttctctaattttttaggtagtggagaggagatagagatagagagtagagatagggaagagatagagatagagatttctgaaacctgttcggtttctactccgatctgatccgcgtcgatcagttgcgctgctttattttagcggatgatctggcggcacgcggcacgtacgtacgccttcatcgacgcttaatcgatctgtttcc

SEQ ID NO: 5944 - DNA, 2000 bp, Oryza sativa
aggttaaagctccgctaaatttcctccaaaatctctataggattgtccattccatagaaatttcaaaggattggatatgatcaaatcctttgttttaaagagcttcataggaaattttcctataggattgaaatcctccaaaattcctatgtttttctccaaattaaagagaaacaacataagaagtaggagtacataatcagctttacacgtgtttactatttcctaccgtttgcctttcttgatacagacaaattgtatgggttaattagcagaatatccatgaacctctattgatatatgcaaaacagaagaggaaaataaatcgttcaatcttggtgtacaagcacaaactgcgcgtggaaaagacgccaaccaaaaaaaaaacaatccagggagctgcatgaatgaatgaatggatggtcatggaagtagtatgatatgattccattggagtggaaaagagtggacaaatcatagaaaaagcaaacccaaaccaaagcaaaatcactgcctttttcgttcctcaattccgtagtcctccaactctactcgccttcacctagcacatcagataggtataggtgcgtgcgtgccacttggctgctgtacagtgttaacaatttttaccggtccggcatttcgaaccatgtcacgatcataaattgctcggtttttcgaccaagtctaaaaaaatgaaactaaaattttagttttttataagatttatctagatttcacccatttggatccaacgaaatgagaatatcgtgaggcggtttttctgtgtttcttcgtacacactaaaaatttatctattctgaatgtaaaacatgatagttattatagtatattaattaagtataagcttaaaaaaattaatatgatgtttttaagtaaatttttataaatttattttggaaaagtaatgtttaacagtttaaattaaggtcaacaaagagataggagcgaggtttacgttaccgctggtaaccgcgcggttaccgggcttaccgcggagtacagtaatataaatacgtggtaaccttcttagattcaaataaatttaaaaaataatttaaatgtttgataaattttacacggttttgtatgatttcacggttaccgtggtaatcgtgtctaccgctggggcgcggtagcctcggccccaggcggttttgggaaaccctggtaggagctgagaaggatgcgaaaccaacggtgctggctgctctgaacgctgttggttgctgctgccccgtggcgacgacacctcaccggaggcaacacaacgcaacgcatcgaaatcgaaccgcagcgatccagcgagcggttgagtgttgccgcatcaccgagtcaccgagacatttttccttttttctttttttgtaattgcagccgcctcgcgaagcttcgtgccaccttcctcccgtcgccactgcgtcaccttccctcttttcaactctctccctctcacacaccgcattgcagatttcatttgctgcaccgccctcccctcccctgcaaatactactagtagcacaagagccccgcatgccgttcacacctgcccaccaccaccactcgtagcccccaccgcaaccacccacacccacaccactctcgatccttcttccccgactccggccggcattggcggtggtggaggaggaggaggaggggaggactctgggctgtgtctctgtcttgcgcggcggcggcgcgagagggagagattggttgtgattttgggagtcccgacgtcgcacgcgcgcgcgtgtggagtggaggaagaagagatcgcgtctcttcgcccgaggatttctcgggatatttttatttgttagttagtatttataaagacgccgcggcggcaagggcgaggtcccgattcagtttggtttttcttctcgccgacgcgcagatcgatcgcgtcgtggactgggaattcttccccccgcattgttgtttgaggtgaggtggtggtggtggtgatcacg

SEQ ID NO: 5945 - DNA, 123 bp, Oryza sativa
  misc_feature (1)...(123): n = A,T,C or G
tgcccgcggsktyatcakgacsttgtaaccccgaamaggsggaatygccragaagcccgtkcntgccccttatggccctygagcgtktcccsgcgaaattcgggcccagggcggcttgcccgc

SEQ ID NO: 5946 - DNA, 623 bp, Oryza sativa
ccccccccccaaaaaaaaaacccacgcaccccaaaaacaccacaaactgcacgaccagcaacacacacgcacgcaatctagcgatctccccaactaaccccattaactgatcacccgtcgactgatccctccaaagattgtaccaccattaatcacccttcatcattaattaattttcctcgacaaaaatgttactcaatccatccaattctaagcgagtaactttttactatcttattttaaatttacgagtttccgtgtcgaattttgatcgtatatcttattttaaactttttatggttagtatttttattattattagatgataaaatataaataatactttatacgtaacttatgttttaaattttttaaataaaataaatgattaaaattgaacataaaaacacattattatacttagaatgagacgaatggagtaattatgtttcttcactaattaagctgaccaatcgccagtgctcacacccactctcctagcctagctagtatctatatatagacgcatataaccacacgcaagaagcatccattccgatattccatcgatcgatcacgtcgcaaacacacacagtacacacgcaagctacctagcgatagca

SEQ ID NO: 5947 - DNA, 2000 bp, Oryza sativa
tgaccagcgcgggcggcaggaggttgggggaggacccgacaggtgggccccacctgtcggcgaccccgggagaggagggaggcggggcggcctggctgggcctcggcctgcggccggcccagcggggaggagggggagaaaaaggagagaatgggctggcggcccattcggaaagggaagggaaaaagaaaaagaaaaaggagaaaaggattttccctagaattaaaatattgcttgctcaattttaattggttaaaattatttctagggctctgaaaattccactaaaaatcctgttagtgaatttcgacatgtagaactcaagaaaaattccacatgccagattcgattactatttgtattacttccttagggttttctcttgatttgcaccggcattttcttagggtcatttataaattaaattttcggcttgggaggagaacttcggggtgtgacagataggcaatgatttcagaaacattatgcctagagtcaatgatagaatgattgaaatatagctcagaaattttccaagtgagtctagcaaaggtgcagtggaaaaagagatgagtatcagtttctgggctgttgcagcgagagcaagaatctgaaatgtttgaaactttagagtgaaggttagcagcagttggaagagcatgtcttagggcagtagcagtgcggtagcgcacttgaggagcccaaggcctccagctagactagaaaccggttagagaaccacacctcacaatgcatgtgtcttagacagtatctatgttagtgggtcccacccatattagtaggacccacccatccctcttttcacttccatctctccctcccatgcatgcaagcatgtgaggggaccactcacagtttcccttttggcatgaggaaaccgcaccctggctaggggatgcaatccttagcaaagatatgggtcccgccaccttttttcattcacatcagattttgaactagctggcaaacgaggtaaccctccagctaggagtactgtgaagagccttataagtctccaaatgaaagttttgaccttaggaggaatgcattttgtagaccaagtttttagaaggatactgcgatgtacagagttaaagttggaagaatttgagtgagaattgctagaaacctgtttgtaggcacttttggaagtgcaaattcatgtggttgttggagtccagcaaagtctgtcttcattatcttgtgggacaatctatacctgtgttataatttgtgccatttcctgataaaaatttgattcagcttgtttaggtcccaatcttttctgtcattccaaagacgaggcttactgacgaacaccaagctaaccaacagtagcttaaagcattgtgacagtgtgagtggtacccgtcaaatgtcatccatgtcgcttcactttgcaactactcctgcggcgatatatatggtgctttctcagcattatcgctcagtacctaaacattcattcatcatcgggcgaacacagcaaagcgccgagttactgtgctcttccatcagaggacggaaacagcaaggcaagcaaaatcagttgtgtgcccttagccgtcagagtccaccggattcgtcggatccatccatccataaattcgagttaacggaaagtcctagccatcgcctagtcaatatcttttttttttaatggaatcgcctggtcaatatcaatctctcgtcaaaaacaaacgaatttgaatctaattcagtacaattcacacaggaaagaaagattcaattagaaaatggcgatccgatcgcctgccattttccatattctttatcccaaacatacagggcatatgcagttgtcttcttttattagaccaagaagttgtaagctttggagaaaaaaataactcctttccctctctccccttcctctccggccgggcagagcagagtagtagtggaaagtggagtggtagactgcgctgcgtgtgcgtgctcaccggccgcggccggag

SEQ ID NO: 5948 - DNA, 2000 bp, Oryza sativa
atcgatcaaatgacctccaaatcatttcattatctgtatactttgttagcagcgatgctttcacctatggtcaggtagctgctacactaatctgcaaaaggaaaaagaaagaaagagagaaaaagaaaacatagcaaggcattttgagcttaaatttagttagcattagttaaaaaaagttagcagttatataagttatttacatgattgttcgttaagatccaaaaccttttgcttacctgatgctaattttatggacatttgtcwagttgtttataaaatcttctttatcttttttatggcacggagtaatctagcaaaactaaccccaagaaatcgtttctactatgctcacatcagtgggacaattttgacctataagaacagcagaaagaaattgccctttctattttgcttttaaaactagagtttctttgctttccattttcacctctgcatgaatgaagatcacaaccagaacttctgcttgggctaccctatagtcacaaagaactttgtcttgataacaggctgcatttcttttagatcacatatacttgtattatgctctctcaaaattatttgtttcatgttatattctgataaccgagtcactgccttatcctttagatattaaaatctgaattaaagtctaccatagctcaaattcaaggggctacattgttaatgttatgttatgttccatgttatgtttcatgttatgttccgtttcttcagaacacatgttttttctgttccttakwtacakkkwctkaarwtgacrtagagtrctgggactkwgaaatgcaggtgcagaactgggactttaaccactgtacaattcagtgagagagcaatgctcatgccaaacaaggctgtagtaaatgagatrtyacaagacggtggattcaatgataagttatattattatcctcactgaaaatattgtcttactttctattcattacaaatagttaaatctccttatttcatcattgatgctaatcacaaagtattgatcatgtaatatctttgtaaggaaaacatatttgatatgaacctcatattgtttttataaggagaaacaaagttgatctctcattgtcagtaacaaaagcaactgagtttgatggtatgtaaaactagattatcgggtaagttgaatgtaaaattttgtgattatgtagctctttttttttgttttggatatacatatttagttattatcaattcttatttacctgacttcataattaacagtgcactgggtccatccaattgagctagcctatatatactaatgcgcggcaaatattttctagtgatagacttattctactccaaaataaaacaccatgatggtccaaggcttgcttgaatgaccagggccaaatcggtctactcccaaaaaagatcaagttaggccgattctctcattagcagacatatgccttgagaaaccttgcttaacagtcttatatgatgtatcacgaaagttatttccatgatacgtatagatacatctctcgtcttaacttaattcctgccagaatgtgacgtgcatgcgcacacaagagccatccggctagtatactccagtactctgcgaaattcttcagagcacaccaccggccggagcggtccaatatttggctcccaagcactatagctgagagtccaaacatatatatacgtgttcttatcttaacggtacacgttacagtattctctatccaacaaatcaattaaacatgccatgacttgactggagctttgtacgttcatctaaataacagaatcgagtaggctgcagataagtatgcagtaccatcgcctgttcgtagaattctttgccagcacaaggaaaataccggcacgcctcgccaacatttccatgcaaaacgaagaaaattctctcacacgtcgactataaatacccctctgcatgcatgtaccagctatatacagaagtaagaaagcagctacgtttacaagcagag

SEQ ID NO: 5949 - DNA, 2000 bp, Oryza sativa
taagagcgagtacaataagacgatgtaaacgggttatacaagtccttaggagtggacctaggccccggaccacccaggctgccatccgaggcgtgaaggtctcatttaaacccatctagtttcatcatgtattagatgtttgggctaaaatcactatgggctgggcgggacccgtccaaagtccaggtccatccatacatacaacgtccttgtccgcccttaaataacagtaaataactctagtatttcacaagtagtaacatcttctccaaataaccatcaaaagttatacacccttttgaccatacacaacagtttaacccatctccggaatagtttacttttgaaaagttagaaatgaagtttcatgaagctatatgacacaataaaccaccttaattttacaagatcaaatgaagtttcatttaagttaaaacctatcgccatcatagactcgagctaaaacaagctaaataatggaccaattcactattgcatacatgttgacacaccgataacaaaacatatttcagaaaaaactacaattacacgaagtacatattcaacaataaaagatatataatataaaaatgtaaaattaaaaacaagctatctataattataaactcacttttttttgctattggtccccacaacaatcacatacattacgacatcacacacccaacgcaaggtgccaaacccttttaacagaaggaagacgtaacagatagccgcgctccgcagttccatctcccatgacacgtctcacgccagcgacacgctcgtcctgaaaaaggccagcaaatcctccacccccacatcatcccatgcataggcatgcgtgcggctgtaacagcgagaactgcatgtgccaacgctggccggggaagtgctgatcacttgacttgtagtccccatcaacactaccagcccaaacatggcaagacacacgatgctcctgcccgtacttaaatgacggttaaaccgctccagcatttcgcaagtaacatattttcccccggtaaccatcaaaaagttttacatcccttttactatacaagacgattcagcccccgtctctagaatggtttacttttgggatctagaaatgaagtttcataggttatatgacacgaccaaatacttgttactatattaaatgtatattaaatacaagatatgggttttcgtgtaagtcaaaatatatcaccttcatacactacagccaaaccaaaatcgaccaatctattattacatattttgtggacacatagataaaaaaatatatatattaaaaaattacaattacaasatgtacacatttaataataaaaatatatgtatatataagtaaaaggaaaagaaatctactctcactataaacctataaacctatgtatcactgccggtcctcacacacgacacacctaaacagatcaacacgataaaaagatcccacaacacacgcacaccacgacttccgtttctttgagagaaagaagacgtaacagccagcagcgcagccgcgcgcgctccagttccacttccaacgacacgtcccgaaaaggcccagcaaatcccctccccccgcacacacacacacccacatcaccccccgtacatgcgcgagcgtgcgcccgtaacggcggggatgagaaccgcatgctccaacaccggactccgacgaggaaagagagagagagagagcgaggagttggagctcgtccccatccaaccgtgcgtgcgtgccgcccgcgcgcgcgcctggcggttggtggaccacgacctcgatcgtcccgtgtcgtccaacgcaacgcatgcggggaatggaaaaaccaccgcgaaaacgcccaagaaaacctcgcgccggaaacgcctctcgcgcgcccccggccccgccccgtccacctaacgcgaacagacgacgcacgcgccgcgggctttatatcctcccgcgagcgcgagtccccatcgcgcggccgtcgccgatcgacgag

SEQ ID NO: 5950 - DNA, 2000 bp, Oryza sativa
atgacagggtgaaaaattttaaggtgggatctaaacagggcctatttcatccctctcaaaatataaaaaactagaattgttcattacactatgaaatatctcattcgattctagattcttatattttgagattaagtccgtcctaacataaatgaacttagaatacgatgtgacacatcctccgttttatattatataagttacttttatttttttctagtcatatttaagcaaatttatagaaaaatttagcaacttctaaaacatccaaattattttcgttaaaatcgacattgaatatgttttgataatatatttgttttgtgctgaaaatatcgctgcgtttttttttataaattttatttgttttaccttaaaaaaaggtttaactaggataccaaaataatttataatataaaacggaggaaaatgatttattttgagatggagggagcagtctactgtggacaggtccaggagagaggctctgttcatcgccatatcagggttgggcttgggcttcgactcctatgtacctaccacatcaacctagtacctccgttttttttaataatttgcccaggtaaaaaaatgtgatgtttccgtttcaccgctcaaagtgtaactagatcatctcaatcaattagtcttatctgctttggttaatggttaggtcagtgattgggacctaaaactatagttattcatgatagaaaacagtgttcaattttgacactgctccactgttagacgacctaccaccaccaccgttcaaagtcacgcaaacagcattccagttcctgtcccggtattgcttcgaagctgttttcttctcacgcatcagctgggctggattgacggttcaccgggtttgccggtttttcagctgctgcctgcatctgcaagactgcacgctgctaaactgaaaacgaaagaagatttcagagatatcagactttcagcaagctggatagccaaacctgatccgtgaagctatagcatagccgacaagagatcaaggaaagcgactgataaacatggcattcacttggcctagtggttggcaaaaaggcaaaaaaaaaaagaagaacaagaggcaggcaatgtgcactgcatcctctggtcggtcagaaatggatcacgcatatattcagattataattcagactgaaatgcagcggcagtacaccaattcctttcgtgtcactgtcagctgcactaaactgacatgggatcgatccctttccacgccatggattgtgcaacagaccaatacagcaaaaaacacataaactcaaagtacttcactgcttggatggatatgaaacagatggctttttagtttttacaccgtgtctgatactaaagaaaaaaaagggcctttttttttgctgctactgatgatgaagattaaagctagcatttttacagatcggcagagcccatctcgacgaaggattttgttgggcaggagaaggcggaaarttagggacaaggcaccacgggaggaagttgaagatagggtaaattgaagaacmctgttcatgtcaaaaaggggagttcttgcttgcttgccgawaagcctgtttgggtttggcttccactttcagtcacttcagaatgaatctaactgaccctttgccaaaaaaaaaaaagaaatttcttctaatgttaattagtattggtagtattacagctaactgacagagaagcaactgacattaaaaaaagtttctgttgcactatccaaaacacacgtcagtttataatcatagtttcggcctactttcagggtctgaattctggctgaataaaaaaaaatctaagcatgcagagaaaaggtgcagaaaaaggagctataagcttcgagacagacaaccaaaatatccacacgcaattttcccctccaaatccaaagcacgtactctcacaaaaagagaaaaagaaataagcacccaaaaaaaaagggaagaggaggcaatgccaccggtggggcccac

SEQ ID NO: 5951 - DNA, 2000 bp, Oryza sativa
aagatatatacttcagcaattcaccatccgatccgaccgaatcatcgcatcacatctgtccacgatcgatcgtatatgtgtgtgtatgcgatctctccacgtcagataattagctacctgttcctctcaaaaactgccaaaatttgagcctcaaaattcagagatccattacatttttggtggcctgctacagatagtgctccctgaatcatcagaattcagtcatcagttcctcgtctccgctccccacaagccaagttgtcgttggactcatttttttctcccattcttggataaatatatgatcgatagatgatttyttttaagataatgatgatcgatagatgatgtagtagtatactcctatatctatccagctgagatcattcttgatcatatatctatctcaccatttaatatattttcatcgttcttccattattattaatcagatatatgtagacgacttataagacaatagtaattaatatctgccgcttaatcatatatagctagatgctggtgtgtgcgttgaagggctcaatccatgattgttgcttaaggatatatattattgaccctgcatatccgttccatctaactatagttaaattactccagcacacgctcgtccaacctatagctgttttgcaccaatggatgctagtaatataagaatattaatattactacctttgtgacattcttcaaaaaaaaaatgctgcacaggctagcactactggaattaagtctcaatacattatatattactccctccgtcccaaaataagtgtaattttgcactattcatgtctaacctttgaccgttcgtcttatttgaaatttttttataattagtatttttattattattagataataaaacatgaatagtactttatatgggactaattgttttcaattttttcataaatttttcaaataagacggacggtcaaacgttggacacggatacctacggctgtacttattttgggacagagatagtacatcttaattgaagtgggtttacagttatacaaacgttcattaattagtccaagcctggtacggagtagttagcatttctgcatttgcttgaccgtcattagacaagaaacagggttccacaaactagtgctatctggactgaaccttttgcccattggtcatgcaatgttgccgtgcatggaagcaaagcaatggtcaattacactggctaattagcacgctagcttaacacagttgttagtccctccattaattaacaatctagctacttatctcaaataaacaaccatgtactgatcagctcctatattgtaccgtaacaatccatgtcaaccagttgtcttatggaaaaaataaatagtaaatwaaaatwaaatataaaatcatgtttaaaattatttaatgataaaataaaatgcaacaaaaataaatgacatttacatagatttttttaataaaatgaatggccagatatcggataaaaaagtttattaaatatgtgatgcgaatatcgacatacaatatattaggattagtcttcgtttagtccttttctattatgactcttagccttttccctttttacctatatccttgtaaacggcatgggaaggatacgatggctagatgtatactatgtgttcgtaatcaactcctcagtattacttattggcaattggcgtctgtggtttttttccgtaatgaattttcatgtaaaaagttaagtctcatctataatgtaaatagcttcatatatttaagaacagagagagtggcaagttaaattaaccaccattaatcaataatgtctctgtttggaacagtacaaaaattggctaagctaagctaattaaaatagcatctgtgtgctgtcgttggaacaggctgctgacctacttactaccttaaagccaatcagtcagcttcacacactgacaccaaaggaagcatctttcttccttctcttcctcctcctcttcccggcagcc

SEQ ID NO: 5952 - DNA, 2000 bp, Oryza sativa
tattttattggctgggctcgtttcattatgtagtgggctgagcttcttttattttattggctgggctcgtttcattaggtagtgggctgggcttcttttattatgtagagtgggctgggcttctcttattaaagctcggcctgacttcaaactcctccgcctggaccttcgcgaccgaaatggccgccgttgccggcgacgacgcctctacctcttccgcccagagctctccgccgccgacctccgcctcgacgactcgctcctcctcctctccttctcgctcgccggggaacccgtcccccacagggtccccgtcccgagggtgctcgtcgaccccgcggcccctcccgagcgccgcgccgcgggggaccatgtcgaggtccgcctcgcgctcgtcgtccccgtcgtcgccgcagccccccggcgaggagccgcccgcgcctctctccctcggcgatggtgagctactcgtgtgttttactgtcctgtgaaattattaggtagtaggggtttatgagctttctggttgattcgtggccaataatttgatcactgctagtcactccaaatcgtcctgtgcctctgggattttagtactactgaaaacctaagtcgatttgcaatttaaattttaaaatgcaattcccaattttaatttaaaattttaatagcattttaaattccccgttcccaagtctagttcccacttcccgtcattgttcttctgtccactgccataaatccacagttcttgacttccacattcgaccaaatgaagccatggccgacaatataaattttcgcacgcctgcgtatcaactcgttagcaagctaaccattcggtgcatggaggggcacctcatcctccatgaggtggtggtcacatcacactcttctctgctagttccaatttggtgagtagaatatggattccaatggagagtaggtttgaggttttttaagtacaatctgactgtacgcttattgtcctttcatctgttgcttattttttaagtcttatcatctgaatagctacaatagaatacagagatgtggactgcaccaggtctgagctgcttaaggttgccttcaccgaaaaatggctgcccgaaaggctccaaaataatcggaaagcaacagccaagcaaaggtacatcggcggcattaatgttcttaacaatttatcaaatgtattttattgtatcttaggtagagacgttggtgtttcctaagcctaggtgtttagctgtaaaggaacatatcaaactttgtataagggccaaaaaatatctaggagcgaagacccatacgacccatgtggctgtgtatgggagataaggaaatcccttctaatttaaaaaatcctattgggtagatcctcaggtttgacggatgacaacatcgatggtcatgctgaatttacgtctaggtgtttgggtaatgcagctttgaattcttatgcgtggtagtcagcttgtaattgtgattgtgttatgctgcagttagccttgggcccctcatgccactgggcatttgtttgcccaagtttaccagaatttgtgatgacttatttgtccgatgaaaaatatttgcatctcatttagttgtagcagtggactaaacaacttatagtgcggcgggggctgttgaaatgtgactaaaagtgctatttttcagcagcttaaacattctagattgaggtggttaatactgaaaataaagtgattagaatttccattttaatattgcagactcagttgttactgcaatcaacaagagtagcagatctgaaaggcatctaataagcgaggaatcaacaggaaccatcatgatagctagtcactctgctcttgtactgtacttgaagttttggtttctgtatgggacagtcgtcaactggtctctgggtctataaaatacaaaggatgtatgtggctcttaactagagcaagacatactttttcatatcttccagacaaggtgcattagcaacatagaat

SEQ ID NO: 5953 - DNA, 2000 bp, Oryza sativa
tttcttctttccccgaaacatgggctatacgaagggtaattggagttctttacctgtaacagaacccaaatcgagcgaaacattgtgcagataggtttacaaaccaaaagatcataaatccaacacatttcagtgatatagcggcctttaatcgatagcaactcactggttttatgctgctttaaaaagaggcagcctgaaatttctgagcctctgaaccctgcaaaccataaacaagcatgaactcagattctacctgatcaaaactttgtttcctataaaccggtatctcataagaaaatttctaatgcactaagaaatttgagacctcaaaatcctgtcactattgattcttctcattactacctccgttctaaaatgtagcaacctaggatgggtcccatcctaggactacgaagctgaacatgttactttccatttctcatcggaaagctaatctttgtcagattgcagaatagctaaacatgagttttttttggcggggaagctaaacattagttaaatcgatctcacagtatagaccatggcttaactgtgtaaacattgcaaaatctgttattgccatggctcacatgctcagcattgacttgccagttgccacaaggtcaaggagcttaattaggcttaccatgatggacacagttgcagttttgcagacaagattggcagattgctatggcctccaatatttacagtgccatatctcagctgcaatatcattaatctggggagcaagtccggagtggattatgcatgcgtctatttcctgtaaatttcattactggggaacacactccaggagcttgtattggagcctattatcagctgacactatcttgtcaagttcatcagactatctgatacttggcatcagtgacagcaatgctgctgctgctgctcctgatgtctgaacttggttcagaattcatctccttttctttcttgctgtcttgcttgatgttgaaagtgcagtatgattaaaatacattaattaacttcagagggaacaccattttcactcctgataatgcgcaatttgtacattaaaaattgcccatgatcatcatacatccatacacaacgagtgttagttgcagagatcatggacacacacatggacctatggcatttttaacgaaaaaattgcagaactccccatgttcaagttgcacatatatattcgattagatgtctttggacgtgttatattttccaatttcccaaacttctaccccattatttttcacgcgcaatgatgtgttaattcatttgttgctattgataagttactttaaaaaatcatattaattcatttttaaactttttaactaatatttaattaatcaatgatgtgttaatccgcaacttcatttcatgcgttggaagggagtgttccgaataataggaaaaaaaaacccggttagattagctcgatttgaaatcaaattcaaaaaataaaaaatcgaaccaaatacaagttgttactacatccgttccatattacttgtcgctttgagtttttttaaaaaaaaatttgatcattcgtcttattcaaaaaaaatttaaattattattttttttgacttgctttattatcaaaagactttaagtattacttatcttttttatatttacacaaaattttcaaacaaaattttcaaataaaacgaatagccaaacgttagaaggaaaaagtcaaagcgacgctattgtgggacggaggaagtacatgccaaccgcttgtggggcccacctcgatacacacaccgaccagaccagaccagaccagaccagagccaagagagagggagacgcgtcaccacccttcccttcccaccactttccttctctcctccgatctcctcgcgcgagtctcccgcctttctctctcccctcccctcgtcgccggcggattctccggcgaggtcgccgccgccggtgtccgaccccgcggcgcctcccccccctcggcccgtcca

SEQ ID NO: 5954 - DNA, 2000 bp, Oryza sativa
ctatgtcagtgttcacgctttctccgttccgaggcatagcgtgctgaatcaaagcgaagcggtaagggtgagttagtcacacgacgacgtacggggagaaagaaaaaggagagaaaacactccaatcgtatcgtaatatcactctcgctcgcgtggtgggaacggaacatgtgggttttatgtcgtgctcaacgtgccgcgtcttacgtggcgacgcacgatcttgacgcgacccatgtactacttggcttcctgctgctgctgcgtgcgttggcgtagccacaccccgcaaagccgacgcacctctacctatacgtcatgctcacaatacatgctacgtactgtacgagtgtacgtacgtgaggccaccgtcagataaggacagctttgagagggatgagcagtgattctcacttccatccgatacgacggcgcaaaaaataaaatctatcaactgtagcagcctactattcctgccttataaaaatataagagattttcgatggatacgaaatatcctgctactacgaatctagacatgaaaaattcgtaatactatgatgtatcttatctgtctaaaattttttgcattctactactttgtttttttgacggagggagggggtaggacggaggtacagagagaccgtggttttgcactatttatatccagtgtttgaccattcgttttattttaaaaaaatatgattaatatttttattgttattatttcctccattttattatgtaatactttatagcactgtccgcatttatataaatttgatatgaatatagacagtgctgtaaagttttacattatgaaacggatgatcaaatgttagacttagaaacatacaactacgcttcaaatggaacaaatgaaacggagtacgtattgtgcttgtcgcacgcgcgttaaactgaaaacgaagggacagccagcgccggaaagaagagttctggctggcctcgctccctcgaaaccacacgtgaaacccaggcagaatatgggcatcagagcatccgcaatgataaagtaacgtgccatctacaaaacatatacatctcagcaatagactagattaatagtaaatcacttcaatggtatgtctacatgggtatctatagctctctaatccattgtctcgtttttctctatagactatcttcaggttagtagatagctttgctttctctcttcatttaatctcttctaaataggaaaatatgctgacatggatctcttatagagagcctatagataaccattgtggatgccctcaagcatctcatcttgtgtagtgctctgtgtttccaagccaaagccgcttgggtgggtcaaaaggcgcatatatgaatacgagggagagggaacagtgtgggctcgcgtttcgttgcggcccagtagtacgcaaacacaagcgcaaaagcgccgccccgcagcgtagcgttggagcgtgcgtgcgtctttatgaagcgcacctaaccaaccagccaacgccgtcccagtccacctctccaaccgcaccaacacaacacaacacaagacaacacaagtgcaggggccaaaccgccaaattaccccccccccttccccatcaggtactacgagtacaggagcagccactgactaacctgacctgaccgccgcatgtgttgtcacctccccttgcgtgtgcgacctgcacctcctgcagaggagaggcaggcgtggctgccttcctttttcccaaaacccctcgcaaaacccggaattactactactagtattcatttattgtattttatgtgattcccactagactagtagtagtattccactctctctctctcttctggtctcctcctcctctcccccgtcgctctctctcttgttcccctctcacacgcttgacgcggcccataggaagggggggaggaggaggaggaggaggtggcgaccgaccgccggattggaccgcctccgcgacgaccgccgctgaacccatcgccgatcc

SEQ ID NO: 5955 - DNA, 2000 bp, Oryza sativa
tccgtgcgggcagtataacacaaccgtatgggataatcgattatcccgtgcggtcgacccacccgcacgcgaaaatattaattttcgcagacagccggctacagggtgccggataaccgcacagagaaatcaaaatgcctgtatggaaaaatcttttctgtactagtggtacgaactaaaactgtttagaagtcgaactcgaaaattttacgcgtaacgaatacgaaagcaagaccgttgtattggagtcgtgtttcagtaaaatttgcttggataatgagcattacatttccccttccctatcactgaagcacttagttcaaatggttggtttgccatgctcttgctcggttgccacttaacaattcttatccctgcaaatacttggtttaaattgttggtttgccatgctcttgttaattaacacatagccatgcttctatcaaattgttggtttgttgtgccctttttaatctacggttttatttggaataggttaagattctaagatgtagttggttggtagcaatacagtttctgatttctagtttattttttatataactatagattcttagagattgggtaagaatctaggttgtttggagaaccagatattctaagagaaattgcatatcactgcttctattatcagatttgataagttaccactggaacttgctaaaacggaaggttccagtgcttagttcgtactaccactcaatgttgattaacattgagtgaaacgaatctccgaaaatcactgtaacaaaaatataataaattataccttccatcacaggaagaattaaatcctcgctatgaacctgaacaaatacttatccagtttcataaccaggatttgaatttattttatttgttttatggagggagtaggtgataaaaatgtgtggagaaaaataacgcactaatagttaggttggttaatgacagttcgttctaaaaggtgttataagatagcaacttaggccaatcccaatagtagtttcatacaggagttctattctcaataaatagcatactccttccgtttcaggttacaatacgttttgactttggtcaaagttaaactattttaaatttgactaagtttgcagacaaatatagtaatattaataatactaaattagtttcgtcaaatcaataattaaatatattttcataataaatttgtcttgagttgaaaatgttattactttttcctataaacttgatcaaagtttaagcagtttgactttgatcaaagttaaaacgtcttataacttgaaacggagggagtaccatattagcagatttggtgacatgacaatataattataaagagagataaaaagtttaatctcatccaatcccatgtattgctattaaatgttatgatgaacctacgaaattgcaaaatgaaattctatgttagagatcttatttcattcatcaattcaaatctcattagatgacatgacactcttggtaaccgtgaaatgaaactctccacttcccttaaaatgacattattgtaatgcaggtcgatacgttcgtatcgtcttaattttcttgtttcttttctctatgcacgtgtttagacgtagaggctaaatgtaattttagaatacattacctttaaaaaatacacattgcttgtgttaatggcacgttggcacacatgacacgtcaatctgaagcatcatggtcataccagcactcggagcattgcccatgtaaattttgtgctgaagaatatgctctaacaccataagttaatcatagaatcagttaattgacaagtagtgtattattaaattgatcaaggacatgatcgcccccaacaagattgatcatctcgagatccttaaaaaattccagcaatatgggtcaaatttgatccctacttacaaaaactacaaagaattgaaacagattgtgacacgcgctgtacgcacaccaccctcttctggtcttctcccctgctctgctccaccacc

SEQ ID NO: 5956 - DNA, 2000 bp, Oryza sativa
tgatttttaatctggttcggtggagatgtggctgtaaagtaagttcagcaggtcatggcttgatggtgacttgtctgaaaaaaatctgtttttcaggagggtttacttgtctgcttctgtaactgcaagcacttgaggttcagacgattggatcaggttgaggttccaactgattttcagatcatgtgggacttttggttgcaccatgaccatactacaaggtagactagtgagtgctattactttcgatgatattaagatgatgatgatgcggcaagtgccggctactgcaactgaactctgaacactgaaagatgaagatgtgccctgcgattacacaggagttttataggatttttcacgtgaaatcattctactttccagtgttccaaaggacccctaaggtagtacaactatgattcagacatcttttgaacaatattaggccccaaaatggtcacaatttacttagtcagatacaaataccatgtttcatttgttatccttcagcttcagctataagggttttgttttgagcttcctttacctattgttagccaaatcgaattgcataattgatttcagaaaaaaaatgaaaaagaaggtgcagaattagtgcgacgtgtggcctcgaattcttgagcgcgccaaggactgtgatgatgtgaatgaacgaaacaagcacaagactgtccacataaacaagtcaagctgccaagttgttttcgtccccgatcgacaggagaagatgacgacgatggcgagagtggcaaaaaggtcagacaaaaaaaattcaattctgctggaaggatcatcagctacatctcctaccgtttcacacctcgcgtccttggttgccgcttgttgaatcaaatccaattttccattttgtcccaagcctggtcaaaaatcagttttgcaggtaaaagatcaacatgcaccttccctttcctgtaaagaggcatgagcatattttgcacactcagcatttagattgatggcccctttgtttctcaggtagaagaaaaagcttttggtttgaccatttcaaccaccaacaaacactttgaattttgacccaaacagttattactactactgccgagtttagttccaaaatttttctttaaactttcaacttttttatcacatcaaaacttttctacacacaaacttacaacttttccgtcacatcgtttcaatttcaatcaaactttcaattttgacgtgaacacgttgaagaaagaaagatgctgatatgcagatatggagcaatgaatcaggtgaggtaagtatattcattcctccatgctatgttgattgtaacaataaatttccttattattttatgattttatcctaagaaaaaaacaattaagaacagtacactctctcttcattgatcttgttgactggtgtacagttagtgtgatggtacaagtgggagacgcggcgtgtgcgttgggatcgccgcgaacgaacgacgcggaagcgaggcgaggcgaggcgacggtacgtgtcctcttttctctctcgattgattccacgcgagtcgtcttcttcttcttcttcttcttcttctcgccccccacttgttcatggattccaaccacatgatccatatgacgtcgtcgtcttcctagttcctcctcgtgttaatttttccatgcaattttagctgtctttatcaaagctaatttgagctctctctctctctctctctctctctattctatttgtttccttgctctgctctctgaatttcttctcttcttccttctaccttctaaaatttgcctctctagaatcataccatctcgtttcttctccattgaacagctttagcatcttgtcactgctcacttgggattaaaagtgtctccaattagttagagttcttggtcttttttttcggatgctactctccaaagatttggttcttggtgtttttaatcagcaaggaggcctcctctcaggtttaatttgctagcccatcagat

SEQ ID NO: 5957 - DNA, 2000 bp, Oryza sativa
gcaagggtcagcgaaggtgaggccttgtttcctctaactcaattatgtgaacaacacagtttttatgtctataagacggtagaggtaggcattaaattatattgcacccatatcaaaccaatgtgaaaggggtggggtcagcaaaggtgagggtaaggccttggttccctaactcaattacgtgaacactgcattttaactcaattatgtgaacattgcatttttatgtccattttatgtgaacggtgcatttttatgcctataagatggtagagacattttttggaggcattaaattataccacaatcataccaaaccaatgtgaaaaatataataaaatattttccttttctattaccaatccttgaactcaagaccattggcaaatcattttatgttcaatacgctaaccaactcaatcccatatcattacttatatgtttgtgcattgtgttacttatatttagtcccttagtgtacattatcattctaagaagtgtctctaaagagtttaaaatgtctcaagaaaatacctttacatattagacacatttcaaagtactaaaaaaatgcctctacaaaatgtctctaaaaaaatgtgctgaaaaaatgtctctaaagtgcctctagagtgaaatatttttagacatttttcatgtgcctctaaaaagtgtctctacactataaaactcatggttttagaggcaattagcaaaacgcctctataaaagtgcctctacatgagatttttgttctagtgccatatcaaagtaaagcaagtccggtgataatcacttcaactatgaactagataaagtatgtaggtaccgacatagaaatgacaatgaaagcttaaaggtaagaaacatcaaacaaaagataattatgcatgtagcagttcacttgcaaaataggcagctagcgttgccacccgcaacaaaacaaatggtgcgagaccgacaaaacgcaaatcaccagcagcctcggttgctaccagcaacggttagtcttatcgtcagttccaagaggcgcttgtcgtggacagatgtaagtacacgcaagcaagagataagaacatcaaaacgagagtaatgtgagagtgccaactttcctaacataaaaacaaatgctctagggtatagctcttctcgatgaaaaatcaatatgtgtaccaaattactgatatatacatcgtacattatctagtaaatttatgttgttccatcgtgcaaataatagtatgggagttttatggtaagacggataatcacatacgaatgacgagtaaaacctaaaagtaaggaacgcctgacaaaaggtaattatacatagcacccacctacaaaacaagcaactaaccttgccgcccaccaacataacagatggcgcaagatagacaaaaatacaaagcacaagcagcctcagacgctagcagcaatgttattgtcagttccaaaaggtgcctgacttggaaagatttaagtacacgcaagcaagcgataaacacatcaatacgagagaaatgtgagagcgccaactttcctaacagaaaaccaaatgctatatggtatagctcttctcgatgaaaaatcaatatacatatcaaattaccaatatatacatcgtacattctctaatagccttgtgtcgttccattgtgcatataatagtacgagagtttttatggtaatacggagatactcttgaaaaagttgaaagcatggagaggataaaaatggctaaaacatacttggtgcattgagattgaaaacaaccgaagagaaattattttttttagaaaaaaagtgaaatatagcactaccctgcctaccctaccatggggttcgaatgcgagtttgggttgggctaaaacctcgcttactgcgagcatgctctccaaattgttaaataacacatcgcatgtaatatatatatatactgaatgtagcaatccacccacaaaacatgcaactaaccttgccgcccgctaacataacag

SEQ ID NO: 5958 - DNA, 2000 bp, Oryza sativa
tgacccagaacaattgtccaatacaaggtgtgttaactgtttatgcattactatgaacactgttacactgaccaaccacacgaacaaatcggagcaagaacaatatatttccttgttaaacacagcatagaataggccgaatcaggcagaaattggacttttgggcactttagtacttacacagagcaacaatagaagactcacatcatggacatgtaagaaaaatcatctctgtgactctgccttaagatgaaacaacgcactacgcactataagatgagaaacgggggatttgcaattatgacactgcaaacattagcttgatcaacaattatccccatgacaaacaaacataatgaagtgtggaaccgactaggccggccaaccaggcaaccaatcaaccaaccaaccaagaacagtaaacagaattcgacaccaagcaaccacaccaaacgcaacccgttcctaccaagattctctcccagaatcctctgcacgggaacgcagagatcacacagcgattgagaaggggaagggcacaccgccacacccaaaccgcacccgtctagacggataaagcaaagaatcaaagacgaacaacacgcccacgccaaaaccacaagaaatctgggcacggcggcacgaagcaggtacctgcggccggcggcgcggctcagctccctggactgtggaggaccaggaacccccaccccaccccaccccacccaccctcgtcgggagaggaacgagcggaggagcagaggccgccgagtcgggtggtggcggaggaagaagaagaaaaaagaggagcaaagacactgacggcctgacggctcctcctcctctttcgctacctcccgtgcctaaatgggccaaatctcccttacccgtgggcccggcccacctaacataggcgcgtggggtgtatctttgatgggctttaaatgggccctcggccgaggtctctcccagcgccggtgcggtgccgcgcgtcgcccacctaagacaggcsastggggtgtggctttsatgggctctaaatgggccgcggccaggtstctcccaamgccggtgccgctgccgctggccgggttgggtggggcccaccgggcagtgaccccatgcctcacgccggccaccgccacttgccgcgccgcactgtgccagtgccagtgccagccatgcccacgtgctcccctgtcccctcgtgagctccatataaaacgagtcgttggcttggccacccgagagagagagaggaagcgacagcgagcgaggcgargcgaggcgaaggcgaggcgctcccatctcctctccactttttcgcgccgcgtgcgccgaagcggggaaggaggcaggttcgcgcggatctcgcgatgcggatcgcgaggctgctgctgctgctggcgctcgtcgccggggcggcgtggcgcaggacgcggggctcggggacgtggcggcggaggagacgaccgcggcgagggccaaggaggaggcggcgctcgcggccgagctgggccagctcagggcgaagatctccgccttaggtgcgtgcgtgtaatgtctacgctcgattcgaattcgtgacgcttatgcgccccccgcttttgctgcttcatttggggttcgatgggttttagttgacctgttagggttttggaggcgtttagatgcgggcggctagggggagcttacgcgattgaatgggcaatgtggggagcgattcggtgatttggtgatttggaatgggggcttaggtgttttcagtggtttagagtgagggggttgatgctgatttggaattgttggaggaatgctaggttgttctgggagtatctccttaaatggtttcaattctgagcaaaagccttgtggtcgttacctgcatttgctgatttggcctgtaacgggtcatgaatttcccgtgagatgtaccggaattttcagtctagaaaaggatgcacgtgaaatgagtgacccttgcttggaactaggttata

SEQ ID NO: 5959 - DNA, 2000 bp, Oryza sativa
tttacgagacattgctcaatagcaagaaactactcttgattctctttcaactacaaatgtcgtgagtaggatgccataattgccattgaaccatctgcataagcgggacttctgaaataaccagttcctatttccctatcctttgttgcctttgctgcttgttagattttggatcaagctgtacttccagagttccagggacttcacatttggtcagcattattgctcttggctcttgcatctgctaaccacctatgttctctcttaatgatgaaactctgttgttctactggctggttctcacttatggtatttatgctcaactccatagcccatattgatgtcacatttttcagtttgtattgtacatttcctttgacatctctcatatgctaggcaaacaaaaaacgagtcgcatgtgctacatgacattcggcaagaattattgcactgccatcggcatcaaacgttgcttcaaatattcagctttcctgggcgaatacttcaatgttctagaagggagaccctgaattttctgcacagtagctgttttgacgccaccttactttgacgatgttggtgaagccctgacgggcatacaaatatactacaatccaatactcctaatgtcctcattatcttaaaaaaaagaggcaattgcaaatttactattacttagaatcgttattgctagactgccattagaaaattataaaaatatcactagaattatcattcgagtagcatctttgcaaaattgaaaaaatcggtggcaaatttacaaatgcccccacccaaaaaaaaaaaactcctactgtcctacaaacagagattacaacaatataacttagtgggatcagggactaaaatcttagtgtatgtcatatcaaatgtttggacactaactagaagtattaaatgtagactaacgataaaacccattccatagccatggactaattcgtgagataaatctattgagcctaattaatccatgatcagcctatgtgatgctacagtaaacatgtgctaattatagattaattagatttaaaaaatttatctcgcgaattagctttcatttatacagttagttttattattagtctaagtttaataattctaattagtgtccaaacatctgatatgataagggctaaaatttagtcactagatccaaacaccactttaaaatcttccttatatgatatgtttaaagagttatttaccgcaactgtaattgagatggttttgagatttcatcagcaagttcgtcgcgatgagcaggaagaagtggagacaagaaacaacactagcttagctacagtgcggaaaagaagtggataggcgcatcaacggtccacaggagaggcagcgtcttgcccgcgtcgccttttttccttagcctgcaagagaaggcgattcgcggccacacgatttggctgctgatgctgtggtcaacgcgcgggaaaggggcgccttccgtggaccggtcgtacgcggcgacgcccactgacaggtgggccccactgcgccgaactctgcgggcgcacggtaggcttggcttccgtccactgccccccctatcccggcgcaaacactgacgaatcggtcccaccgttcgatgggccccacgtgtcatacatgcccgccttacttcgcgcgtcttacttccgcgtgtaacgagatcagcctaccagcatgacgcgtgttcgcgaaggacctgcaaccttactagacagtgtcactgacaatgtgggtccgtcgatcacctgggtccacacgtcagtgtctaatccagaatacgcgtacgagaaatatccaggtaacctcctccaattccccactcctatataacatcgcgccgtctcaaaaatcccccaacaacgggagtcgtcgaattcggatacaaatctgatcagttcgatttcgatcgaatttcacccaaagtccacacaaactttcgattcgatttctccgatctcgcagcggtggcggcc

SEQ ID NO: 5960 - DNA, 2000 bp, Oryza sativa
acatgcatcctacagttgtttttaccttgtactaaccataagaggcatttttattagtgaatcatgctatgctgggatttgatcactccctgctgaggatcaacgtcagctaaagattcagattcattcaatcaaattcgtaagatacatataccattacatctagttcttttttttccctggtattgggagtagataaagtgatgaataatttccatgttatacttcctacggttgctcagaaccctctggatttttctgcacattcctctttgcccgacacaataccaaagcaattgaagtataacatggaaattcatatgttaatgcatttatctcgttatttctaacaaaaaaattttcgctgcagttctgatgagatttaaataatgatattgttctactgcacaagtagtttatctattcattactgttttattagcaagtttagagtgtaagagtggtggagcacgccgaaatgtttgttgtgaaagcaatttatgtattcagatgtttattttgttcaaatattgggttatccaaagataaacgtgtctggaaatctggataagcagaattaccaactatttttatttcagaatgatgcacaaacatggaagacattagctggtcattcgtatgacgtacgatccacatccaccgctagttcttaattcaagctatctaacagtgcaggagagctagctaattacagaatcaaggtgttctagctggcattcgcctgatcctccgttttcctagtgaaggtaacaccctgatccctcactggagtcagccgctgcttctcttcctctacttgctcgagcagaacttgcagttcagcctctgtcaagctctccaatcgtttctggaacaaagagcaagaaacttcaggtcagtcactcatactcttggtagtaacaaacactgcatactagaatgaacaagtgtcaaacctccatgacttgcttctcatagtccctgagctgctgggcgtaggtcatgtccttgttggccaccctgaacatgtacgtcgagatccaccccaccgtcatcccgagcacgatgatcagctggacggcgtttcctgcttgcaagggatcgactccgaccagctgtgttcagttgtggcaaggatgtgaaagggaaggcatacatgttcgtcagtgaagtgtacttgatgatgaagtcaaagccaagaagcagcgaactggagtagtgatggagaagagagaaagaacagacgtcacctccagcccgtatttgaggccgtagcctaagagtgtcacgccgacgccgatgagcagcacgtccttcctcgtgtatccgaatggcgtctgtgaacaaaacatggtcgtcacagttgggttcaggctttaattttttttcaattcatcaggcgtgtggtcgtgtggatataccttctcttcggtggtggaattggtttcatctgagctgctgcttcggaccaccagacgcctccgctgtcgcagcactgatctgaacatctggttgggccgtaacacaactgcctcgcctttgcaagaacagcaacaaaggttagacaggtgacatccgtgaagaaggccgagaggcgagggcaagaaaaggaagaaggagcaatcaataccaatgggctgggctacaggtgagctggccatcctggcagagcggaggccggcggcggcggcggtgaccctcccggcggagctgggggaaatggacgcgatgggagcggctagcgctgccggcgccatggtgttgccgagctgtgctctctgctgccgctcggctttgccgggctccgctcctttatcttatcccaaccagtttgacaagaggacacggctgagccgcgcgtacgtacgtctacgggtcgttgcggtctcgtttcctgcgagagagaaaaatatcgcgctcggcgtctggataaagagccggtggcgctcgcgcgcgcggaccagacacgacacggagcccgcgcggacgcgtcctcattc

SEQ ID NO: 5961 - DNA, 2000 bp, Oryza sativa
ggtggccagggacagcgccagcgccggtgactgcgacgatcgccggcggcaacgggttggtggtgccgtggtgcgaccagctgggcgtgctgtgccaccgctccgtcggcggcttcctcagccactgcgggtggaactcgctgctcgaggcccgtgttcgccggcgtgccgctgctcgcgctccccgtcgtctgggatcaggtggtggacgcccgcgtcgtggccgacgagtggaggatcggcgtcaacctgtcggagcagaggagggaggaggacgacggcggcggcgtcgtcgtcggcagggacgcgatccgtgccgccgcggcgaggctgatggatccggacgacggcgagagccgagagatgaggaggagggccgcgctgctgcgcgaggcttgccgtggcgccgtgcaggacggaccggacggtggctcgtcgcgccgctcgttgaacggattcgtgaaagatctcgccgacgggagacttaatttccagtgagagaacagcgtgaattaaaccaaaaaagtaaataaatgtactagcgtgaatgcttgttgtgtatcagtatccacgtggagaataatggaagagaaaattttactttaggtaatctgttgtacgaggcaaacatcatccctgttctatcgaaacactctcttagattaccagcctaagaggcttttacttatggcagatacccttttactgaccaacctgatttttacttgcggctaacttaatgtgacagttaaatactaaatgaccggtgttcggaaaagaaaatatttgagcccactgcaagagaaatgtactattcgatcatggcaaatgaagcttgaaggttacgttgctagtgaggaatatttctcgagaagatatcgctgggccgctccaaccacacttacaaactagcggcaggaactctggaggaccacatcaatgtgggtttctagcatcataggggtattgtagtaacttcctgtgcaccatcggggttaagattataactccacatttatgtttggggactatataagccagtcctaatctcatagtaaaataccataccatatattgggctttacaactcgaactcatctcgttcttagaataggcgggaaaaatgatacttttccgcctatcctctgttgatctgttacccaaggtcacgaaataatattttattatcaatgttttgctttgaatagttccttaaccaatatttttgttttggattgggtatttttattttcatggtgttttagaccatccttaattttaattatctacatctaacttgttacatgaaaaagaaataacttgtatatagctgtgagatttaagagtttattgatgagtaggaatcgacgtattctagattgttcaaacaatcgttcatatgtttgagacgagggtcggtagtcaaaagtgaaaaagaaaaaacaagactaccctgtccaaaataagaacgtcgattaaaagatgttttaaagtaaactatcagtaatgaaatatgatccgaaatgagaattactcaaaatgttatattatgatcatgccatmacacatgatcgtatcaatatccatcgacacgtgcacatgtgggcatgcgtgtgtgggcagcgtggcgccggcacacacaaagggagaggggagagcgagaaccacacgcacgcacgcacgcacgcagccacaacaggggagagattgcgagcgcgatggccgcctccacctccgccgccgccgccggggacgagccgtgccgctgccatgtcgtggcstgcttgtccgckcgggcgggacgtgaacgccatgatgaacctgagccggctctcgcgcgcggggcgccgccacgtcactcgtagtcaccgaggagtggctcggctctcttctctcctcctscgrcgscgcgctgcggctgcgcgcatccccaacgtcatcccctmcgagaacggccgcgccgcgaccacgcgggcttcctcgacgccgtcggcgccagg

SEQ ID NO: 5962 - DNA, 2000 bp, Oryza sativa
tgctcaactaggttcgtctcatgttggagtgtataaagtgaattgcccatctttccctatcagcttaggcttttaggtgcaactggctggtgcatgcaacttaatatggtatcaaagccagaggtctcgagttcgaatcctggctggcgcgcaattaaataaaataattgtagcccactccaatattccacgcttgagacttgagggggtctcacgtgagggggagtgttggagtgtataaagtgaattgcccatctttccctatcagcttaggcttttaggtgcaactggctggtgcatgcaacttaatatctcaggccccaaaattcttgcttgcatcacctacgtctagttctatcgtgcccatcgctagtcctcgatcctctttgttggctatagcaatgatttatgtgatctgttgaagctaagtgtagcacgttgtgacacttttttccatattatcctttgatttttcaatctcaactatcgatgtgtttatctgagttttgatgagtgattagcaatttgtctgtggccgggatactgtcggcgagaatccactaccaagcacctccgctcgttgtccgccatcgacgccttactggccctacagctagcagcaagtttgcgacgtcccccttagcttccttcgcgcatagctccaccactaggccaccgccacataactcaactgagaggagagattgaagagatgttgctgatggaccgtcgcggccccctcctcgttggccaccccgctcgaacgctttagaatctgagagatggggacgagagggaagagggagagggagaagagttggcctttgaaatgtggacctcacatgggcctcactcaccacattagacaaaaccaaccactataccacaaagggaccaattttaacatgataatgtgagttgaggatatgctataccctgatatttcagtttagagatgaattttagattcgtgacaacaaactagggacttaaagtgcagttattccttttcggttttagcccactagccagccagtagtaatggaccaggccataatagaggtcaactcctgcaaagcctcaaagtgtgaattttccttttcctttagagttaccctggtctaacagtacatcacaggtaaagcctgtcactggatgcatgtggatgtgcatcgacaaaatatgcattttccttgttgtattttggsatktggatgtacytttttttttttttgcttcaatctggtacacattttcatcacacaaatctgctggagcctggggacattggggaaaaccgcggtcagccaaacctggggtcaacaaccatcgtcatgcgggaactggccgactgacctgtagatgagctacttgtttatatgctactttactaccaaatgttaactcgtgtttttttgcccataattgaccacagaactcttgaatttctgaatgaacagcacctgttctgaagaatctgaaaatggatgcatttgactttctgcaaaaaaagtcccaaatctgcactgatccaattccgtttgcttagttgctctagtgctgaggatagtagtcaacgtactgcaactgcctacggcctaataaccagctctgtttgacggtttcctgccgcagttgccgactttgcagtgccccgtgccaaagcaccaaccgaagatttcgctttcaagctggctgcacggcgagcaagtgtgcaactcgatccactccaccgtttgtcttaaaaaacggcccgatctagaagaaaacccggcaaatccaatccgggaaaacgctatgccgcgagctatggattccgaggcctaaaccgcggcaaaaacgtgcccaagcccaactcccgcgcggcgccgaagcagaggtggcgattcccaactcttgctgcgaagtcagcgctcgcgatcgcctactcggctactcggctactcctcctcctcctctccccatctcgtgccgtgcgttggtacgcttcatgggcgcag

SEQ ID NO: 5963 - DNA, 2000 bp, Oryza sativa
accccaaccgcaggccatcatcaccggcatcatggcaktaggaggcctcgamacctcgatcgctcagtcgttcgctcgcctgctcctctcatctctgtacgtagcccagccgcggcagcagccgccatcatgccgcatgattgcagcgagacaacggcccatcgactctgtccccattgccgcacatactatcaaacaggattgctcgatcgatcgatcgatcgatcgatctacgactactactaccactgtcagcagcatgctcgcagcggtggtcgtagtagttgtaggcacaacctgcatgcccacaacaatgatgatgatggcggatggccggagtgcatatgcgttggcctgcagtgcagtgaagcccggtggatgaggaattgatgatggccgtaatcatgcctgcatgcagaggagaagggaattctcccattcctggtcagtttcacatgcttccgcactgggcttctacaggtgtgacagtgtcttttgctcgttccatggaattatacaatctaattagcatcattagtcttcatgcaggccaagagaatwggaaawtacacgcaaatccaacgtgctactgtacgtactagtactctccccgtctcattttaagtgcagctatgtttttccgtgtctaactttgatcgtctgttttattttaattttatttaaaaaaattaaaaacataagtcacgagtaaagtattattcatgttttatcatctcatagcaacaaaaatactaattataaaaaattttcaaataagacggatgatctaagttggacacaaaaactcatggttgtacttacaatgtgatggagaaagtaatatgctgcacgactaatcattctgtctttctttcaatttttccccctaagagagtgtcattatgcgtgtaatgcatcatgcgctatatttactatactctctcctagcctcctgataaacttaggctgtgtttagttcgtactgaagtttgaaaatttggttaaaattagaacgatgtgattaaaaagttgtgtgtatgaaatgcctcctgataaacttaggctgtgtttagttcgtactgaagtttgaaaatttggttgaaattagaacgatgtgattaaaaagttgtgtgtatgaaatgcttgctgtgatgaaaaagttaaaagtttgaaaaataaaactttggaactaaacagggccttagcatataatctattttatttaaaaaaatactcctaatggcagcacatagcgcttgtctcattctgaaacaagaaacgctggacataatcaaactagttgtctgaactccaaaaatactcctaccaaacactagtctccactacattaccactagtactcactcccaaacaaagrcacaatcccaaggtcacaaaaaaaacccgagaaaaatccacgcaaaaatccctggaggatttacaacagcagcagcagccattcttttaaccttttaaaatattaaatattgtttatagctgacctatagcttgctatcgtaaactgctcttatcccatccatgagcggctgctgcgtggccagctttctgctaaagattgcgggtgctatttttaaaaggggaaagattacgtaaccccagtgatgattacggtaattattgtcgcctgcctgctactagtactccactgtactaccaatccatccatccaaacccttttttttcacgtagccccccggcgaatccgcgaattgcagctcgccgtgtcgccggccgaccggggctttttcctttcctccgggtcacgtgcggcctcgtcaaccggtcaaaccccgccattatcacgcagccacatacgcgccggagggaagcgagcgagagaggtgtgaagtgtgaggtggtcaggtcgtcttcttccttcgctgctgctataaaacctcgcggcggcttgcgcgattacgaggttttccattgctgtgtgtgagtgaggtgagtgagtgagtgacggattgttgggagag

SEQ ID NO: 5964 - DNA, 2000 bp, Oryza sativa
tttggattgtccagattcatagctaaaaatgattatattttagaacagagggagtacttttgcattgttgaaagcmgaaagctctcccaaacaggtcccataagctctctcaaacggttcaagttacttgcatcatttatttcacatgaaaagtctaatttggttaagaataaaaggtaattcacatgtacttcgacaaataaggttagactaactatkggtaattcacatgtacttcacataatggattatttacgtcgaaggttagaatgggacctcgtatgtctattggtttcgacctaaggagaagcattatgtctcttggtttcgacttaattgtgtgatgtttattccgttgtcataagtatctgtactagttctaagaagaacctttggctctggcctaattcaataaatgttgtaggacactgaaatacaatatgtactgatttctttccctttatatttccaaatggttggattagcttctcctgccaacattctgattagcaaggctctcagcctgtcaaacacatgtagccatccaccaaacagtttcctgtcctctcagctgtttaattagctaacaacactgtactcagtttggtcgaacgtcgcacagatttcgggtggttggtaatctggtatgtttgacgaatggttccctaatgactaatgctcctaactaatcaattcactaccgacattttgcagtaaatctattaaaacaacaactaacatgatgtgaaaactacaatatattctttgcttacaaaccttcggttcacactaccgaattttgatttctcctctttttttttattagaccctcgtttgtcaatagcaaaacatcatgccaactaatgagtgataataagtgtagacaatttgtacatactggccaccttaaacaatgtttagtagggacgaaaacgtggagtgtgtgtaactcaattggttagtccacttgcggtggaaacagtctatccatatgagttatagacttaacacaggtgttcgtatttacgattaattattcttttagtggtaggtgatgcacctgtcgataacaatgtgtctatagtgactccttcaatctcaagatataccagcttagttttatgaaggtgtcataggagaagggtgtaagtatgcgcatttataacagcgagtgtgcaaacattgtgagctcttggatttataccgtgttctcaaagaaaaagatagggataaaaagggtgatagaaatttccgaccaactgagcatagtttttttgtaaaaactgataccaaccgtttttattctaaccccatatatttgttttttttgtttcttttatcatcatattgtaatcatcactggttttcgtgaagatgctaccgttttcgaacatttttcatacctacttgtaaccgttaaaaaggtccctcttcatctgtagcaaaggtgcattcctgttacaacttacgacttgacactgccagtgattaattaaagctcacagtgaagtgttgggtagtgcagagagcgagtgagagagtagaagcacgtcaataatcgggtggaagagggtcacaatcggtgttgatcaatgaagccatcagcgtcttcttccaacagttgctccgctcccacatttatcatcttaaccccaaaagctcactcactcactgcagctgtactgccacacccccacctcactgcggactagcagcagcagcaagagagagagagagagtgggagaattggggagaagctaagraggaattcaggaatttcaatctttgccgacaccacactggattcccttcctcaagcaaccatggcagcagcagcagcagcatcagcatccatcgagagcatatattagctatccgtggtgatcatgtgatgccaagattgctactataagcaaggagatagcgagggagatattcttctctttctttttcaggtgggggagaaggtgaaggtaggaaggagggagagaggccaaga

SEQ ID NO: 5965 - DNA, 2000 bp, Oryza sativa
aattgctcatgatttcttccacaattttctgaatgcagcattgggcgatctttttgctcattatgtggaagcctggaaatcgtggtactctgaatttgcgcaaggcagcagcatgatgcagcagcactttggcatgcctgtcattaaccagtttttgtagtcaaatcattaatctcaagcactgtatttcttaccgcgtgcttgggattttacctgtacaatttgtcaagaaaatgagggaacaaagacatgacctaggcctaggatccattgtatttactcaatgcaggaaatatccaggctattcagtccaaaagataaactcgcctcattgttaggcatgtaactgttaattcatctagctataagctttccttacgtttgtgcattctaaagtttgtcagttcatctagattcttgcgatgcagcatccctcatttttctgtatatactatacgctgtctgaggctttgaatccatttcaaaggcttcatcttttcgcttatgcttatgcttattagttaaaatttaaatttttaaccttaaatttgaagttgatgttggaatttatttttcagcctttgtttctaaattgttaagaacacgtatataaaaattatatccacaaattacattccatttgcaaatatgccatttggcttattccacgaataagtcaaacggcggggttacgaatttgttaccagtaacaattgaagcagaaacagaactctgctcaagtagtcaaaaaccatcctaccaggccagtataataggagtaccagatggtgtaaaatgtaattgtagtactgtagtagtttaagatcaaaaagaaaaagactttagcaatcataggtgtatttgtaaggatgattacacatacctgaaaattgtcagcagttgccagtggatgtaaagcccaaggctgtgtttagttcagcgcaaagtttagattttggttgaaattagagatgatgtgactaaaaagttgtgtgtatgataggttgatgtgatgggatccaaacttcggatctaaacacagcccaaatctatttttgcactgaaaggatttggtcagagaaagcattgtacatttcgtagtactattctagcattgcttagttgcttgcactatgcattatgcaatcttattgctgaactagtatgtttgagatcgacggttaattgaaacaagtcgttgcgagtgaactgccccctcgccatcgcctggggttgccttcacctgtttataatgacctataatattcccaacgtcatgacagggacacgtcataacaaattcttgtctccttgcttttaactgtagtccaattctcattgttattttttcttcggaaaatcatttatatctctgtaattatgtgtttcttctgatctggaattataattttacatatttatcccttgtttatttatattcaatcattctgtgataattattttttaattatcgcaaagatgatgaatttttaataggctactgtccagaactccagatgtatttagctccaacgacaatacaaccaacaaaaccagaaaaaaaaaacctaaagaagacagatcagactccatataaaaacatcttctactatactaataaaaaaggaagtgcatcagatgcgattgtgctcaaaataataaatcctgacgtcaattgtcgtctaaccaactttttaaactcgcgaatttctccattatcttatgctagtcaaactcagtttgaaccaataaaatttcacagagataagtatatatattactcgcaattttttacgcccacacgactgtccgagagcaatatgcgccgcaggcccgcgaagcccatcaacaccaaccaaccgagccccattctttatttctttattaagagcgcaacgataatttctcaaggaaaaatctctcttcctatctccttcctccccacccacccccaaatccacctcgccgtcgccgccgcgaaaccctaggcagccatagcc

SEQ ID NO: 5966 - DNA, 2000 bp, Oryza sativa
ttctattttttgttgattgcaggatcaaatcaactggcacgctaacacacccgaaggtgagctttggacctacactggagttaagcagatctcccaggccttgtgttttacgtcaacatccccttaattctgttttttttactaaaatgcctatgaatttttttagaaagaacatgcaattctgtaatagtgagccttaactactagaatcatagcgcgtgtactccctccgtcccataaaaaaccaacatagacacatcctagtactatgaatctggatatacctctatccagatttattgtactagaatatatcacatccagtctttcattcgtttttttcgggacggagggaggagggagtatgtaacattatacttctacctgatgttggtataaaggtggtcaaaatcatttttgttatatatataccgtgaaaagatgtcgtctagtaccaatatatcggtgaaatttggagggatttgcgtgtacgatcgtagaggaccacatagggacaattcgtaccatcgtcagcttgaaagctttgacaaatttctccgatttgtatgttcccgcgaagaaaatttctcttcacaatttattttggtcgcacatgaatgtacaccaataacttagcttaggcctcaccaaaatgacacaaatatcaagacataaatgaagattcattaacactgcaaaaaatatatatcataatggctatatttgtaacacaattaaacattgcaatcccctgcttgcacgggtatttataattcaccgaatgtgtctcgtagctgtcatatgactattcgtagcatgatcatgattaacactgtaatcatccaaacgcatatactcttttttttttatcccctgatcctaatgcgaagcttgcggcgtccacttgccaactctgatgaatgcattaacactgtcacgggcgcgcccacatgtgatcagccgtggtcgctgttgcttcgcgttgctactgctacaagaagacagccgaagccgagatactcggcttccgtaatttttgacgtttcaaacgaaattaagattaacatttataacttctattattaataaattttaaaatattagtttaaaagtagtagaataaaactaaaaatatatttccttcgtcctaaaataaatgcacatctctagtttaatttgaagttgaaactatagaagtacacttattttttagacgaaaaaatatttatttattgtgtactccctccgtcccaaaatataagtatttttggactctgacacggtctccgagatgctactttgattaacaatatatataaaagcaagatgttttaaataaaaaaagatacatattatgatagtttgtttaatgataaatctactaacattaattttatataattgatttttttatttttcttgttattaatagtcaaaagttaaaaatgtttgactttttactatgcttaaaaatgcttatattttatgactgtatagtcaaaatatattttgaagatatatgtcatcgttatctaaatcgttagaaattatgaaactagaaagagcgagggagagagagtacgtggtgtgtgcgttgccgagtatctcccagaaaaaagaaaagagagcttgtgaagcagtaacgccgatccattttagccctaacgaaccaaccccggctctcggtcggtcgcggtcgcgttgcaggggagattaacgcgtaagcaaagcgaaggcgacgacgcgggacccgcatattctaaaaaaacacggtggttttattggtaaagccacatgtataaatctcccccccgaaaaaacaaacccggcggattcgatcgcctccgccctcgccctcgcctcgcctccgcctcgctcgccacccacccccgcacatacaagcgcgacgaggaagaaggggacgccgacctccaagaacccaccccaaaccccccgagggtgggaggaggaggagggaatcgaggccggaggcgccggat

SEQ ID NO: 5967 - DNA, 2000 bp, Oryza sativa
ttcacttatacttattagctaaaaattaagttttcaaagctaattttgagggttttttttatcgaaatttatttttcagcctttgtttctagatcactaagaaaacatatatataaaatattcataaattacttttcgtttgcaaatatgccttatggcttattccaaacgatggagccctagtactcaaatttcaatccaaaacgagatcgtaagcccactaggattcgggagtgaggattttgaaagcaagaaacggaaaggtttaaacggctcagatgcaaatcctgctcgatcgaacggttgagagcggtgatcgccgctggcaacaaacaagctcttttgcatttaatcactcacttaagccttccttaaatagggtgctaatacgcagatagctactggtagatagataaactttagttgacgtgttccggggcccaccaaaaactgtcagtggccaaaagaaccatatcgtctgatcgtctccgacctgcttggccttctggaagcttcaagatctccgccacaaagcaaagccggccatctaaaccccaagtaccatgccgccccccacaccgtccgtccactttgcacaccacgttcccgtccgtccattcttgacccgcaccaacatgtacagatgtaccaggagtgtactactcgatgacagcctattaagggcattcctaacccaatgactagaatggtgtctatagtattaaataagttatcacataggataaaaaatgatgtgtcaagtgaataaatgaggaaagagaatgaaatatacaacatccaagacatcatgtgagataagtagcattaaattgaagtatggaatagtggtgtttgcattggaagagtagtgtttaatactagtttcttgatgatgtggagtttatggaaaccatgtctagtgttatgggttgggactgccctaaagccgcccctaaattaactaggaggaaactctaaagaawtcagctatgttagtcaattcccaacccaaaacactagatatagtttccataaactccacatcattgagaaactagtactagacactactcttccaatgcaaacaccactattccatacttgaatttraggctacttatctcacgtgatgtcttggatgttgtgaagaaaccatgtctcatgcaagacatggtttccttctctttcctcatttattcacttgccacatcatttttcatcctaggtgacaagcttatttaatgctaaggacaccatcctagttattgggttgggaatgcgcttagcctcattccctcctctgtagctcaatcagtcctactcaattagaagcttccatggaggcagggcatcaaaacacatgttcacatctcctcctaatccaatatctagccctatcatcatgcgtcaactagcgactattagcctagaaattttgaattggatattgatgagagaacacaacaagaaacacaggcaagagaggccaacgtagaagtccaaaagtccaagctggggagggtatcatacaaacggtgcgtttgtttgttcctcaccaactcctcccttccagatttgaagccccccatgaccaaggccaaactatttcagctcttgctctgcaacattcatcctcttgtactcgctacccctttcttcttcaacatctgagaataaatttcgttttctcccgtggcagccaaacttttaatgcatcgattgcattagttacttccaggcgtgtccacttcgacccaaccactccccacgctttggttcgtggttgccaaaacccaactcgtttcctccccttcccatccatctctcccctgtttgtttcttggccctgatcggcctccccgtgttccctccgatccgctggtcaaaatttggtgttgagtggcacggcgggatctccatggccgggaacgcgagcggggattcgccgtggttcttggcttgaggccttggggtgggtcagcggtcgccgcccgcccggt

SEQ ID NO: 5968 - DNA, 2000 bp, Oryza sativa
ctcaaccagagtggaggaagaaggcagattcggccactagagtagaggaagaaagcggatagaaggctatttgtcgaagtttaaggatttttatttgaatttattgcttttcatgttgcattttgttgtcttcaagtgtttcactctgattgattgaaggttgcactcacacgcaagaatttaaatctccggctaagacatttagctgctaggttctctatcatctatgatcagctatagctggctatagctgcagctaagctattaagcggtttttgcaaaaattagacataaataacttgataatcagttatatggaagagaaagctatttaacttggggaaagcagagaagactagggagagaggaattgcttgataatcagtaggatcaaatcctcaccacttcctcaaccatcttgctaaattacaggaggaacatgcccatgaattcctcccccgtgaattcctgaacttgaacaaaaaaaacaattcaagaacctccatactcctcaccctgaggctactgcaaccaaccaaaccaagaagaaacaattcatgagcagccaagccaccaacaaaccaagaagaaacaattcatgagcagccaagccaccaacccatctctgaaccaagaaacaacacaaggttggctcgagcacaagaaaaagaatactgacagaacaagcaccgccgcccaccgcttgcaacaccaatagctgccgccgccacctgtcacagtcgtcgcttggggccgagattggtggatccgttgtcttcgagagtcaccaccgccgccgccaccgttgccgcagcaggtcgcagccaccaccttcgggagcagctgccgccactgcaggtcatagccaccgccttcgggatcaaccgccgtcgcggctgctgctgcctccttgagcagccgctgcaagcctgcaagccgccgtcgacaggagaggacggagagtgactgagtggaagatggagagagttagggtttcgttaggtgatatgggccgttcgccaatttcaggatttcagcccaccaacgagttagctgccgctacttgagagcccatttagcggctatctccagctaaaggcagctaatagcgccttagaacgtgtagctgtaaattagacatatcttagcggttgcttctactgctatagccggagatttaaatccttgctcacacgtgatctcatcaaagccgtgttgcacccttcaccatctcgaaggttcttgcatggcaacatttgtttttctttatcgttttcttttactgtttatgtgcatattggtcaattaggtttgcaattaatatttttgaatgttgcatctgattgaaatatttttcatcgagcgatgaaacatctaaaataattcttgacaagtgatggagtacaatccgatatgtttttcctagcgtatatatcagccactagttgcgtccaaattttatgggcgtgattgataaaataatctaatttatatgattctgaaatatttatacgtttgaaataataaaccctaaataggcaaaacaaattaagggtacggtgtttaggttagagaaacgagtagaatagctaaacggtttttacagctaatagtgctggccatgacaccattacatggggagtcaacgttcaacggttgactggtcggagcagctagacagacacgwtgtwttcttaagccgcttgaattgtttwytymmgcsrcwysmmyykyytmywcyykmgrcwyyymmmwcykycwctwtasrmttwwmarmcwgycwsywwaywrykrmymkmmmsmcagyyawtwgcrgcwyymaycmsmrtcatyakyagcmwycrtcskcrtcrtcmtymkccmwmgycswcrtcgtccycctccyawmycmacmykgccyccctctctatataaaccctgcctccctctcgacatctcctccattctcaaacacaccccacagctacagctgatcactagctagctactgagatcgatcg

SEQ ID NO: 5969 - DNA, 2000 bp, Oryza sativa
aatcggttagattagagtattagacggtgaggctgacgtccggcaatgggcgagcttagagtgtgtttgtgggcctagtaaccttctctaatacgtgaaacggagcgacgaattattatataattaattaaatattaatagctatttaaaaatagattaatatgattttttaacgaacctgctaaaaacctgttgccacattttgtggcagatcacagtcaggatcctgactgtgtccaagccttacactggacacctttgtttatatctcctgtttttctctttgctatatttttttagaaacacagacactcacactcactcccctatgaatacacactattcatacgagcacatccgaaagactagatcagtatatattaggattcacaaagtcatcatagacgtctcgctctaccactaaaaaataattagccataaatgttagcaccgtatcaagtctaagacttcaacctaggtgtactaattccaccacaaagaatctagccaattgagatatgctcacaaagaatctaaacaattttttatggagggagtaggtaactaattttagtcccttatctcatcatagtatatagtaaaagatttgttgtacgtataactaaagtgttgtcggagaatgaactcctctaccagggaaccgtgaggcccccctttgtgagttcggccgggggcagcgggtgagattcaaggatttggtgagcgaaactgtgtggtcttgagggggttaggcccctccaagacgatcagaccaaagaggtttatacatgttcgggccgctatgaagcgtaataccctactcctgtgcatgattaattgaatgtagaacaccagtgcttagggttgcgagacccaagcgccagttcgctcggaagtccccccctctaccactaggcctggacctccttttatacctcaaggggttaccacatgggcccaacaacctaacctaactccggtggagaagtattataatctttgcattaaatgcatgtcttgtctcttgacttgggaagccaagcacacgtcgtcttgatgatggggcctgtcaaatcttgccgcctgacacggggggtgcccctgtcagtcaccatttaatgggtgaagacttctgggctcctattacaccgggaaacaggagccttgctttgaccagagcgggaggaccgactccggctgggataagaggatgagaacatctcaccatcactatttgatgggacatgtcaggctgcacgccgcctggcacacgagcagcgcacaggtgcactagccagtcccatcggtcattcgaccggtcacagaccggttgagtgcactgtacgccgcattaaatgcgacgtggcgcgaccgctcgggacgccataaatgcgggtaggtgggcacctggaggcggacacctaatccaccgtacgtggtgacctagagagggggtcgggggagcccgacccctagtcacgggagggggcggccgccgcccgacctcgggcccgatcccccctcggggggggagccacgtggcgcctggggcggccttctccctctagtctcggccagagagtggccgccgccctacctcgggcccgamccccctcgggggagggtcacgtggcattggagggcaacctcctccaactagtctttgggtaaggaktggccgccaccccacctcgggtctgactcccctcgggagagggccacgtggcatcggggggcagcctcctctctctaaacctgataccccgggcccatatcaccgacaagtgtaattacactataaatatatgtattttataatgtaataaaaaatatcgctctttttatttataatgtaataaaaaatatcgctcttcttgaaaaatatgatgttataactataactaatcaccttttttaaaagcaacacttatatagaatttttttaaaaaagcacgacaagatgcacatgaaaaaaaaaagagcaaatagaaactaggaaa

SEQ ID NO: 5970 - DNA, 2000 bp, Oryza sativa
ggacgcccttgccgatcgcggcggcggggtggaatgtcgacggcgaacacctcggcgacgcgggactggagcgcgagcgcgaagggcgcggcggtcctgcgcccagagcacgtgcgcgacgcgctgggcctggatggcgaggaagcccttgtagttgaggaggcagtgggagaagccgacgcaggcggggtccctggagcgcgcggcgaggaggtcggcgacgacggcggcgcggagggtggggtgcgcggcgagggaggcgacgaagaggtcgtagaggagcgtggagagcagcgtggaggagcagagcttgttggcgaggtggaaggcgagcgagcggtcgagggaggggtgggagagcacggtggcgtagaggaacgacgcgagcgccggctcggcgtcggcgtcgcggcgcgcctcggccttgatctgggaccagacccacgactcgtcggcgtccgactccgggggcgggtacgccggcacgacggccgggtggagcgccggcgggctgtgccggcgtggctggggatcgtcccggagaggctggcccgcagtcatcgtcgccgtcgccgtcgccgtcgtgtcgaggtgtgtggatatgtggcggtcggcggcgaggaaggcgtgtggcccgtgccgaggcgagagcgaataaataggcgtgtgccgagtggggacacgtcagccaaccaatcgaaaacaggtaaactttatctctgcgtgggcccggagttaagctggtacacacgatgagcacgagcccgagttggcgcgccgtggacgcgtgggcaagcgccaaggcggatcgagcggcgacgggcctggcccacgtttcgtggcctagctcggccctgcacaaacaccggatcgagcgaactggatccacgcggataaccgcgggtggcggcaggcggtgtcgagtttgtgcacgtccacgtcgtgatccacctgaccacctctagccagaaggcgccggttgatcgagccggagatacctgcgctgacgcgagtacgcgacgctaagctggtcgtacttggttggttgaatacgatctgatcgcaatattgttgccatcgatggacgaaaatcacacgattacacgagcaattatttggttgtgaaaccgtgaaagcatccaaatgttccatataaccgttggattaacgtgcacgggacggcccgacggggagagtgcatcgataagagtcatagtatagccaactactcattccaaattatctataaccaatctaacagcatatttatacaatagttatatactacactattaatatatggtccaacctgtcatacacacattgtgtcttgaagtctgtgctacagctgactataaatctataacccgctgctattctctcttctcatttatcttcttaaaatatatttacagcctggctattgtaatccctccgttttttaatagatgacgccgttaactttttctcacatgtttggccattcgtcttattaaaaactttacgtaattataatttattttattatgagttgttttatcactcatagtactttaattgtgatttatatcttatacatttgcataaaatttttaaataagacgaatggttaaacatgtgagaaaaagtcaacggctattaaaaaacggagctaatatttgctctaactgggtatggatgataggtcacgccgtcacgtgccaaagtcagagtgggccggtcccgatactgttgtcttgcgccgctgagtttctgaccccgccgcggcctccgccgtttcgtacgccttctcctctcccgcgcgcacccgcctccgcctccgccttccccggccgccgccgccgccgcaggagaggagacgcaggccgcggcggcgtcaaccgccgctctccctttgccaccatctccgctcccgacacacactccactccactccagtccacagcactaacccatcggtcccggcgatccccactagtgcccctcctcgcccgcttgcc

SEQ ID NO: 5971 - DNA, 2000 bp, Oryza sativa
gaatgcgcaaacccagggatttctagaccaatatggaatagagcgactttaccatgttttgcaaaatgacttagcacactgaaacacactgctttttcagaagattaatgtgaaatttcattagctcgagcactgcagattaaccgtgcagagcagcctctaagtcagcttagattcgttcaccactggacagagtattaacagatattcctactcgactaatgggttgagacacgacaacatgccacgatcgatgctcggcgacatccattttgcacgagcgggtggaacagtgagagaacgtttggcacaaacggcctcgtttgcacgcaacgaccgcgcaatcccaaatgcgttcgctcatggacactttctcgaacacatcgcgtgtcccccagctactcccagcaagcaggaagcagcagattggtcaggcactcacctgaggttgccgggcggtcgagcgcggcaggagacggcgaaacggcggcgagtgataggcccacatgagagggacaggagagctgaatactccgccgccgcggcgccgcaagccgccatggcaagcgggcgaggaggggcactagtggggatcgccgggaccgatgggttagtgctgtggactggagtggagtggagtgtgtgtcgggagcggagatggtggcaaagggagagcggcggttgacgccgccgcggcctgcgtctcctctcctgcggcggcggcggcggccggggaaggcggaggcggaggcgggtgcgcgcgggagaggagaaggcgtacgaaacggcggaggccgcggcggggtcagaaactcagcggcgcaagacaacagtatcgggaccggcccactctgactttggcacgtgacggcgtgacctatcatccatacccagttagagcaaatattagctccgttttttaatagccgttgactttttctcacatgtttaaccattcgtcttatttaaaaattttatgcaaatgtataagatataaatcacaattaaagtactatgagtgataaaacaactcataataaaataaattataattacgtaaagtttttaataagacgaatggccaaacatgtgagaaaaagttaacggcgtcatctattaaaaaacggagggattacaatagccaggctgtaaatatattttaagaagataaatgagaagagagaatagcagcgggttatagatttatagtcagctgtagcacagacttcaagacacaatgtgtgtatgacaggttggaccatatattaatagtgtagtatataactattgtataaatatgctgttagattggttatagataatttggaatgagtagttggctatactatgactcttatcgatgcactctccccgtcgggccgtcccgtgcacgttaatccaacggttatatggaacatttggatgctttcacggtttcacaaccaaataattgctcgtgtaatcgtgtgattttcgtccatcgatggcaacaatattgcgatcagatcgtattcaaccaaccaagtacgaccagcttagcgtcgcgtactcgcgtcagcgcaggtatctccggctcgatcaaccggcgccttctggctagaggtggtcaggtggatcacgacgtggacgtgcacaaactcgacaccgcctgccgccacccgcggttatccgcgtggatccagttcgctcgatccggtgtttgtgcagggccgagctaggccacgaaacgtgggccaggcccgtcgccgctcgatccgccttggcgcttgcccacgcgtccacggcgcgccaactcgggctcgtgctcatcgtgtgtaccagcttaactccgggcccacgcagagataaagtttacctgttttcgattggttggctgacgtgtccccactcggcacacgcctatttattcgctctcgcctcggcacgggccacacgccttcctcgccgccgaccgccacatatccacacacctcgacacgacggcgacggcgacggcgacg

SEQ ID NO: 5972 - DNA, 2000 bp, Oryza sativa
agccacatcgatccggtaatgacagtcaaatatatctccttcactcttaaaaataaaacacgggctataacatattctactactataaatttgaataatgggttgcactctatattacgacgttgcttttatgaaacggatggatcaataatgctcctttgacccttgaggccttgaccgatatcgtcgagggagcgggtagctcaagtctgcccgctgtgtctagaagtagtagccattagaaaacgctcttggcccttcgcgaacaacacgagctgacgacgaccgctgtctccgtacgtggctttggaaggttccactggcctggcccaatcgatcgctgcccctatcctctcgtcgtcgcttcggccactctcactctcgtttacgtttgcgcgcgtacgtaatgccgcaccggcacgacgtcgatggcctcgatcggtcacagaagatccagaataattagccgatctgaaaaggaagacgtgccaaatcacgccacggctctgcagtgaattttcccaagttctttctctggtcttctcttttggagtatatggccaagaattagttgtattgcttttctgcccaagaattcagacgtgtgtgtaccatatggcgctaaaaagcgtccacgcagtctccacatcctgtcaatgcccccacgagaaagctattaagcgctactgaaaaaataaagaatgaatcaatgaaatgaaagaaaaaataatggaggaaaagaaagttaaaagctggagtagtagcgagacagcatgagccgactcgaaatcaactgctattaacccctcccatcccttggacccttataaagggatcctctaacttaagaacacccataatggttatttatagtctctctacaaaatattcatatcagcatattttcttacttgaaagaaattaaatgaatagagagagcaaagctatatactaacctggagatagtctatatagaaaaacgagggcaatagattagagagctatagatacccatgtagacatactattgagatggtttactattaatctagtttattgttgagatgtacatgttttatagagagcaccttaatttaccattgcaggtgctctaactactatgtaattgaaccactgacatgtggaacataacaaagtgggacttatatatcagtgactcaattgcatgcgaagttaagttaggctgtgttcgatacccttgagttcctcgtgtacgcttttcaaattgctaaacgttttttcaaaaagtttttatacgaaagttgcttaaaaaatcatattgatcttttttttaaaaaaaaatacataatacttaattaatcacgcgctaatgcaccgttccattttcgtgtgcagtatatgtgttcccaaccctgagagccaaacacagccttagaggaggatcttcttctattggtcactagagtaggtaaccatacatgcatatccgtgcattaataaacagagcgctatattacatctttgcctacgtgagatgcaaggaatccaactgggatattacaatttagctacacatgaaaagcctagctttgctcgccgtgtgcctctccgtacagaatatctgctactgctcgctagctggctgctccaacggtggatggatgggcctaccccgattggccgatttcatcagcaaaactacgtagaaaaatgggagtaattggccaaaggccaaagcatgcatgaaccgaaccacatgatttgcacccgaggaggttgcgaaatcacattttgcatgacacatgatggccccactttagttaaaaataattaatccttccatttccagagttccagacttccagtgctagctcttcctcgggttcaaatagcgcgacaacatcacgcatcgcctcctacctgacacaccacactgcaaaccactctctcggtctctccatccatccacctctctcgatcgtctcatgagctagcgcgccccgcgcgtacagccccgc

SEQ ID NO: 5973 - DNA, 2000 bp, Oryza sativa
acttgttttgaaagataaagaacgtgttataccgggtattgctagtgggcgggtgatcgcttccctctcctcctagcgatcagtacccctcccccctaaatactcctctttcatctctcttttttacttttctattacatcataaatttcaaaaaaaaagtaaaagaaaattaggggaaaaaaatctaatactctcwtcatgtgcacagactttgtaccgtaaactttgcacgtataaactttgtgtatagaaatatttatatataaaatatttgaatctgaatttgaatttgaatcgagtatataaacttttaacttataaacattcgctctacaaattttaggtggataaacttaagatgtgtaaacyttaaggtgtataaacttactacaagaggaaaatatgaaatatttgaatttaaatttgaacctgaatcgggtatataaacttttgacttataaacattcgcttcacaaattttaggtggataaactttagatgtgtaaattttagatgtataaacttactaaaagaggaaaagaaaaaaaagatcactggcagcgatcgatcgcccgttagccttctcgcgttgtatccggttgagggaagtgattaaagttcaaccctagccccccaggtccctcaaggggattccaacaggccgcgacgcattgtctcttctcgggccaaccgccctctacctatctgcacggttgggccttgtcccgtcgacgcttctcttgaaagtcggcccaagtccaacacagcaggcggagccaggacgagacgagaggcgacaccgcgacagacagacgaggcctcgttcgttgactgcctctcgtctcgcctcgtcttccccgtgcgagcggctgcctacctccccttctcgctgcgcccccaacttgccgcgaagcagcggttgctcccctctcgtgctcgccgccggcttggccccgtytcgcctcggccgcccatccgsgcctcctccgcgggtcgcaggtgagccagcaacctgccatcgtcaccatcatctcccccgtcctcaatttctcgtgtttttttggggatagctcgtgtcagaattggtggtagttgcttcgatctgcttgttgtgcgtgctcgcgttcggggagtcttgatccgtgaacttcctctgcgcgtgtagatctggatcaattgggacggagggggaggacgcgcgcgaggcgggtggacgcggcttccgctactttcatttttcctttgctagtgaaaggaggtttagtttctaactttccattggtacggagactatagcttggtgatcatgcatatttatatatgtttgcttgtatagcaggtcgctcgagtttgctatatttagttcttgttcgtatggtttcctaattttagttttaccactccgacggttgtgagttgtgactgcacgatgcttacacaacaatcccctgtaccatgtgcgtgtttttcttttgcttctgcttatactgattctgcgtatctgctcaatttggatcagggtatcacgcttggaccaagggcggcttctcacagcatgacttaaagtggaaatgaatgcacatttcataaatgattgcttgatttgcagttcttggagctgtgcactattattttgtccaattccagtacatttgattcttgtttgacaggtattgctgcttccacttatgccttttttataagttacaacctgtgaaagatatcatgtacttcaacatatatctttgtgcaattaaatccaagcattcacttatacagaaattcgtggagtcaatctaaactatttctacttcaccattgacccttctactgtcatgttaaattctatgagttacctttcaatattctcttaggtggttctgccaatagttttgtgtatataatcatatttacattagctatcacaattaaactattttgttgataatactttggcacatttaacaggacttgctttgtgcaaccttcctgtgcgaca

SEQ ID NO: 5974 - DNA, 2000 bp, Oryza sativa
atactcctaagcctaaatatatattattttctccgtctaaaccaaatgagactcttatgtctagattcgtagcactcgtttcagtcctatctcattctatgkttttatattacggagggagtaaaaattacgtgtcaaaaccccaagatataaaagataaatgcaaaaaatacgaaagatataggcaaaattacgtaatttatgcaagttgagtcctaagaaaattatggctacactccctgttcgatcaacgattttgttaaagtcaactgatatgcgcggctcagattcaacatcccccaggtggcatatgtggtgtgaggacagatgtctctgtccacatatatcataatcgaaaggaaggaccaaaaccaaccccgagtacccgaccaaccaccaccacatgagcacttcgcacggtcgtccggctcgattatttcctccgcccgcgcaaggaaaaccaacctgtaccgcttcctcgcgcgagccacccaacgacgccgtcacggcgcggcgacccccgcgatccacccacatccgcctcgtacgccgaggcttgcgggtcgtacgccgaaggcgtgcgtgcgggtggccggggtggctgccgcgtcgccaacctgcgagcccgagccgagctgatgcgtcgggatcgcgcggtgcaggtaggtcgtcgcgctcacgtacggttccaccaccaccaccaccacgtctcgctctcgctctcgcggtcgcagcgacgggcttgacgggacgcgctggtcggaacgtggagctttgttttcttgctgttgttgttgtgagaactgagacaaaaggatgctgctcgtttgcgacttgcgagctgccagaatattcacaggttatactacatctacagggatgtaggagtaacttgtactaacttgtaagccctgcgtgacgattccacttgtccgttttctcctgcgtggccccactgggaatcccggcccgagtcacagtcggcaaacggccgcagatcagtttgaggagtcaggggcctcagggcagcagggccaggatcagcagtgccgaaaactgatgcatcgatgcagactgaagcctttctacgtttcgaaccagaaaagagaaaaaaaacagtcgagccagaccaaaaaaatgaactggggaccaaacacaatctttacgcccttacatatcgatatagacaaatcaacaaaaataaaactgcatccatgtgtacgcatcgggaaagaggatcggtgaaagaacgtgacgaccatcactctgcatctggagtgtactcatcaccagctggtaaacaaataccctatgatcaccaaaaacgcggttgatccagcctccgacgcaatcgtattttttttatctttctgaatttttaaattcaaaaacaaatctttttaaaacctattttcaatatttgaacagagtggcaaaataacagtgccacgcacattctgactgacgtggcagcgtatttgaccatgacaccctagctagcatgataagacaaaactgtcactccccctgtgtgcgacgtgtcggtgttattttgccacgttagatggactgtacatagcccaaatgatcagattctataaataagggggtgtttagatcagggggtgtaaagttttggcttgtcatatcagttattatatagggtgggtgttcgggcactaataaaaaaaattaattatagaatccgttaataaaccgcgagacgaatttattaagcataattaatctgttattagcatatgtttactgtagcaccacatttcaaaatcatgtagcaattaggcttaaaagattcgtctcgcaaattagtcgcaatatgtgcaattagttattttttagcctatatttaatactttatgcaggtgttcaaacgttcgatgtgatgtattgaaaaattttagggtttgggggatctaaacagggtctaagtttttggaatagtttctttttaaaattaaaaattttaaaaattcgaagca

SEQ ID NO: 5975 - DNA, 103 bp, Oryza sativa
gycsccsgaaggccgcccgggcsgcccargaastcstgttcctcgttcmaggccaagccagggcgcggcsgtkamsacggaaagggccctcggcggcgaccga

SEQ ID NO: 5976 - DNA, 2000 bp, Oryza sativa
aaatttgcatggttgatttgaatagatcttgcaatgatttgaatataatccagttgcatacctgtaacccttttgttcctcattggcaatgtgcctatggctcttatcccaatttttgctacctttgggcctcataccagggagaaaatggatagtgatatgcactccatttctaatagagattttcttttgggtgtcaagtggcatggtggtacttatttatctcacgtctactaataattggtcagaccaattaaactgtcagttaattaagtacttcgtccatttcaaaaatattctggtgatccaacacatgaggatgggataaacattctgaagacgagtgcaaatagtcaaaaacacagcccgagttgagcaaccaacaagagtccacacctgaatggacctgcccatcatcataacacagccacgaggcctgtgctgattggccggatcttttctttttcatttctgaaaaactagaatggttgaaactaaaagaaaaggcaaaggaacaaacgctacgggctaaggaaggaagcatctggtaaggtataagagagcactcggtagcaggctgccattttcgtatcgtcccctcctctgatacggactccgttttctgaatagtcggcgctacttgtctacatccacctgctctcatcaggaataaaaggggctttgcccacaacttatcctcaggatctaatactgcgccaccatacgtggagtttacagataattcagccttgatgcaaagtactatccaacagagttgtcacggtatcatcgtcatctacttttctgagatttgtatcaaagttgccactgtatcatcgccatctacttttgtgcgacctggggataaaaaggagagaaggaagaaatacatattgtacctcaacaggagagagaacatacttacgtacgtacatcagccagagttggaactgctaccacctgttgctatccaaaacagagaatcgttgctccaaatgcaaatgatttcatttttatgatgtcagtaatactaacaattaacagaggaacagactacagagcccacggccggcgccacagggcacatctgaacaagcgtggagcccatgtgctggacgatgcacacagccatttatttttgttcctgaaaaccatatgcacagccattaactgtaaagcacatataaatacccaaggaaacaaacaatgttgttacagatgtcattgtatagcatggacgtgttccactgttggatgaaaaagaagcagcgtaacatattactcggccgcaaaattggagcggcgcgagaagccctttcggcagcagcatgcacgagcacgacaccgagcatcggccaggccggccccagcaagagcaaagttaagctcgcccagccggcaagcaacacggaacgcacgatcccctgctcacgggtcgaattcgaagcagcagcagcagcagcagaaggagaagcttcttaattcgttcgcgtttaacaaccccatccccgtagacgacgacgaggaggagaacgatggcatggcatggcatccctgtcggcgtgcagtaacacctcactctgctgctgtcccgacgttaacctctcccctcactgacgctaagcacactggcagtcgcgtactacacgcggttagagcgagcttccattagcccccgagaaattaacaaaaagcaaaagcagaaggaaaaaaaagaaaaacgtcactcgcatcacatmacagcactagccgctctctctctctctctctctctctctctctctctctctcctcaccagattctatataagcagctcgtccaaccttgggaggcacccagcagcagccagctagctagctactcctactcagcagcagcagcagctcaggtctctccagtgttcttcgagctatacactagctctcacagatttttgctccgactcatcaagcggattgattcgatcggctgttagagagagaaaaaaggagagttggag

SEQ ID NO: 5977 - DNA, 2000 bp, Oryza sativa
agcccatgggcctgcgcgaggccgacctcgtgtggacggaaaagcgaaagggaaagcgcggatggcggatgacgcaacgaaggggcgccttgtcaacagaattaggggggccccaccagatgtctttgtccaccgtggcacggcctgtgggctaagcacatggtgtccaagggcccatttgttactagtagctcaaaaatattccgtgtaaactttaggtgcaaaggaaaaaaaaactagagaaaatccaaataatgtaattgacaaatgtacgagcctaaaaactgtcatcaatgggtgtaaattctgtaaaatatcatcgtacaaactaatttgtttcataaatgttatcgttgttagggttttgtccagcctgtcctgttaaatacgttgttcatcctataacatttaaaccttaacaatgatagtatttatgggataaagtcaattgtacgataacattttatggaacttacacttgttttttatatttcttagaattgtgcgccttgccaatgatatttattgcattttctcataaactatagtgcacctctctaatagtgactatgtaatgtgtaatggtattgaggagatataacttcttgattttttatagacgatagttaagaggtaagaacaaatttattttaggatatatttggaactctatgaatcaacttattttatgatggggaaattaactgatatcaatcatacgctgtccctctttcaaattcaccacttttgtattttctgaaaaacattacaaatatttttgtttatcatagtctatcttaattcgttgtaaaacgtgaaaccatgataatagttaacattgtcggttatttgaaaatgaagggaatgctagttcgagttggatgtaaattagtttaatgggtaagctatcttaaattaaaatagacgctctaaacgtgattcgtgtgtattgttctggtttgatttgtttcgcacttaccaccaaacttagattatactatccgacacatctgccattggatgctccctctttatcatgtcttttgatgaaaaaaaaggagcacaatccctctctttttacctactcctttttctttcgacgattctgcattctacacttggcagaaaatatatgttatttaactcttttaacattactaacattactttcgacggccatgttttgcacgttaataatggtatattatactaacttgaaacggtgctatgctctgtttaaaactgaagttgctttcggctcgaaagagatgctagaataaaaaaagataaggggggaaaacgttagtacaatgtactcccttcgtttcaaaataattttatttttcatccacactacatatgccaatacaaaacmaaaaaaaacccactttattaaatctcaatgcaattattctctactttatctattcacaatacaattatttcatatattttaaaattctaatacaatgattacttaaaaataaacttatttaggaacaaatggaggagtaattttatttatggaatggagggaatattatttttttaaggggaaaaaagggagaagttaaggatttaggtgggacccacatgttagctcggttggacttaagtcaacgtgccgccttagtaaaaatcgctctcaaaaccgtcccatcaagaaattcaaattataccaatttaaatagttgggatcaacatatccgttatcgatacgaatcagtgtagacctatattaagggaatcaaagtggacttattcgttaattcaatgggccaactaaaagtaattatggccatttgcagaagcggaaggtggaggcccatttatagcattgcacggaaaaggcccaagttaggtactatagcccattccgaagtctatcgctatccacttcgtccccgcgtcgcgtggcccgaagcgagggagcggaggctgctcgccgcgccgcgccgcgccgccgcgcttggtcatctccgccgccgccggccgtcgcc

SEQ ID NO: 5978 - DNA, 2000 bp, Oryza sativa
ttactcataaaaaaagtagagattttaggggtttgtaatcatcccgtacatgattgataaaaagtgtgcatactgttttttttttctttaactattgaagaacaagtagttgttgattgggtaatcaaagaaaagttcagctacttgtcctagcaaagatgaagtagtagtaatactctctggatggtacagtttcaattatttgcatgacttaactgaatgaagtttactctgacagagatacctgttccaattcaaattaatgcaatttatatctaactgttgccaaataagattgaacgcctgttcttttcttatccgtctatcccacataatcatgttaatcatataccaataatacataatctgcatctgtcaaatttaaaccgatcatgccaaatcgattttcttgatgtgacaggtgtaatctgtcaaacttaacttaaaagcctccgaaaagtcacatgcagatgagtatctggctccctgtaaattagtcatgcaaatagcctgtgctcttgatataagtggatttagcattgcttgaactgtggcctttggcaagccagcaagctgtgacatattctatggctaaaacttgttaattatttacttaattcatctacctatttctgaaggtaatgaagggtctcatgtacacgataatcgtgttcagagaacgccagaatgggacggattggaagctagctaaatatctgaaggtgactagtagaaagctgcattttctgaattcatctgtgccaatttacagccaaccaaatgtcccattttcgctcaccgcgtgtatcctgcgagaaccttgacgtttgtggcaaactggcaacctaaccgtgaggcctgccttggctcgtacaccctgacgagttcttctcacaaaaaatgaaaaaaaaagtttcgaattcagcacagtgcatgattggtttcaaatatgtactcccccgtccacgttacaagatgtcttggcatctctatctttcgtgttagattcattaacatctatatgaatttagatacatatgtaaagtatatacgtagatccatatataaatctattcaaaatccaaaacatattataatatgaaacaaatgaaatataaatctattcaaaatccaaaatatattataatatgaaacagataaagtaactttgatagacacaatataatacaaatacactgacaaaactgagtgagcaaggtttggtattagtcatgtgcacataacactagagttaggttaaggtctttaatgacagccaaactctgcagaactttttttttggtttcaagaggatgaagaaacatatcttgacacatgcagctcttaaaagaaaatctaaaagtaacatgcagggtgatgccatgttattaggtttgccacatgcagctgaatgatacggtgcctgcagctgcacccagaacacgctatcaattgccacaagtagatcgtagagataacgcctcatccatttcatatctgaaagaaaccaatgatagatgcaattcaatcaccgttcacataattcattttgcagatccccatcatgaaagacacatgtattaactacatagaggatgtaaaggtgtaacatggatgaatttagagcgcaccactgatcctacaaatagcatgcaaaactacagccgctcaacacaaacacctggcctatttttaggcatcctcttccatctccagagaagtgagccccagcctcatgtcacaagggaagcactagccaccatagaactctctctctttttctccttcctcctaggaggatcccaaatacaccaatcgtgtcttggattttcccaaacacagcgcgcactctcgcccttcacctctcctccctctcacccttccattacatggatcagggagggaggaaggaggcctgaagtggcgcagagtaggcgcttgtaaacaaatccccccatttgcttcttttgcactgaagaatccctgaagaatccagcagg

SEQ ID NO: 5979 - DNA, 2000 bp, Oryza sativa
ttagcgctgattattgttgtttcaactttaactttaatatgtttagactatgaacggaagtttcatagatacttatggctaatatgtaacatacgttgataatacaatctctctaagtactccctctgtttcacagtataagtcattctagcattttacacattcaataaatctagatagatatatgtctagattcattcatatcaatatgaatgtgggaaatactagaatgacttacattgtgaaacggatgaagtaagtatttatagtttttttttattaaaaaggttgtcaaagtgtgaaaatggatggtgctctacgttttaccaacaacaccgttttttctaaaaaaaaatggagagaataataattatttaacattcgagttgggccacatgatgctgtgtcattttttatattttgaaactttctttcagttcatttcaattcatctacagaaaagttaataaacataagagctttggcttgaatcagaataatatgtttgcgtaaaaaacaatcaaaataatacgccagagtctaagcccacacaaacatgcatgtggccgtaaagaaagattgtgttatctggcaacaaacatatccatgaaaagaaaagaaaaaggcaaaacatgatgtatatgtcatatgtggtgctttcatggtattacattcaagaaaaaataaataataaaataattcaatgggaccggtgacacgatgccaaataacgatctaaactgagtaggggatagggtccccaagcatcggcgtctagatctgtgtgagccatgtcgaccctagcgctctttgcgatgcctcacatccctaggagctttcggcttggtcggctgcgtatggcatgcgcagattggtggaatagagagatgatgacgacccggtctagcagtgctaccacgtggcaccaggcggtcggtcggtatcgtcgtcctccatgagcatgccctcctcctcaacaccttggtcaactcctccaccacctcagtccgcctctccagtgcctcgattgactccagtattaatgctgcgaagaaagggtgatgcccaacggatagctctcggagtactcacagctaacaagggtcctttgtgatgtggatggagtggggttcgagggtcatgtcttggtcgcgggctgatgacttggagccctataggggtagacctatttcatgcttctagtgaggtgcggttcggtgccacaaactcacctatgagaaggttccgcattacctgtaaaggacaccaccaccctaatcaagaccatcatgatggtgtcgacaacatggtccctaccgtaggcaatcaccggacatgatactgccgttgtgttcatgctctctgaggagaatgacacgacgagaaagaagaggggagggagggagagaagcgatgaggaggagagagaatgacatgcgggtctcattaactctattgttttctccgatagaattacacatggttcacttattttaaatttttttgtttttatttttttgctggatgtaatactatgcaagcgccacacactccacacaaaagatgaagacccatctaacgtaccacgtaagcatcacatgtgataaaatcgtcatccaaacagtctaatggagacaaattttaccgggttttaatagtcgagaattggaggtatctgattttataacgagagatgaaagttaggttgtagccaaaatagaatttagggcctgtcttaccaaattttgacaggatttcttatatatctaccaaatttgacaacaaactaaacgtaaatatttttttataactttacccaaaaaagtgatataattaaaaatagcgtcaatctgatcagcccctcactttcctcatcactggccccaccgcgatggccatcgtccagcccagcccagcccagcccagcttcgatgctaacaagacgattagattagccgaggtgacgcggcagagagagacagagagagctcgagctcgac

SEQ ID NO: 5980 - DNA, 2000 bp, Oryza sativa
ttagtaatgtacaagtcctcttggaagataaatgaacttaatccaattcgtagcaatgtgtacatataatgattttggcaagtgttagtttctagtgctaccagaaattagcttgagaacatgagttgagaatcgtgtgctattttagacaaatttgttgggaagtttgacctcaagcaaactgtgttgatgttgttcactttctatagacaaactagtttggaactctgaccgcaagcatgaatgggcaaaactgcacaggtttttttttttcattagacacaatgcaagctgagtaaactaatttgtttcctgtgtctactgtcaatatcctctaatctagcatatgtttttatagtctagaaactgggcttaagtttaatctcacatccaataaaatgctaaccactatcttgtatctctagtgcatactgtctactaaaatccagtatctgctcttttattggtggggtttcatcaactgatttctctcgtgtgtccatcttctaactcacttctgttttttttttccattacatatgtataggtacatgaacatgtcaggctgtcagctatgacaacagagcatactttgttgattggcatatcaatgcaaggagaaattgggaagcttgttcaattttcagtgagtttttggtcattttcttctggctgggatgctgcatgaatggcaaatttctgaagctcgatgggcattcgctttgtttcattgtttgtttgttacgaatgttgtatgcagccacttctgtaataagttcccggcagttagatttgcttctgccatttagattttgcgaactttttttttactgctaaaatggctgtagcaaagcaatgcctcacttaggatcttgataatggctcccgtgtttctctcggcaaaatagcactgctgtctgctcctgaatttaatctggatagtgctgctccttagtttaacctggatatgtgttttttgggcctgttagcaagcacggaaagggaaatatttcaacgaaagcactaattgcagagggtgtggatgctactgtattcgggcgcccagcgcggaaaacggttcaattaagtattagctaaacttttgttaagaaaaatgggtcaatatgattttttaaagcaacttcatttcatatagaatgttttttaaaagcgcaccatttcagtttgaaaaacatgtacactaagtgcgggtagttgggaactttaacagacgaaaacagctgttattgtgttctttgttgacaatggattagcatgggcacgcctaaagttattctggcctaaaatataataagttaaagttagttataactcttatttagatgtataggtaaaacgttaatttattttgagataaagggtgtaaattgtttttttcgtgctacaaagagtttacttttataagggcatttccactgtactaatatgtgcaaaggcatctaaatgtcatttcccacgatactaatatttaatttatttatttgtactcttaataattgtcaaaaacttaattttatccatcatcactttatcacaccctaactaaaactgatcgagaaaagcaaactccacttgattacttcatcgtgccgacgtcgacacgcaaaatgtcgtactactgcatcgtcgtgccacgtggctatgcagcggtcgtcgcggagctctcgtgtcgtgcaagtgtccaccgcattcgggaagctcggacctgatgaggcacatccaaattgatccaaagccaaattttgatacttccaagtcgcgcgtgatttgtcagctgttagttgtcacacctactcatcagccaaccaattcgccatcaatagcaaaccaagcggattgatcatctcatctcatctcatcgaccgagcattctagcgagcgagcggccaagccagcaagatcgactcctcactctctcaccgatctagcagcagcagtggtagtagctagcagcgtcagcgtagcaaggggttgcgaga

SEQ ID NO: 5981 - DNA, 2000 bp, Oryza sativa
  misc_feature (1)...(2000): n = A,T,C or G
ggaaacaatcaaacaatggtttgcgtacagaatacaaacagaagacatgaggaaaaatcaaaaagcaaagagcggccgacatgtgaacagtagaacaagtcggtgggcgagacggagaccggaggtggagaagacggtggagcagcgagacgcaccgacctcgccggcggcgtgcgtggcggcgcatgccggtgagccagtggcggcgccgtacattgctcctccccccgatgggccatggccgacgcaggccgcgccggcgatcccgactgtagccgtccagcccattaaggcccaataagagtctttccaatggtggtgagtggtgactaacgaaatttggacatattgactctttcgaaaaaacttatttcaagaatagaccgtgtcaaaatttgttgtaaaaatgaaataattttctcagcactgccaaacctagatgtctctgagctataacacctgtgccacaagcattgatgctaaggtcctatccaatgtatgtgatgctgagctttgatagcactaagcaaattgttagtttttagtaaatttttggcacaatctacttttaaaataagctttctaaaagggttaatttgtcaaaattttgggactaaccgtgacaaacatgccactgtatgacctcaaccatttgtactgatgaagtgctattaggtgtacataaagctcgcgattgtgtgaatttgtagtatggtcatcgattataaagtgtttgtgtgagtttgtgtgtgctattgccgtaagtataataaagttgtgtgtgctatctttaaaagtggattagataataataaggtgaagaaaagaactgaagagacaagatgcgatgagtcatcccttacttaaaagacaatatctacataacctctaagaaaaaagtaggaagaaagcgatatagtatgattaaaaaaaataaaaaaaggtttgtatataagaggttatgttatacgtatgctaccttttaaccgataagtagacgatataactaaagtttaaaggtagtaatactacaaactacagtaaagatcaaagaaccgattatcacattgatggtttcaaagttgaaaccttttggtgatttgaaagttgcacctctcatgctcctaatggctgaagtactccgagtccatttaatgtaattatagtactaatatattctctaatcccaaggactctgacattgcaacgtcaacttaacaatttgtatgcatacgtgtagcagctaacagccacaacaggggcgtttgcatgcaaccatgtaggagtactctactagtgtacgccattcatcccctctcttattttaaacatttctttattgaaacaacactgtttaaatttaaacaaacctacaaacagtttcatcgaagtagacagctacaccggttggttggttgccggcgtgaacgcgtcaaatttggcaaaattcataccaacaaaatttaacagctcagtactatactactactcctaccagtaaaagccaactagaaactgtatnaaagggcacaaactgcgcgtncccgtcctaccaaacgaaacgtaaaacctgtccgccgtcagccacacaccccactgacaaccgggccccactcgcacccccgccggcgccgtcccctccctcccggtcaccgccatgtgggacccaccccaaccctcgccggccacctccccaccagtcagagagacacgggcgcattgaatccgtggcaaaggcagcgcgaagcccgtgggccggcccggctggcacgtgggccccaccaaaccgcttttttttttttttgggtttggtttagtcgctcgcacacatgccggtttcttgtctcgtcttctctcctcgcctcgcctcgtcgccacctccacccccaagggccgcagtcaactcctccccaaaccccacctacgcatttcggcgaacacctcgcctccatggcggcgccgcggtgagtagacgaagcaggcatctcatctcccatccc

SEQ ID NO: 5982 - DNA, 2000 bp, Oryza sativa
agttccctactttccttactattgcatttttttaaaaaataaaaataaaaagggtaaataacagaagagaccaacctggttcgaaccagtgacctcagtcaaaatactctaccattgagctatggaaatggaactgttgatccttattaacgtaattttccttttgggttcacttgggtttacactagtactgatgtaattgctgtttgttttctcattcctcgctgtttacaacttgaattccgtaattaatctgatagaatagcagagaactctgcagctatctgagtttctatcttgttggatggtaccccagaatatgtgcctgctcaaaaaaaaaaaaaagataataatatgtgcaccaaggggttggtgattatagataaccctaaaatgttatttaattttctatgctgattgcatgctagttggtatttggtagttcaatgttccgagcacacacacctacttccttctaatcctgttgtcttttagttgagcaaacttccatctttatctgccttaaacgagtcacatctttctgaaaacttttgtttactgctaactaaagctcctaactgacaatgatatttggttctttcttgtggcaggtcgcttgataagaacatatcaggtacataaatcttatacatggctatttattaccactctaattctgtggttcatgtacatgcgcacaaggaagtttcatggttaacattcccttctgcattttttacatgacaggcccaccagcaacttgttcttatgatgtttactgctttggaaaggtgatgcttgaactagtaacaggcaactttggtgtaagtggatcaaacgatgctgcctccgaagagtggatgacaaacacactaaaccgcatcgacatgaacgacaaggagagcatttctaggatcatcgatcctttgcttattgtcgacgaggatcatctcgaagaggtgtgggccatggcaatcgtcgcgaagacatgcctgaattcaaagccatcaaggcggccttctgctcggtacgttctgagagccctggagaacccgctaaagattctgcgaatggcgtcccgctccaattcagcaagactcaggagctcatcaatcccggagctcctggcagtctgctttccttcaaggaaaccggtaccagagccttgaaaccgcgtcgtcgtcagggcaaatgcttgacaggaaacattcaactagatcacatggaagcggaggagagacttccttctccttcaagagggcttccagggagattgctccggagccagaagggttcgaggagaatgttgtcgtgtagaactgaaattacaccggattctttcgaagaatttgtgattcattcatacctgtgtataatctgatcttctgatgagcatgattcggggtctcgaagtgagaattgtgcatatagagaagttttcggggtttttatttctcttttttttttccttcatatgttggagaattgttttggtttactgaacgcatggtacttgatgttctcattgtgcacataacatttacccttttttttcccttatcatatcaagcagcaagctcttttaccgtagatgttgctactttttctataaacttagttaaattttaagacatttcacttagagcaattccaaaatgtctcataatatgaagtggaggaagtagtaactacgatttgtcgcaatcttagtagaacaaaatcaatacgaaaaaatctggcatatattatgccaagtgcagtaatccgcatttttcttctggtttgtgtgatgtgatgcagggactattttgaaacactcctacaagaaacggggaccaagttgtaaattgtaggatgtaaatagttggacctctaccaacgaagcgatacaaaatactaaaatagggacttaaatgcaaaacatcctaatcctctacgggtgtacaagcagccgtcagatccacaatcaacggcccagattgatccccttaactaccgaa

SEQ ID NO: 5983 - DNA, 2000 bp, Oryza sativa
tataccaaacaaaaaaatcatttgtaaaaaaaatactccctacatcccaaaatatagcaatttttagtgggatgggacgtatcttaggactacgaatctgaacaagaacaagagagagtacgtagtaggatacgtctcatccaagcacaaattgctatattttgggacggatggagtacgtactaacacgacattttaaaaaattcctaaatgaaaaaaaagtgaaaaagaaaaggagaaaatggcattatcgtaaataacccgtcaataccgagggcataatcgtcccatcaaaaccctcccctctcgagaataaacgaccttcccctcgaccaccctcccacctcgtcgtcttccgcgccgccctctccctcctccaccgcctccgcctccgccttctctcgtgccgccgatctccatcgccggcgtgcggtgcaccgagatccacccgagatgtggcgcggctgcgtctcgcgtggcctcaggagcctctccaagggcaagggctcctcctcctccgcccccgtctccgccgccgctaggctcttctccaccgcctcggtagtcccctcgatcccccgacctcagttgatccgcgcgactgtgtgttcggattgttttgggtgggattcgatgagctctattttgggatgggatttatttatttatttatattttttttggctgcttgtggtggtggtggtgtgggagtttgatttgtgatgcgatgagagggtttggttcgagaaatgggcggcgattgatggtattggttttttatttgttgatgtgcagtcgtcgtacacggtggtggatcactcgtatgacgcggtcgtggtgggagccggcggcgcggggctccgtgcggcgatcgggctctccgagcacgggttcaacacggcttgcatcaccaagctcttccccacgcggtcgcacaccgtcgcggcgcaggtactgtgaaaaacttgctgcaacacctttacttaggcttgcatttagtgacaatagatttgttgtgcatcatgcaaacattggttgggtattgtgggaactgagatgctggttgtgatgtgctttcattgtgtttacgatgatttatgttggatggttagttttagaattagtttgatgtgatgctttatgtccatttgtgatttatgtgctaagtaatttccatctgtttaggttcatttgtcctatggtatgctttttgtgtactgcgcagtacgctaaccaaatcagtacaaatgagataaatatggttaggtagtagctaaagtactagggccagtttgagcatagctccctttcatcagggaattcactgcacaccaatggtcaacagaaaaaaatgctttgtcaacagaaaaggccagttattttattgcatctgctcttgatattagcactcagtgaatggacgtgtcactaagacggtgtgttttataatcaacaatcattttaaaggaataaatacagtgtcctggacttttagtcctgccattcttggttgtctgttctaaactttctatgtatttaagataattttgaagagcagttgttctgtttctctggcctttaagtcagatatgcatttcacagtggattgttatgcagatctgatgtattccttgacttgcgatattactgttaccgatatcgaagctatacatataaatttttaattgattaatgcctatattactgtcctacctagttattttgtgtgttttgcatgtttgaatcttttttgtgcctctttattttttatactttttgttgatatgagtcattcagcaacagttgtttttggtatgtctaaatgcctaggttaacatctaaacttttcaattttgttggttgatgtattttgctccattgatgttcatcattagagccttctcttacttcttttattgttctggtatgtttatgagcttcattcacgtactaatttacaagagtgtatgtagggtggcataaatgctgctcttggaaac

SEQ ID NO: 5984 - DNA, 2000 bp, Oryza sativa
acgagttacggccggcaggcagcatgttcaattccgttctgccaagatcgatggcagctagtgacagaggaaatgaaatgcacctccagttgaatagagttaaaagggcaggtcccggtggtcttgaagcagtagcagtacacgcccctcgtgtgatcatggacgcgtttcgtgatttcatctgctactgctagtgctagtgattagtgatagcttaattgaggagctaagcgccattggtggccagcggcaagggcatccataatgtggattaaaagtgggtattagacattaaaatatctttactactgggtaagatacatcgtggaagtagtaaatagttactattagatcatatagctactaccgggcaacaaagaataagttatgttatttgtacagtgtcaatgagtatcaacgaattgttttctcgcagttggagtcatggcagctgatgattggtgagtttttatagtgggccccatgttataccctaccgtcctgcacatacaatgtggagttcatatgctgctactaccgcctgacgtacgggcccacgttactgcctaactcggtcataaacattgctgttgcccaaaatgcagtaaaaagttcgggactcattgggttctcgtactacctccgtttctaaatatttaacgctgttgatttttttaaatatgtttgaccatttatcttatttaaaaaaaattaagtaattattacttatttttctatcatttgatttattgttaaatatactttcatgtatacatatagttttacatatttcacaaatttttttaataagacgaacggtcaaacatgtgctaaaaagccaatagtgtcaagcatttagaaatggagggagtattttctaataattcaaaacggtttattgagaaatacaaattaataggtaaaacttttacatatttattcgtaatgacttaaacaccaacataaaaagaaattatattaaaaatataaaatcatcttctatatatttattcgtaatgacctatttgttcccgctcttcttttgtgtggttgaatgatataaattaagtccgaccaatatttaagagagttaaattggactttttccttatctgtgaaatctgcatctatctcatctcgagcacagttggttctgctgatcaacaccgcatcagatcagatgcaggtggtctaaattgctgagacagacagagagggaaacagacaaatagtgcacaagaaacagcaagtgaggtgtgattactcgatggttggtcctcaatttcttgatctaacgttccaaccggtgcaacaagaagtgaaacgctatttattactggagtagcaacattcagagacttttccttattatggagtaatattacatatggcctttaaataagttggccgggcctgtttaaatcacactaatcacctggaatattataagtacagtatttttaaaaatcgcgaaagtgaaacacgcccagcagaagaacctcggtatcttcttcagatgttttttttttttttttttttagaggaaactatcttcttcagatgttcaccctgtcttttcaacacctgccaccactatctgccgacgtatttttgcataaacacgagaaagtctccagaagaccagaggatgagcagaaacacgagaaaaggtcaaaggcggaggtcagcatatcgctcatcagttctactccgtagtccgtagatgaacaaacatgcagattaatactcgtattagatagcagagagactctttccatcacgccaagcctgggagcaatttaattccgcgtaattttcgatttcttttctaaacctgaccgcgtcagtcagtgtagaccggtcgctgtttcagattaattagcctctggttcttgacctgaatgtgcgtggaattgcagagaactgcaagttttgtttgctacaagtagtaggtgtagacttgtagtagctgtgttctccggctgattcggccgccggcg

SEQ ID NO: 5985 - DNA, 2000 bp, Oryza sativa
aagagaggggcaccacaatgtaactatgacgactacaatgtagcatagacacgtaaggagatgatgacagggtggccatgaacttgtaatggctaggtactatactgattggggaggagcgcccataatcagatacctggataggggtgtgcagaaaaagaccgagaccgagaccgagaaatttggtcatcatttcgttcctaagtagtgaaagaccgaattttgttcggtcaattcggttagtctcctcggttaaccaaatagactaaattaacaaaaaaatgtctaaatgcaatctacaatccactaagttcaataggatcaaactctaattttcacatccctacttcttctaggcatgcaacctaataagagtttttactcatacgtgcttatgattttttttgtgatttttgtgttggaaatttccattatttctttgcacatatgaaaatgttgctgaatttcagtcaggatcgagaccaagaccgaatttgtcggtcctgacatttctgcgttgaaattcgatcttcacttttcaaagaccgaaatgcctgaaagaccgaagaccgagaccgaaaatttcggtcagaccaaatgcccatcccatccctagagatgtaggcttcgaataaacttcgttaataaaaattatgtctttctgtgtcgttatctaatgtgtcttagatgatcaatgactgatatgatcgagaaggttagtcgtcgttccgttatattgattggcccttataataatatgtaaacaccctatacgcagccttactaattagctagccttcaacatcgtccttaactctctattatatgccaaattattattttaagatttaatataatgtgtgaaattggccaggaattgaccatatagattggcatgaaaatgccctacatagctgctaagaatttcgtaattaatttctmcacatgtaaaattagcaaaaataatgatataggtagagtattcaacgcccatatatgttttgccggagatgaggtatattacaaaattgcagatgggtatcagatttatgctaagttggataagagagagraaaaaacaggccacaaatggctgtattgtgatggtcacacatccaatggcttkcgcccaaccttgccgcacaccagcctccagctattgctatccagtcccgctccgctaggccacctgtgsccctgtgccgagcattgttgcttgagcaagcgcgcgcgagagagagaaagattgaggggaagacaaagaagggaaacgaaaggagtggagagagaagaagaaatagatatgtgggtctcacgtgtatgggtattttggtctatatgatgacagaagacgtgatggtgatggcatggttctaattttaaaaaattctaatggcacccaaccaatatcgcggataataaagatttttctaatatagtaaatttgtagtaaatggatggatcaaatttaccctagattagttgcttcattgtattgtctatatatagttgattataagccataacacttattagaaatgaaaataatttatcgataaacattttatatatgtattgatagtaaattaaaagtcaatactggaaaaataaacttaaaaggaaaatcaaaatcaacgctaaagttgatttctaaaatttagattttggtttgacagataagcaaaacacaaaacgatggagctctaagcatatgcttgacatagatatttggctgcggcttattagaagctttggcatgaggcagtagagattctccgggaaaaagaaaaatcaatgcagcattttgagctagctagctagctgaggtggggcatatatataagtcgccgcattgtgcagtactacatatcacaatatcacatggctagctagctgagtatcgatcagtcatctggactggtctgtacgttcgaagctagctagctagctcgtctgagaagaagaagaagatctgagctactccttctaattcgatcgcc

SEQ ID NO: 5986 - DNA, 2000 bp, Oryza sativa
tatctaaaaagtattcaaacttcaaataaaatataataaaaccatatataatgacaaaactggtttttttacatgaatgacaaaactgcttttaaaatgaaaaaaagttacacattgcatagacctgtaatatcaggattaacaatttgtaattttacctgactgaaaaatagcaaatttaataagcgtttaaaaccataaaaatattttttataatggaagaaatttccatctgtgcactaactatgatacatgtatacaatcattaaattgtagcaccaggattaaacctacttccttcgatcggttttagataaagttaaagtcagacttttataattttgactatcagttattttaaaaatatttagtttaaagtcataacaacatatatagatttgtcttagaaagtactataataaaaataaaaaaacttctttattgtatatattatcatagaaaaaaatagtcaaatatatatatcttggagaccgtatcattaactaaaacatcaaggaaccagagggagtaatatgtgaagatatgcacccacaactccatatgcgcatctagctttcttaacatgcataatttgctgcgccaaattgctgtaatagataatgtgcatgatgggcacccttacaataaaagataaatgtttacttttcttaagaattcaaatccacgcgtgttattttaagaaaagagaatattattcagaataaaactatgatcatcagaatgatcttacagtcgcctctgatgcaatatagaatcaccataattcagaataaaaataagagagaaattaacaaatagatttgcacgcaattcgattmtatatcagctagctgttagtgatctagtataaattaattagtatacaagtcaaagagataagcggccggtatccctacgtatacctttaaaaaaaaggtcaaaaccattatgcatccgctctagtattaaaaacatatcaaattaaatccataatttacataacaaagtcagggaggcacttatgactatttacaaatgcacaaaaatgctttcacattttcaaaatattccatttagcttctaagatcaattgctgcttgcttgaaattatgaggtatacttttctaactggtgattctttttgaggaataccccaaaaatcaaggaaactaatataaataaatatattctgcatttttaaaattgggagattttacaatggataagagtaggacttctgtagtaaaaacgcattgtaataaaataaaagagaacttacattacattttgctgatataattgattaaaaggtttagattgttttgtcctctcagtaaaattaaaaggggtaaaattatcttcctatactattgggtggggggcaattccgtaaattcagagtgtaaaccgcgctaaactttttcccgctcgatcccatagctcgctcattccccatcatctttcaccagccaccgcgagttcatgtgtgccgtgctgtcactgccaactactgtacaactgaatgaccgtggcctgcgaggcactaaacccaaaaattattaaaatacctttttttatatggtgaattactgatgtgtccttgtttatactgacattatatactaccagtaaattatacagtaaaagtgctcaaacaaaagggacatatatgaatggacaaagctgtaaatttcaccttaggaatgacaaatttgatggcaataattaccaatggcatgttcatttcttcttttacgcgataacattagaaaccattcaggttgaattttccaagttgtgttcctcttgaatttgtgctccacgatattcactcagaaacgacaaagagtcagtatgctaaaaggtggaaaaagaaacaataataaatagagtggacacagatcctaacctgcgagctccacaaaagaaaccattccgagatcgatgctagtagtgcatcactgatgagcaacctcacacaaggacagatcaaatcatca

SEQ ID NO: 5987 - DNA, 2000 bp, Oryza sativa
tttttaatgataaatcgagtaacaatgctatctataaatcgatagaagatgacgtgtgcgtgaaagacggcgagccttacaatgaagaaagaagaggaatcaagggataagatgcaatgtatataaatggacattataattgaacttttggctcctttgttacaagttgaagcttaatttcccaacaacatgccaattaagctttttacatggagaaattttgtaattcttaaaaaaataccttgagctacctaaatttatattaaaatctttgttatattgagataattaatacctgtaggtaccaaaatttatactagaaatatggtaatttctcaaggataataaaattaccttttacatggtacctagtgactaggtttctagctatcaatagtttctcaatcgttagcctcacccaacactaacttttttttaatcttagaataaaacaacaaaggctcccatatggagaaatgtaaaattacattctaaaatgtaaactaagagtcatagtaaaattatattttgtacaatattcaataattcaatgcaagttacttcactaattttcatcactcgcactttcctaattccctgctataaattttcaggggcctgaagtctagcaaatcttataaaattaacaaataacaaaacaaacttgtttatttgcgtgctgcttatgataatgatgaatcatgattcgatcgagtcggtttcaaaggtacggagtgacaatgatctgccaagattttacagcaacatggtgggtcagtaaatagttgttttccagctaccatacaatacaagcagtcaattaaaatgtccagattttaccctccatttattgacagagatggtggtgggccatctccatctctctcaaataagatggtgattttttttaatttttctttttgatatggggttgggtcactgtagtggtagtagtggcaccacgccgcagagcaatcagacacgcacgcatataaaccccatagagccaagcacaacctgatcctccctatttcagtcacgttccctattacaattagtagctttcgtccttttgccagcttcctacctagctactctcttcgtcccaaaataaacgaacataatatttaggatgatatatttagaactataaatctaaataacgtagtaccagtacatttattttggtattcctctgtttgaaaatatgcttcacagtcgataataggctgttactccctccgtttcacaatgtaaatcattctagcattttctacattcatattgatgctaatgaatttagatctagattcattagcatcaatataaatatgaaaaatactagaatgacttacattgtgaaacggagggagtatattttaagacggaggtactagctgcctgcacagaaattaatcaattactaattacactgaaaagcacaacaatttaatgttaacatgattcctgtagtgctgccgcccaaatcaatcaataaatatatacttccttcgtcttcatctcaaaatataagatacaaccgtattttttatgtctcacatataaggcgtgcgtgcatgtatatattaattatcacctcttagttctttaaatttagtttaatttatttcctgtaccattaagtcttccaatcacactgtttacatgtatggatataatyatatyctttattbgatctctatgttagaagtggttgagccttatattttaggatggaatgagtatatatacacacaccaccctgaagctggaggcttgcagtgagtcgtacaagtgtagaacaacacttgtgctacctagcttagttatctcgttgccagctgcacagttccagcttcagtttcagctagcgctagctgatccactaatcacatcactgcgtgcttaattagctaggattaatcgattcatagatatctcctacaaattccaagtgaaacagcagcatcagcagtggctagctgagtgatcgatcgatc

SEQ ID NO: 5988 - DNA, 1518 bp, Oryza sativa
gggggggggattatttgggagggaaaaatgatttggggaaawgctgtacactgtaccgtcggcgctgctggcacttgaaggcggtcacggccactcctccaaccgccattaatggagctgctgcccagctccatgtaaatgtatgtatgctctcctcctccatgctgccgcgtgcttcatcttcttccaaattacctttttttattactgtttgtttgggaggaagaagaggagagaagggcagctgcaatgctgccttatctcacggggtgatctagctggtccaaggtgcatttagcagctacaggtagcagttatcgggcactgacgagcaaggatgtcccaccccagtgtcagtaataactgcaatgacaaatttggcgcttggggttagattattgatcgtgttgtcccggcattgcagtgtaggagaaagctttgaaattttcaacactactgtatactagtaacttggaagtacatgctccagaaactttcatactagcatgtggcgaaattggatggggttatttaatccagaagctttcccttgttaagtaccgagctttgattgtttgttagtagtagtaattttctcatggaacgaaacgcttttgctagccacattaaaaacagtgttgtcaagcacagtgacggaatcaccctataggtactccagttatctacagattgtcggaccacgtcgcaacaagggagagagaacgagagatccacatgcgcaaaaacaccgcagtactgatcgaatgaactgagacccacacaactgtttactgcgactccactgtctgcacgtacgccactctacacagtacgcaccgcatctcacgcatgcagtagtagtaactgatttgactcgtgcgtacacgcatcgcagtgacaacagactgcttctcttcttcactgcgcgctcgcgtcgttggccgccggcgcgcggccggaataaatgaagtgagatccaccggggccggccgtctggttaattaagctgcagatccaggtacgcacagctgccagaccagtgacaccgacgaaacttcactgcagatcactcgttatctcactggtcgacgacggacggacgtacaggtaacttctgcttgatgaccgcaccatgcgcgaatgtgtcctgatgttgaattggtttttaagcgagaggacacacggccatgcatgcacgttactgcaattcaatgcacggtttaaggaccaaaaaaaaaaaagctagagtatcacaagctatggcactaccacttgtactagctggagtagtacggacttacagtttactggtagctagcctccaatgcatgcatgcacaattgtgcgccccggtcctgcaaaagttagccgccggtagccctgccttgcacctatataaactcctgcgtgactcgcgctcctcagggttattcgagtgatcgtgcccacatatctcccccttcttcctcggctgtgtgctctgcaagtgtagctgctgctagctagagcagagcagca

SEQ ID NO: 5989 - DNA, 2000 bp, Oryza sativa
gtgtttttctcgtatttttcaatcatttgttttatatgtgcattcttgtcagaatcttttgtttttcctagtcctgcatttttccattcctccttttttttcctattcctacgattcaaaaggcccataaagctcaacatgtaaacatagtatttattatcactccaaaaacctacatgcaaacatgccacatcaacccattaagcacacaaagctcaatatgcaaccatatattaattatatctacaatttacttcattctaaaactaaacatacatatgctagatcattattcttgaatcattttcataatatttcaatccaaatcatttcatcatttctctattatctaatatatatcccgcagtaaattgcggggcatcatctagtttcttttattatcaagactaaagaaaaattaactcatctctcatctcccatgtaaaaaaagaactatatacttacatacataaatattaagacggctgcttgcttccaatcaattattttagaacatgcagactaaaaatatgatcatattgtaggatcgaaatagcaagaaactaaaccaaccagaagtgattgaatggttgtggtaccaaaaactgaaacttttagcggaattaaaggttaccctcaaattcgacggtgatcggtccaaccggagtagatgcgccggtctaaccgctcaatatcctccggtctgaccgatggagttggtccggtctaaccgcccaatgcgccactgtctcctgttgccgccaccggtttgaccgccgggtatctattggtctaaccaccgattagaccattgaacccgaacaaacacaaatcgaacatctctcgaagtaaattgaaactttattacttctctttgtatttacaaaatgcaacaacatcactcatgaaaatctcaactaaactcgaaaccctaacttttctctaaactcaactctctcaaaaatcaacaccaagaggctataccctccctctctatttatctgaggtaaacagtctaaagccacgagccaacctagtacamsaagtcctaatcccttagaaaactttacaaactccaattgtactaaatttggactccctccaaattcgactccgcattccatacgcacacaatatctcccttgtatgccatatagaattttcaccaaccacgtgcattgatctttagcctaagcatcccgcatgatatcttgatcatctggacgtcatcttctcccaagtcgactcccgatccatcaccgacaacactcttccgaagcattaagaatcacctacacatgcatcaaccaagaaaccatatccgagcacaagttctcaccaacttgactcattgttaagaagcaatagtattacatacacatagtatccatctagaagtcataaacatgaattatccacgtatatccaaacaattgaccataaaccaaaaccgacacaacatcagccagtcagactacgtgctggctggtttgaccgcacatataccgccggtttgaccaactaccacaacccggtctgaccgaatacactgtgtcagcagtaatccctattcatcacctaaaaattctaattatatccaaaatcacttcggtaataatctccaaatatcaaaaccaataatctcatataccaatagttcatcacaaaataacaatcaaacacgctttggttttacacatatattttggaaaaaacaaaacatgaaatattcttaatacttttgaatggagggactaattaccagctatcagtctcctagaggaaaaaaatgattatttgatgttatagagattaccactttgattatgcatgtgatttgccattttacagattatctcttttacgcatgatccgacccaaaatctgaggtgaaagcgatggagaggagtacgttctctgagcttcatcaagcaaattccgccataaaaaaccgcgcggcgccacgtcgcgcgcgtcattggcaacaactgggctcggca

SEQ ID NO: 5990 - DNA, 2000 bp, Oryza sativa
ggtgaaaaagttagagggctgaaggaggaaaaaggagatgagtccctttaatcttatcctggattcgctctcgaaggttaataattttaggttagaaaacgtgtcataagcaagagcatacatgaatcatgctcatatattctaagaaactttggagttgatgcaaagatgaaggtcttcaatcgtcacctccttcccccaaaaaaaaacctcttacaaaggtgacttaggttaaactccatctttatgtgaacttcttaataattaattagacagcatgtcaatgatgatgagcatctcatattatactgttgagccctagttaaagaaacgttgcaaacgtggaggggccacacagtgttttttttttcttttttttttgaaactggccaaaacagtggataagggcatcgatctaggacaatgatacagcgttgccgtcttgcagacatatatgcatgtggagttaagtatatatatagtacggtacagcttaattcagctagctaacgacgatgattatttagagtaacacacagattggttaattatatgagttgatgggtacttgtgtttgcattatgattttgattacatttatgtcacctcgtataataccggctgaattaatgaacaacttacgtataccgcaaatggggaaaagaaattgaatcagtacgtacgtagtgtttttctttggccacttgtaatcgctgttgcaaatagtttgtgatttccaatggaaggcagagccggtaaatggtcttaaaaaatcattacatattgtcaacgcaattataataagtgtaacgacggaaagaaagaagcatgtgatcgaacttgtgaagggtttcatatttgtatttgtattgtacacaacatataccaggatataactatacctatttaattgattttatcacactgaacacatgataaagcacgaaaatttaataggttacatatgcatgcttataataactaacaatttgactaaaatgatttgctaattactattaaatggttatatattatgatgaataaaagttttatgattatatttataacgctacacacactcgatgatataacggagggagtatatttgaatacctataaattttcataaaaaaacaagtggtcaaaatttaaacttgaatagtgttattaccaattattcgaaaacggagtgactatatatcatatatatgtatggaaaacggctcaacaacatcctaagcatgaaagcatccaaattttgctcggttacacatcaagtgatattataacatgtcattaataaagggcattatgcaactaatatcattttcaagctgggatgaaacttggtgtgatgggtcacgacctccttgtgcatgttaattttgtctctatataatcgagcaaagattatcttttttgagctaagaaagttccatgtcttatcgtttgacgcacagcagataccaacaagagttggagctccaaaacgacggcatgcatgttctgaaaggccatactacttttgattttgtgaggattcatctcacatgcacgcactagtttaaaaaaaaaattgaaacgaacatgtgtatgtgaaacacatgggttaatatatttcatcaaccttgaattttgaagtagaagaaaatggagttagatgatgtcaaactgcatgtgatctgtgccctgctttgtctcgacagtcaacaccaggagctgagctgtacaaattgggccgcacatttcatgggccgggccgggagaagctaaaaggcccatatgggcccacaaatgtgctgttccataaaaaaaataaatataaattacttgtaataataattaaaaaagaagaagaaaaagcgagataattaaaggataataaaatttggcggggagaagccacgaccgttcgccggcgttgcgtctcccgccgcggtgacctcacctctcttcctcgccgccggcggccgcgcgtccatcgcgtcgccgtcgccgcc

SEQ ID NO: 5991 - DNA, 2000 bp, Oryza sativa
taaataagtagaattaataaatatgattaaacatgtggatcggataaattttaaggaattttagagggatataaataattatatgaaaatcctataaaattaaaattcatgaatcccaagggagactttagagctactccttgcagtgaacaaagcttctactgtatgcctactagcatgtcttgtgcgcatttacttttttgcgtggaggtttgtttacttatcatggagatgagctggtaattccatttactccctaattaaaatctgatttcataattttactgcctttagactattcccaaccaagacactagacatagttttcataaactctacatcatcaaaaaactagtactatacattaatctttcaatgcaaacaccactattccatacttaaatttaatgttgcttatctcacatgatgttcttggatgttatgtagaaacaatgtctcttttctcacgcaaagacatggtttccttctcttttctcatttatttacttgtcacatcaatttttatcctatgtggcagcttatttaatgttatggacaccattctaatcattgggttgggaatagccataatactactttgcatgtttatattcttaattgcatgcatgcttcaattcatttgttcctctgtgtggagctgcactttcaggaaaaagtcatcactagatcatctcagttgaaaatcttgttccatcaacgtatcgtctgacagtttggaaaaaatgtagtagcagcttactagctagatttggtcaaaagactttaacgtcacaaaaacaaattaagtcatacaaacagataattaattccactctcctccatatcagttaatcaatgacatttgacactttccagaccatattctttacctaaaacatctaacagttttttttttcatcgagcaatagaaatctatccaccagagtggtttcttagcttcatctcgatcctacaaaaccaaacttaatcttcttttagcacgcattccaaactactaaacgatacgttctgtgtaaaaaattttatatgtaaaagttgttttttgaaatatcaaatatatccctttgtcaactttgtaataattaaaacttaattaatcatgtgttaataactttctcgttttacgtgtgccaacttaatcttcatattcgtccgttccaaacaccaccttaaagccatgaagatatatagcatggaagaaatagtttacttatagaaatcgaggatgctgctagcgctttttaagacaaaatatatataccatttattgtttattatcatctactaggctgtgtttagatccaaactttagatccaaacttgtaacttttttcatcacatcaacctttcatacacacataacttttcagtcacattgtatcaatttcaacctaaacttccaactttggaatgaactaaacacaaccctagttttctgtctgtatttcttttcagatgaagtataccgatcatttccatagtcatctaccgctatgtactaatgaacatgtgctttaaaaagtttagaaagtcaaaagaaagaagctggagtagtcttgttttctcatgaaaccagctaaaattcaatgcaccacccaaacttgaccactttctcccatctcatccaataagcatcaaaaccttttcacctccatcaaaaataaaacccacccttctcacctctttggttcaagcaaaattgtgacaagcctcaacaaaaaattaccttctctcaaggtgcaaagctgtaaaaaaaaactgagtaaaaaccccattttacccttgttcccataaagcaaagagaaggggaaaaaaatgttgtgtgtgtaagtaaagccaagagctcactaaacctagttttgcccaaaaacccagagagaggaggctccaaagcaaaagcctcactccctttccccatctcctccctcctcttcgccatttcgtcgaacaccttctccgatcgcgcgccgccgccgccg

SEQ ID NO: 5992 - DNA, 2000 bp, Oryza sativa
ccggttttgtggtgtttttgactggatttgtagcttgttttcttattcttctgttaggaatgaggcagagttcctgcccttcgtttcaaaagcaggttgaactccagggagaaagagatgacatgcagacatttttatcacggtaactggaacataagaccagtaataaggattagctacctctctctttcttcatgcaatcgatggtcttttctgttcttctctgtatacctaagaaacattgattccatatgaaccttatagatggaatataagaggcattgtttttgcaaattcttctttaattgattttttttaatatcattccatgcatttttatcagtaaaaaaccttgaattttggaacttcttttaaatgatacttcctccgtttcatattataagactttctagcattgcccacattcatatatatgttaataaatctaaacatatatgtgtgcctagattcattaacatctataagaatgtggacaatactaaaaagtcttacaacctgaaacggaggtagtattaaagaaactgaaactgggatcatataaaaataacccccagtataattaattaaagacagatcacaaaaatattagatcatataatgtattacgtagcgctataaaagatcaagcataatcagtgttagcaaaccaaactgtagttctttacacgacatgatattacttgttaatttgttctgacattagcttgacaacattaatacaaacaaacaatggatatgattactatggtaaaacagtgaatgggaactgtcaaggcagggagatgaaattatatgacatggtattttcaattgtgtgttatttctatttatgtaactaatatatttctttgcagtatcttattattgcttttaatcactgatcgcacatttataatgctcacaactcagctagccaggtgagcaatatctgcaaacattaacaccgttcatcgtaaaaggctgcaatcatattcatttctgtttctttctgtcttttgtaaagcaaagcttcaatgacctgacacatccttccatttctacgtctcactgaagcaatgacttggtagttggtattctacaagacattcgcaattcataaattgttctgacttaatgttcaactatttagtcctttcatttaaacctaaaaccaaaatagaaaccatacataaatcaaatatgcattagaagcaggcattagtaaaaataacttgcactctatatatagttagctaaaaacaagcactagcagtgtttgctaaaaacaagctgcacaccatctataactgctcaccgaggtaaatctctagttccagacatttttaagccaaatagccaataggcccaatacagatcaaccatcaaaccccttgtgctgggctgctaaaacaacacatacctctccagagtaccatactagttatctacaaataaaacaagttaacacttaatgctcccctcctatatttccaacccagagtccaaatgactttaagacgaccgtcctatagtaaacaaaccaggaccttgaccatcacacacctcaggggggaaaaaaaggagaaaagaacattgctttgtttaccccatcaccaacctggatttggtggcatgggtggggtctcatcaccgtggagttattgcagttttcaattcatgggccatagtcaattggaccaattgttaaactcacccccaactgaagtcatttgtttgttacgttattcttgcatctgttgatcatggtggagctgtgcatctacctgtacctaagtaacttatacggttacactggaaaaagctgtcacaaggccatttatgtcatgataaggcatggaaaattagggctcataccttcataccatgctaatgatttatagcttcaactcgtcttcctccattctccagctctatatatcattctccacacccagctgccagctctaggcttctgctagatagcatattgcactactcca

SEQ ID NO: 5993 - DNA, 2000 bp, Oryza sativa
gaagcctttttaggccatcagccacagccatggccgattggccgtcgtccttctccttctcattctcctactgcttctcgtgcaatggcaacatcaagagacagcatctgtacctgcagccaccaagtttgccgagagagaggactgagagcgacttgatcgatcgtctccagattccaggccttgtttcgcagcgtccatataatataaaatatcatctacttgttctgctagctgtttatcacagatgcattggcgtttcttatagcatctggttcttgtgagcacatacactggcagggcatctactctacactacagtactatactctagtgatcaacaggtgaagtgtcaattctttcacttaatcataaaatcataatgctagtgtttctgttgggttttaatgctgtgtttggtttggaaatgttaagtcttcagagaatacagcaagttgcattatatcattcatgttgcgctagagttgctgatagactgtctgcatgcttgcaattctttcatttttggggagcatggttgacactatctgcattacagttgttctttttttttttctcctttttattggagcttgatttgacaacacatcatttatgtgcgtgctccgacatggagagcacaccaacagacaggggaacagggaaataaaggagggtagtatgatgtgctcttctatttgaaaaggtcacactttgactggttgcatcattgtttaatgtctccttgtttaaataactggccctaagctttgttgatgatcaggttggatgaccttttcagcagttggttacaaaccatttgtttatcacgccccaaaattccctcttcagtttgcatgcagcttccttaaggaaaaagagacctttttatttttaatttgaacaagcacaaacatatcgttaatcatgagagcatttagtgtttacacaaagcatcaatcaaacaattgatacaactctgatagtatttccatagatgtctgcatcaccggtcataatcccttagctttgcacacatcaaacaaaagaatctgaagattttctctccctgtacaatatacgttgctgaaatttgcaagccatgccaaaatcaccaatttgagattttctccactaattcttcctttcccttctatccaatatcttccctttgagccaagttgatatacaaaaaaagataacacctacattttttttcttacaataaacccaagaatgttatacatgcacctacaattcattgactaggattgtgccaagcctggccagatcaaaccatgcatctgcagttgtctcacctaaccagtggtattccctgtccccaacacccacaagaatacaagaacatcaaatagcaagcaagaatttttagaaccttcatggccgtaggagtatttgtttagccaagtcgttgtactgtttgctgccccgggcggcttggctcttcaaacacgcgtgacagcgacctgtaccatctccctcttcccctttcttttatctgtctcctttgatttatatgccattgcctttgctgaacagaaaagctcagacagacacagagagatcgatatcaacatgctttagtccatacacggattaaactaatggcatgcacatcacgttcttgccgatgagacgatgcgttgcaagttacaagtagtagagaggaaggcacaggcaggattgggtgttttggattgttgctggaaaaattcaggattatattggcgtcagtgagcttgcagaagcattcttcctgttcttgttttaggtagcattatcccaaagagagggagagattattggagctcatttgattggttgattgattgattggagtggtaatcttcagtaattctatcttttttgtcctttgagtacttgaaagtacagttaatttttcgctaactctgcaaattgaaggtgtaaaaacttggattcttggttggttgattcaggtgaggtgaggtgaagtaacc

SEQ ID NO: 5994 - DNA, 2000 bp, Oryza sativa
tcaagtgggtctttaagataggtccaatgtgggctctattgctatatagcatctctcacacagtgtatatagcaagaggaggtattaaggtgggtcccaccttttatcatctataaccaactactacacctttccaatttctctcccccacctatagagagaagaatgtttttttattccttatggccatgcatattatagctaatggtagctcatccaagaaacctttataatgctcactctcacaatgtatatggactactcaagggcttaagaccctctatatttccacattgtggatgcctttattagtctacgcttaatactttaaatatgtatccgtatactgaaaaaattttggcacgtgaactaaacacagtcttagattttcagcgacagctaaaatttaaaattcacttatacatatttttatatttttttagtcatctcatttctaataaaargaaatgggggcatcttgcccttgataagaaaacaaaatattttgatatttttgttatagttcatttgtatatgtaattttaagacactaagaatacatatataatattttattcgtttctaattaactgtaggccaaactatatgactaaatcaagtattttttttcgataatcatcagcatacatttttcctttttctgggggacttttggcatctggtgtgtgcaagtttgttttcactcatcttatttgtttaggtttgttttttctaagtgtatatggattaatacaatgttcgacgtgtaataataatctcgtactcatcattattaaagatcaaaatatcccaacctggatttcttatctatggtgtctctagaaccatccttctttcctcttgctccgtgtgctaagcataccgacaaaaaaaaaaaaatcctaaaaccgctgtataccctsgagccccgacaatggagattttttttccccttccgattccatsggccccacttccgcraaggcscgtcctctctctctctctctccccacagcacgtcacgtcacgctcacgccgtcagccctggaaactgacggtgacggccgcccgcctccgccgaataaatcagctgcccccacaaccatcaccatttcccctccctctctctcttgaatttctttctccccaaaccaaaaccaaaccgaagcttccccatctcgcgtgaacttcggagcaaggaagaacaaggcgccgcgccggatttagcccgccccctctccggggtatccccctcctctcctctggtcggttcttgcggtgaatcccccgctgatttgtcctgtgaattcttgtgagattatttttcttttttttttgtggggcggttggcttgggatttggattggtggggagtttttctgatctgtgtggtggtgtggtggtgtgcttgcagggtttgattggagtgaggtgaatcggtgaggttgtggctcggttggcgtccggatcggagggggttcgggcccttcctgattaatccctcttctggtgagcaatttctctggttttttgtgttaatttgagctgaatttaccctggggatcgggtggatttgatggtctgaggctgatcgatccggaatgatttctcctttgtagattccgtgtgggggattcaatcactggtgggcaaaggcgagatatttcgtcacttctccccctcatctaaccatgtctggtacgtttctcttcatgctctggaatttctccccttcggttgaatgtttcggtggttaataacgaatggctctctgaattttgtgcaggtttgatgtgcctggagatcaagatgggattgtaaccacgctggttatctcgcgatcgcagagggtttcctccatcctctaaggaaggaaaggaacccttgccctttcttctccatggcttctaattcgtagtgtgaaggatctgatttttaggttagtgtaaatagtagcagtagttgaggaagcttcggcatcctaaggacctcctgtgaag

SEQ ID NO: 5995 - DNA, 2000 bp, Oryza sativa
tctccatgcgcaaatcacagttttctccatgcgcacgctttccaaactacgaatcattaaatatcatactttaaaaaaatataggaaagttactttaaaaaattaaattaattaatttttaaagtttaaaataattagtccttaattaattatgctctaatgtcttaccttattttgcgtattttctcaatcttttctttttacctcctctcaaacacggtgaccaatgagcactgagctaccactagaaacctaaccaattgagctacatttacttcgctagtatgtaatttataacgtagttctcttgtagaatatatgtttgatcattcatattatttaaaactttttacaaatatatggaaatatatagtaccgttatgacaaagtacttttagtgataatagaaatcacaataaaataaataatcataatattattttttatgaaacaataatcagatgtaaattaataacggcgtatattaaaatcggagggagtactctctatttgaaagcacgagcttccgaatatgatctgtagctctatcctactcctctataaaaaaaaattcaaactggtccagattcatccctacagtttgattttttttacggagagacactactacaggaatgattttccttgacgggggtcattttagattgcaaacggcgtgtaagtagttgcgtctgcgaaaatcgtgctccattttcacgtgcgactctttaagatgactgcacaaaaaaaatcaattatcgcaggcgggccacttaataggtccgcatgcaaaaataggcttgttttcgcgtacggacctgttaagtcaccgcacacgaaaatagcctctcaacttttaatccgccgtcgctgccccacatgcacccactctcatcgctatctccttagatcccatctcacacctgctcctcccatctccctctccgcctcctcctcccatctccctatccgcctcctcctcccactcctccctctccctatccgccccctcctcccactcctcccatctcccagcgacggcggcagcatcggagcggattcgttgccggccgccgcagtgaggatggatccatcgcctgtgaccgcgaggggatccgtcgccggcgacagcggggacgacggcggcgggccttaggcaaggcggcgatgacgacggtggtgacggcgacgatggcggtgacggtttttttkgtttcgattttttattttcccgtgcacacgtgaaaatcgcgattttcacagacacttcgttccagacgggtggaagattcgcatgctcgaccgcacagaaaaatcattattgcactagtgggagtatatgttagcagatttgtttcgagcctaatcaacttttattatagttcgtgtgtgcgcctggatcaattatttgtgaactagagagagctgtaccaaagctgaacctaagaacctgattatttgagcgggcgtccactgtctagctttactagtactactattgatcgagtcaatgatcgctctactagtactactattgatcgagtcaatgatcgctctactagtactactattgatcgagtcaatgtaacgatctgtttggtggcatatgatgtattcttgatcagcaaaacgtatgcttgagctgcaagccgatgtataatcaaggaaatgaaaaacaatgagttccacttgccatcttgggaccaacaatatcttttgatctctccgaaccagagactaccattaaattagacgagcttcagaatcttctagttcttccggcgaggtgaatggattaactcttttttttaaaaaaaatccagaaacatgaataccaagttcgtaaaacacgagagaatcgatccaccagccgaacgactgccatcttcatcagctataaaagagccgacaaatctaggtgctccgcacagtgatacagatcacttgcgccatcacaagtcgcaagccaaaaccatctcactgactagctcgagctcacc

SEQ ID NO: 5996 - DNA, 2000 bp, Oryza sativa
ttctgctttgccctgtagcaaaaagcctttttggcgaatgtggcagtagtggaaaggaatgtcacagaagcatcgcgctgcatgcatatattccatcagatgcagagagacacaagctagtagtaacagccactgtgcgtctgtgcattcttgcgcgtgcacaccggccgccacacacgcacgcacgcgaaactaaaagggaatccaagagaaacacacagagagagatcgatctggactcgtcggcgacgtcagagttagcaaccagccgatcgaacaactcgaaaagaaaacacgtccctgtcacacgaaagaccaaaagaaccaaagccgaaaatgtagcgtcttattttagcctcttctcccttcagttcgaaccatcgctagacagtacagtttttactcctaacaggactatgattactcttccctacatatcacaggattaatatatattccctccgtttaatgtatttatttatcgttctagtcttctttttttcaaaatacttatgattctagcattttgaagtacatatatctagagattttttctcctactaacctttatctttggcacggctatagmcctcaaatccacgatagacttaaagtttgtatgtaaaataatgtttgtttgaaaaatttaaatatcatctaaaacaggaacaaattgaatgatttgtccaaatgttttcaacgtaattgcatatttagcaccatggatttttggaaaatatatcaggctgtgacgatgtgtttagtgagtagatgaataatttattagttgtcacgcctcctaaggggtaagtgcaataagactaccgaagcaatctattagtccgcatacattagaaaagtctgaggtggagcagagatgaagcatgccaagagagaaggaagttgtcgactaaatagtcgacggtgatgcacgagcgcccaggctcatgcagccagtagtccgcttcatccttagacccaccaaaawtacagtgaaacaargataaaaattagacccacatrgatagataaagacaatacttttggagtaagtgccggagactattattaaaaacgttgtgtgcattacttgctatagttgagttggagatgtttagaaccggttgtgttattgcccttaccctaatataacgtgagatttgtagctagtaaattgaaacggagagagtaaaattgatagcacgcattaatgacgtagtggtatgctcatccatcaaacatcagacatcactacataagtagtagctcaaacactccccaagtccccaacccacaacgagagatagatagtagctaagccactgtacgtgcaagctagcggcacaacacaaccgcccatagctgtaccgccgcgcgcggcggagccgtccctttccctccacctatttaactcgcgcctccatcgctttccagtttccaccctcttctaccgctcacctcctagctctagcttgccccagctacgacgacgaggacgctgtccgtgtaccacatgtatgcgagctcgatcgacctatcgatctgagcgattccgatcggttatattagagagatcaagcatccgagctgctgctgtgttgtgggtacgtagatgtatgtatagtatagataccgcagccaccaccaccactaccacctctgctttttctaccctcgatatatattgtgctagatactagcctcttatccctttctctcttcttccgccgccgcgtcctcctccccaacttgaacactactactactcccccacggcgagctcgcgttctccgggatcaactagccctagcgacggatgcatatgcggagggggagagcggcgggaggcgaaggagaggcagcgcggtggtggtgatgaacaggtacgacaacaacgggcatgcggmagcggcggcggcggctkcsgttgcsggargaagaggaggaggaggaggaataaggcggcsggggaggtagatgggcatgaggatgacctggtg

SEQ ID NO: 5997 - DNA, 2000 bp, Oryza sativa
tgtcgcgcatgaccgacgccggcaaggcccacgcgaagcgcgccgtggggtccctctcggcgcgcggcggcaccaacatcggggcggcgctccgcaaggccgccaaggtgctcgacgaccggctctaccggaacgccgtcgagagcgtcatcctcctctccgacggccaggacacgtacaccgtgccgccgcgcggcggctacgaccgcgacgccaactacgacgcgctcgtgccgccgtccttggtgcgcgccgacgccggcggcggcggcggccgcgccccgccggtccacacgttcggcttcggcaaggaccacgacgcggcggcgatgcacaccatcgccgaggtcaccggcggcacgttctccttcatcgagaacgaggcggccatccaggacgggttcgcgcagtgcatcggtggcctcctctccgtcgccgtgcaggagctccgcctcgacgtcgcgtgcgtggacacgggcgtccgcgtcacggcggtcaagtccggccgctacaagagccacatcgaagacgacggccgcgccgccaaggtcgacgtcggcgagctctacgccgacgaggagaggagcttcctgctgttcgtcgtcgtcccgagagcccccgcctgggatgacgtcacccacctgatcgaagtaagctgctcttaccgagacatggagaccggacggaccacgagcgtggccggcgacgaggaggcggtggtgctcaggccgtcgcgggcggagtccggcgtcgccgagcgctccgtggaggtggaccgggagcttgtccgggtggaagccatcgacgacatcgcgctggcgcgggcggcggcggagcgcggcgagtacgcggaggcggcggagatcctccggagcaggcagcgcgcgktggcgcggtccgccgcggcgcgcgccggggacgccatgtgcgcggcgctgtccggggagctgcgggagatgcgcgcccgcgtggcggaccggcggcagtacgagctgtcggcgcgcgtacgtgctcgccgggctgagctcgcacgcgcagcagcgcgccacgtcgaggcagatgtccggcgaggtggcgccgcgccgccacgctcacggcggaggcgggggatcgtcggagctcccgacggggatcaccgtgtcgtacgtgacgccggcgatgctggacatgctcgaccggtcgcgcaggtcgcgggagctgacgcggccgccgccgccgccgccgcagcagcagcagcgggacagggagaggagaagaagctagaacggacgaacacctcccgtgcaccatgtcacacctattgtaaatatatcgtggtaaacattgcaacaagggaagttttggttgtgttgcaacatttttgtgttggtgatgttgtagccatcacgtgatctcacgtgccaaaggaaaaaaccgttgtcaaatgttatgtgcctagcctaatgtaatttttcaacctcgacgcacctgaggagttgaggggtagaggacgatagcccctgccaccagggtttcacactgaattagccgggttgatcataattaacatgccatgtcactatgtcagtcggaactagacacaatagtacaatactgttcctgacctctagttatatttggttttgcggttaagagtgatttaaactcgatgtcaacatgaggacctaaagtgaacttactccaatccgattggtcccctatcttggcacaaaaacgtctatgggccaggaacgtggtacatccaaacaaggcctaaaatttaattgagagtgttatgagtggagatacgtgttaattggaatgttctcttcagttaattccttgaacttaactttattcaaaaaaaaaaaacaaaccttgcacttgaagtgcccggatgctatctatctccttaattgaagtcgccgcagttataaagactcgcatctatcgttagggtttcgcacgaggaagctaccagaggtcccaactgttcgtcacttcgtcgtacggtcgtaccc

SEQ ID NO: 5998 - DNA, 2000 bp, Oryza sativa
ggctgaagctggcccattgggctgtgcgcctggggacccccgggggtgcaggggctccgcccccacggtatggatcgtcatcccttttagggttccaccatatatatacctcttgtaagccgccgtgcgacgaagtaacctcacctcagatatagtgaagatattttgctggttggcgcccgtggttttttctctcctgttttgggagggttttccacgttaaatctcgtgtcttctgtgattgatatattgttctttatcgtttgttcgcctatcgtttcctaacatcgtcctcgccattgttgaccaagcttgccgctgcactgtcctcgggagactaagagtggaatgggtctggttcgaatcggtcctgatcgagttaaacaagatggttttaagggcaaacttgcctttcatttaagtttctctctctttcttgttcggatataacaaaataatatgtcgggtgtctagcaactaactacaatattttacggtgtccatgaaaagatacatgttttttggatgtttcacatcaatgactacaagctttgagtgttccgtagtaaattttaccttcttttagaacacgctacaaatgtaggtattcacaacatggtaacactcctctataacacatatacgcacaccatatttctacggacacatatgaaagactgggtcgacagattgatgaatcaccaaatgtgtctcattatcgatagatacatcgtttaccactgaaaaaataattagtcgtaaatacgagtataaaataattagtcgtaaatacgagtatccgtgctaaatctacaaattaaatctgggtgagcatattttataaaaaagaaacataactaactagtcgagttacggtaacttcgcattggcaatggcagtaaccgcagcagccgttggatctatccttatatcttgctatgtcatgagttaattcttgctaaagtttgtagtaggagtactatttatgcagttattagattagtctccagttgtagtaggactggtctataattagcaataacaacatgctccaaagtgtagtagaaaatcatatagttaatatggtgacataaacttggagtacactctttggccattaattgtctttttagaagatcctttggccattaattaaaacgttctttttatatcattaattaaaacgttctggctgtacatgaagtaatttccccccttcaaaatgagtatcgttatctttgacatgaaaaatcacccacaccctattttaaaatataggcatttctagctacttatctaaacttgattatattttgaaacatctggatttctttgtagatttccattgaaaaatctaacaatccctccaaaatcctaggatgtgtcacatccttccacaatcccttatattatagacggaggaagtacaatcttattggatttcatatggacatatactaaaataaaaaaaaagtaaatcaatcttcgaaaattgtattcgaacaccatctcaacattagcatttttattcctatcatttttagatgtcccttaataccccactagattatgctatctactctaaatcaaatcacaaaaatttgtgattattgcagcttagcttccaaacttagtactactagtagtacaaagacccctcacactgtcaagtcctaaaaccggttgagaggtccacaccacacggcggccgcacccgatcacacaccacaagtcaaacaccgagacctcatcccagccgtccatccccaatccgacggctcacaccgcccccgcgccttcgcttctcccccaataaatacccccctcctccccctcctctcgccacccccgcgcccccttctccctccccacctgcccgcattttgcatccaggtccccggggaaatttttatttgcggggagggccttggggggtttgtggaaattttacatccaggtccctcgccgtcgtcgtgagggaaaaagaaaaagaaaaaaag

SEQ ID NO: 5999 - DNA, 2000 bp, Oryza sativa
ggaagagtttccatcgtttgctgcataaactgtggaatttctatttcatatggccccaaaactttttttttcgctgtgaccggcttaagatttttctgttacgaatttatccatgttcagaaagtacaaaagcttcatattagcacatgttcagttgattgcacactaatcagtgtagagtgtacaggataaggcttggatacttttcaaaaactcattgataataatttgacctgatacccaactcttctgccataaatttctaaaaaagcaagtcactttcatactgaaaacmaaacagcaatcttgactacccagctaccatccaacaaccctaatttccgtgaccacttctgcaaacagccatttgatttgtttaggaatactgtcgtggttctttctctcttatgtcaacttcagcatttcaaatcccagtgatcgaactattgcattaacagttgttagaaagatacatcacgttagttaaatgaaggtttctcgcatttgattacagaaaaggcacctgcctgttgactgctgtgcctatattttctaaaaaaaaaaaactgttgtgtctatgcaccatgcacagtgcctgaattttgtggtcctgcatgtacacatcttcagaaactgtcccagggttaagagccatcatcattctggagctgaatgtcctgttcaaatactcccaagccacctagaaatataaacacttccggactttaacacgatcttcaatatgctactttgactaataacatttatataaataaataattttaaataaaaagagttgcatatcatgttggtttgtttaacggtaaatctaataacattattcttacgtcatcaatatttatgattgtttttattgacgcttcctaaaactaaggtatttctgccaaatgtaatacttcataatacctcctagtagggcatgagcgatgtttataccacaagttagcaatagtgtggatccggtgatcaggtgacaatagctataaccgaagtccacaatgtataaacctaaggtagagagtataaggtgggcccatgcatagaaaacatagatgtgaacctctgtgaccaaacaatacaactattttttttatttgcttcttgccggcaatagggcaatgacccggtagcagttgttatcagtttccacaatgtatatgacctggttcgaaagttgcatttaatgcatattacctgtttttcttccacactgtggatgccctaatctaggctggcctagccttgctgccgcagcggctgcagtcatgaatggctacggctggcagccggtttgaactgctgcagcagcagctagcgtgtccgaatagagccattcagtgagtcagtgccatgtgctcaaactgtttctcttttttcgctgtctacggccgtgtttagttgtttaggtgtaaaaattttgaagtatacggatacatatttgaagtattaaatgtagtttaataacaaaacaaattacagattccgcctgtaaattgcgagacgaatctattaagcctaattaatcagtcattagtaaatgtttactgtagcaccacattgccaaatcatggtgtaattaggctcaaaagattcatctcgcaatttacatgcaaagtgtgtaattggttttttttcgtccatatttaatgttccacgcatgtatctaaatatttaatgtgacggaatttttagaagtttgaatgtaactaaacacagcctacgccgaaaaatgttgggatagctagcaagggtttcagatactgttgtcaacgatgatggtaactgtgttcaactagtgtttgcaaacttgcaaacatgtaatgggcctaattttcaaagccacttttagctcgtgagaattatttttgggctggcaaaaaaaaatcgctgggccatgagaattatttatcagctggttaattaattaattactgtcacatgggaaagcaatcaatcagagagcatgatgctgtgttcta

SEQ ID NO: 6000 - DNA, 106 bp, Oryza sativa
  misc_feature (1)...(106): n = A,T,C or G
ggcatgcgcggngcacgggtttttccggtgtgtcgggaacgggcatggccgggcggcggcgcccgtcgcggcgaggctggacgccgcgacggcggcgttcttcgcg

SEQ ID NO: 6001 - DNA, 2000 bp, Oryza sativa
gaagccaagtaataatatttttgttaagtagataaaaagtcagaaattgtgtacctattctttgtcaaattaattttcagcaaagaataagtcatgaaatgatttgatataaataaaaataagtatcttctttatcaaatttgcaggtcgttgtcaaattctctaaatagtttcttcttaccatgtatcttacgttaggatggtaatcatcaataagcctagatcatattccatcatctcttctcacttggtaatcattcagtacagtagaagggctgaacttccaacattgttagtataatctagtacttatcatttaagatatttcttcatagcaacctattcaagaccaaataaatttgttttcaagatttatgttcgtgcaaatgatgagacttgagagaaagagcacacatgagggacgggactataggaggcaggttgctcctatatacacaggtggcaagctccagctgttgatggcttgccgtcgtcggctatctgtcctctacatctctgcaactgggagccctagcttgatcaaggcgtgtgccacataatgaaaaaattgggagcagggaggaaacggaaggggaggagggctgaccttccgattggggcttaccggcgggcataggagtgtcacggcagcgacgagcgagaaagattgaggagtcgcctsagagaagaaatggcgtcacggaaggaagacgaatcgataccgctgactgcgtcgtacgttgtgcaaggcttctagggaaagcggtggctgttccccagtattgggccsgggggtgcctctatggtggagataggaggggataacttgtttcatattttgtgccgggttcctgggcaacccctgggtttattgggctccgcccctagcggcagcggggagcagcgacaacgaccacagcggcagcggcggatctgacaaggcgacgtgagcagcgacgacgaccatggtgagatggggatttggggtaggtgcacgaggggactggatgaggcgacgctcggggctccgactcctccaacgcgaggcttcggctcgtggcttcgcggctccccagcccaggtgtggcgctttgagcggttcctctgcaagctcaatgccaccctgcggaactatgcgttcggctgctagttaggctcggctctgatgtggagccatcagacgacaggccaaagctacgagttgtacgtggcctaaaaggctcaactatcaggctgaagcactatttaactatctggagtaaccagttgcacaaaatccacagaagatcccgttcccgtgctctgttgccaattctcccccaccaccatgctcctcgccgcgcgcggccgccgtcaccccttcgccgccgcgcgcctccttccgatcccgctttcctccggcccctccttcgcctcctccaccaccaccacgacctccaatggcgcctgttcgtcctccgccgcggaccccgacgccgtggccgccgaggtggccaccctcctctcccgctgctccggcgactggaggctcgccgtctcctcctccgacctcccctcccgcctttcccccgccgccatctcctccctcgtccgacgacgcccgtccccctcctccccgcgcctccaccctaagctcctcctcgacttcttctactggtccagcccccagctcgcgccgtcggccccsgcccccgatgccttcgcccacctggccatgtccctgtgcgccggctcactcttcaacctggccaacggcctcctcatcaagatgatccgcgcctacccgtmacctcccgtcgtcctcgcctccatccattgcgcgctatcsgatttttggcaaccgttcgccggcgktgctcaacgtcctcgtggatacctacaagaagtctgggagggtgcaggacgccgcggaggtcgtcctgatgatgagagatcggggcatggctcccagcattcggtgctgcaacgcgctgttgaaggatctgctgcgcgcggacgcc

SEQ ID NO: 6002 - DNA, 2000 bp, Oryza sativa
acattaggttgcctttgggttggggcccacccacaggagaattttaacaaccaaaccggtatctgattggcgggaattaagaagacctccatagctggtggaggagagctgatggtagtattggcatgccactaaagaaaacccaagcttttggtcaaatatgagacaagtagcaactatatttatttccagtgggctctagggtagtgactgaaccattatattaaagggaaagcaggaaaagaaaagtgaacatagcatttgttttcatatgaatgatgtcaaggtgactcgaagatgagtattcatggtgccttgtactatatctttgatgtcactctccaactagtgtcttctcatcagcatccaattaatccaagcaatgtacaccccctctatgctgcatcaaacaaatatacggcgagcactagaaaacaggttagatcattaggaatacaaaatgtaaaggagtgctctaccatactatccagtcttgattaatgcaattatggttaaatcaaaacaatataagggtgctactctccagtcttgatttctgaataattggttttgagaaaaaaaataactgaaatggtatgtaatgcatttcatatgtaaaaagttagaaaaaaggttcaagctatataaattatagcagttgtatggtgttggcttgttgcattgccaagaggcatcaagattcctgtacatgtcacggaataatgaatcaaataagtatattaattatttccttcctgaacaggggacaagaacacgttcccatggatggaatcaagcaaacttaacctataaatatagtaagttaacaagttaacattctgacaatctttaaagtccttcctaaactgagacaacattgagtttctctagaacaattaacctttcaaattggtattggggatcacatgtatgtccaccaaaaccaccattatgcaactaattaattgatctttgtttggaacagacccctactttttaatattcacaagtctggaaaatagaggaaagtaaagatcttataataaaaagatgattaaattaaaacactaaccaatccaaagtagacaagtaacaggccgtacatatgcagttttacgagatgcaatcctaggaataagcacagtgtgcrtttaaataagcaagcagttcggtgatctccagagaaaattgtttaagctaacatagcatcaacggctaaaaatgatttmccctgagttggtgccagagacagacagctccataattcactgtactgattaatgaagcttccttggtatctttttacgagtagcatagaagcacttttacataaaaagttggaatggttagcctggatactgcacaagagatgacagttcaacacttgacagtgcaacttcaaatgcattgcaagagatcttttgcccacaagtttcatacaataaagatttatttttatgcaatttgctgctagagaaaaccaaatatttgtgtgtacaacaagggttttcttgttcttataaataaaaatagatcaatgccaaggtagtgggaagatactagaactcccagataattgtcacggaatctgtggttttccgtccaatgaatagagaggacaaattttatttggccctactctacacaagtacacagctatactggaacgatggaatctccaattagtacaccgcccctgatcccctctatgcacttatgcagtcaccaatgtggttagacctgtggcctgcattttagtagtctactatgtggcctcatgcccagcatgtgatgtgtaaaactacaatcaaacaaataaagaaaaaactgtactctgataacatagtggcagcaataggtgatttagttctgtaattctgtcaaaaacgaccctccctagtttgcccccacttcgcaattacccatggtattgcaagggaggatttcatacggaggaatccgtctcaagcaacataattaccatcaagttgactttaaaa

SEQ ID NO: 6003 - DNA, 100 bp, Oryza sativa
agggccaggcmgacaaggttcgggctcccaggcagtcgtcgctmgaccagacgccgcgggaggggggcgggamggcggaggatgggtcggggrmggcggc

SEQ ID NO: 6004 - DNA, 2000 bp, Oryza sativa
ttatttcgccacagagttcaaaacggaagaccatttcgaaatcgtaaaccctgttacatcctctccaaagctgaaactgaatctgataggaccttcagctgctcaactccttccctgtcccacgacgctacacggctgctattcggatccgctgtcgttgggcctaatataagcggagacaagacgaaaaacgtgcgatgctgttagcatgtcagattagtagaattagttgctcgcttgtcgatcatgcagggtcatgtagtacaattgttgtgttggtttttcttctctctacagctacgcttgtcttgctgctttgaacttcccatgattccatttcaaaggaaaacagaaaatctttctataatcattttttttcttttttattgtgcactcgtggctttttaggtactatttttttttgtgaataaatatgtttcaacatgcttgaatgtatgcattgatagaaaaagaacggcagtgaaatggacagatttttaccaagcttgaatagtggtgcttgaatgtatgttcccaacatttcctttctacatatgccatagcttttgctattgtgagttagctacatgagatatcmaggtcatctaccttccaactcactttgacytggkgtcyttttgttgctaacttgtggatccataggtcatcaggtccacatgtcataacaaaagtcatgtgactttaaagatatatgatctttatctatctcgatcaatatgtgtttcgaggagcaactagcagactgggagagtagaagcctcaaatggcaactactgcaaatctgcaatgtaatattaaaaaaggtcagtggagtaggagtttgagggataggggggagaggtggagggaataatagatgtagctttatggataatctcgattataacaaaaagataaaacaaccagtcgacaatgaaggagttagagggtgaggggggtgagggggatgagcatctttgaaaggcaacaaagaatcaaatttcatggataatcctgactaaaagttagaagttagttaatactaatacatgaaacttagatattacaacaaacgatatataggtatcagaggaattcaaggatgactatccttgaaaggtgacaataaataataagagcaagaagttaactaatacgcgaatgaatatgctagctttgttgaccatcacacgataaaaaaaacaatttatagaaaaacatggtgaaaacmaaaaaaaacacatgagtatacttatattgacatggttcacatgaacaaaactatgacataatatgcatgaaaacgtttcgccgaacgcaataagaaacactttatatgcacggtgccgatctaaaacattattgttttttttttctatcatgtcacgcattgcaaaagttttggaaaaatattacttcaaccgtttcacaatgtaagtcattctagcatttctccgtttcacaatgtaagtcattctagcattttccatattcatattgatgttaatgaatatagacatatacatctatctagattcattattatcaatataacgtgaaaagtgttagaatgagttacattgtgaaatgaaggaagtacgaggtggaatactatacgagagcccgcttgtcttctggcaggcccactggcccactcaccttccacacggattctgtaacaaaatttcgcaggtatccaccgcggggcagtcaactggcagcaaaacagtagcagaggagaagcgaagcgatccaccgttccaccgatcaaggcaggtatcaaatccggcgtggaaaagccaatttcgcaaaatggtcctcgcgatctgctgccgagcctgagcctgaagcgagacaaacagatccacccccctcgtcctcctcctccaacccccacaaagctcagatctcgcgccccatgagcgctccctctcctcggatctaaaaccattcccaccccctctctctcctctgccacccaccggaggagatctgcggcc

SEQ ID NO: 6005 - DNA, 2000 bp, Oryza sativa
ttctaactggtactagtagtaacaccatgacaaataaacagaagctaacccaactaatctcatgcttgctagcttaattctaactggtactggtagtaacaccatgacaaataaacaaagatagtaataatgagtaatctgggaaagctcaagcgtatgacggccaatagaagcgtttgaaagcgaaattggtggagtgcggtggagatggcgaccttcaccagtaagcgaactctgttttgctaagcacatttcaagcatgtgaagagaaagcagaatccatttcccacgagtcatgaactcacatgactcacgaaacggtggtctaggacgatagttttctgcctcatgccaagcacttggtgtcttggttgctggatgaacgaacttgggtagttgggttagctggaaattgtgaaaagagtatttcttgatgtaacttatgtactccctccatactcgtttaggacaatgtttaagtcaaatattgataatataaatcatgaataactctcaagttgttgagtttgaaaatgtaaaaattatatgaatagatttgtcttgaaaaatactttcataaaagtatacatatatcacttttcaataaatatttttatagaaaaaagaagtcaaagttgtgttttggagaccgtgtcgctgtccaaaacgacttcctttatgagtacggaaggagtatggattagccctctttttactgagatcgtaaataaaaaaacgtttagtccttacaagatctgagaccgtttggggagagctgtagatttttagaccgaaatttagtagaactatgttttaccctaatttgagataagaacgtttgagacgagagcaaacatgagccaaaaagtgtgaagtgatcgtagcccaattggttaggatccctatggtggaaccagactattcgagtttaaatccagacttgtgtacttgtatgtatggttaattattcttttactagtagacgtgtttacaaataattattctttcagtagtagacatagacccatggtgacttcgttaatcttaagatatgttaacctaatatttcggagatgttcttaaggatatggtaaggccccgtttagttcgcgaaatgaaaatttttgggtgttacatcggacgtttgatcggatgtcggaaggggttttcggacacgaatgaaaaaaaactaattttataactcacatggaaaccgcgagacgaatcttttgagcctaattaatccgtcattagcacatgtgggttactgtagcacttatagctaatcatggactaattaggcacaaaagattcgtctcgcaatttcccccctaactgtgcaattaggttttatatttatctatatttaatgcttcatgtatgtgttcaaagattcgatgtgatgtttttagaaaaaactttctggaaattaaacagggcctaagtacgtatgtgttgtaagcgtctacatttgtaacgtgtttttttttttaaaaaaaagagacaaaagtgtagggcactgcgagcctggtgataattcacacggtttgggctcttttggctgttccatggcgacgaggcgccagtttcaaaactgcccacataatgtgagtggacccaatatttccataaaccgtgggaccaataagattgggagcaagaaaataataaaaaacacagagagggttggccccgcgagcggttacaagctgcagaagtgcagaggccattccgttccgcgtgtgtgcgcgtccacccgcctccccctccccttcttcaccgagagtcgtcgcggtcactcgtccgtatctgcctcggtgggggcggcggtgcgtgcgtgcgtgcgcggccgctgtatttggcaggactcctcgtctcgtcgtctccctctcccccgagaaaaccccaccccactactcctctccaccgccatcattgtcggcgcgagcgagagcccaagcccaagccgacccccgagggaaggggaagacggggccgag

SEQ ID NO: 6006 - DNA, 2000 bp, Oryza sativa
tttattaaaaaaagaacggaaatggtcggaaaatttccatatttatgaattcatctatttagtattaacttcaatgccacactgacagaaattaaaaaaaactaaattttgaaaacggtaaccatcggtacaaatattattattattatattagttttgcggaaacggtatcggtacggtcgggaaatttccataccgttttcacctgggcgctatattttgccttccaaaatggctatacatgcttctgagtgcttattgataattaattattctttcgatagtaggcgatgtactcgtcaatagcgatgcgttcatggtgatttcgtcaatgtcaagatgttgatctaatattttagagatactaataaaggtagataatacgtgtgtgtttataaggtgagtatgtattgtgagcgtgtgactttgtactatgttttttttttaaaaaaagataagcttcctgctaccaacttgcagcatggttccaccactgtatgtctgtattaatctgatggctctgcatgcaacgcatcaggaacaacagacaaatagagcaagtacttgctctgaatgcatcgtgtcatcttgtggacgatttaaaacttaatttgcatccatatatgcatgtcttccgtgtaaatatctgaatgtcatcatttcatacagtgaacacaaaactgcaatcatatgtagctgaaccagaacaagttaccagccgcagcgacagaggcgagaatcaacaccgacagtccgacacaaaactgcaatcatatgcattccgcccccccctcctctccttgatctatttcttctccccttttttgggagacaaaacaaacgactaaatcaatgggtatgtgtgcatgtaatccatggagtatgctagtacttaattaaccaataagttcacaagtagcctaccaaatcaattaaggttgatatataccccttgtaaatgctagcttcgtccgcgtgcaacacgagcatctataacaaaataccaagtcttctgcgtgtttctctacctctactgggttctctgtcagacctgtcatggtggggtttctctactctactgggtctctgtcaaactgtcatggtggtcatcgatcactgtgtgtctgcagtgccatccaaatatccacgcacaatccttggcgtttttttccccgtgatggccaagtacaccagccggaatgccgaattcattaagataagagaagatcagacggtacaaaacacagtatcaacgttctgagaacaacagctgttttgtttgcctggtaccagaaccctgcgttacataatgtgaawaagaaacaaaaaaaacaamaamaaccsagctccaaagaatccagaaacaaccgttaatgagcagtattgcacataccaatactatagaggatctcgtcgcaaaacaagccctttgcttccttccattaccggtcacttcttcattgttattgtttgccaagtgcaattttcagtagtagtattctttacgctactgaaaattcgtagccgttgaaaatttattttttaaaacggaatatttcattaaatagggaaaaaagtacatccctagaggtagttgaaaattcattttcatccttgaaatcgagatggccgctgtgtccagttgttgccgttgtcaacgtaaccatcgctgtaatcccgtaaacaatatatggaaaatagtactcccagcagtcatgaaccaccaattttatattatgataagtttataagatctggtaggattaggatattatggtcctacccgataattgacaaattattaatgattcaagttttaaaaattccatacaatcttatcagttttaaaactttgataaaaatctgataaaaatcttatccttaaatattaaatatttattaccgaaagggagtcctcgttttaccacgagagagcctatatatgggagcaagttgagctactttgcacagccatctctcwatttttcctttttctgtcc

SEQ ID NO: 6007 - DNA, 2000 bp, Oryza sativa
ttgggtccctcaaatttgtcaccgagttcaaaattcatgcctagaccacaaaactggatataatgcatcccccaacttacaaaaccaatgctaacgaggtccatcggcaacattatctccggttttggctgatgtggcacctacgtgactcctttgattaggtcttcgtttcacgtggcattgacgtgacgcttacgtggcaattgaatcccaaaaaataataaaaccagtgggcccacatgtcatcctcactacccttgtctttctatcctctctccgccctttctctctatccgctctctctttctctccccgatcagtggaatagggtgggtagtggctggagcaggcgacgggcaggacgggcagtggctagagcagcagtgggcggagtaggctggcaaagcggagcgggatgtcaacggggcggggcagaggggaggagtggggcgacaggtggtgacgggacagagcacaggggcggagcgaggcagtggcacggagcgggcggagcggcgatgggtggagcagagcggctctgcccacttgggtctcagtcgtcgtcgtcatcgtccttcgacttctatccccacacccctgcaactacgaccccaaatctctcgacatgtcggagaagaagcgttgtggtggggcaggcgcgaccacgtcatgctccgcctctaagaagccgcgggcctccacggatgcgtcctacgccgagtcacttcgctcaaagctctgccctgacgcctccatcctcgccacccttcgctccctggcctctgcctgctccaaatccaagctcacggggttgtcaccatccgccggggtttctccttcgcggtgccctccaactaggtctacctttccgaacctcaattgcagtgcgttcgtccaagcgtgagtccacgaggccctttgccaacgtcaccatcgcgcggagggccaccatcaccatgcacgtcctctccctagtccacgccgaccaggcgtagtccgacgctgtcctcgacgacatctcctatatgcttgtctgtaccgctcctccttcacgccatcgcgttcgagaaggacgtcgttgtcgcgcgcctcacctttgccgacgatagcaaccggatcgactacacgtgcatgggtgttcgggaaaggccatccaacacaacatcaacagggtgttgggcatcaagagcgtcgcgctatccatcttgctggtggagaatgacgctgcgttcatgcggcctccgcccgccctgctcctgcccgcccgtcgctcgctccggccactgtccgccccgctccaatgcccggagagagaggatagagagaagaggggagtagtgaggatgacaggttgggccacgtggggaaaccttttattattattgtgtatgtaaaactgacatgtgggcccatatgcttattgttttttcggacccaattgtcactaagtgacacgtcaacaccacgtacgatgaagaaccagtcaaagtcaaaggagccacgcagacgtcaagtcagccaaaaccaggtacaatattattgaaggacctcttttacacggtttattaagttggaggatgttttatatctagttgagagatatatttaagactgagacccaagaagaatagaagaagacgcaacatgggtagggggcaacacgccggccggccactgctggtggtagtggagcagtggtcgtcggtccactgtacacgaccttggggcatggctcccccggccgtccaactccaaccccaaccccaaaagataaaaaatcatcgccactgttgagcgttgagctcgccttctcagtccaccaccagtgcgaccggtcggacacgcgacccgacccgacccgacgattcggcgatccaagccagccaacaccaagcactagcacactagcagtcaaagcagagaaggcaactaggcaaagcagcgtaacacccaagttacctccgctcccctccccaccgaatccccccgattggtcggcg

SEQ ID NO: 6008 - DNA, 1367 bp, Oryza sativa
gcgcgatgatgcggacggggacgcggagagggtgtagttggcagggggaaccagcggtgcgtggcgcttggcgcggatgaggatggctcggctgacgacgaggacgatgatggctcggctggcggtgtaggcccgcggagctcgcccaccgccgccacgctcctccttcggtactcgccgttacggccccctctgcgggcgcctccgctctgctcggccatgtgaacaagatcaccgcgacgagcagccgcctcaacgacgcggccggcggcgcaaccacagaggacgacgaggcggacacggaggaycacgtgcacgcgcggycgccgcgctctccctgcgcccttgcctgcctcgccggccgcccctgcctgcttagcccgccgctgccgccgctctcgcccaccgccaccgcgttcgcctaccaccaccgcgcctgccttcttcgcctgccgccgccgccgccgcggccgctctcgccagccgtgccccgcgcgtctcggcccatcgaagaagacgagagaagagaagaaaggggaagaaacaagggatgtgggccatatcgttttctctcttacatgtgggccccacgtactttatttatttatttttgcttactaggatgccacgtcagcgaarccacccacatatactgccataggatcttgtgtgcacggtttatgtaagtttaggggtacacatttctgattatgtggttaatgggtctcaaaaaatcttgctgttaaattgagggtgctccggtgaacttattggtttataaaatagttgagttttgtttgtaaaagggccaagtaaaaatttcactcgatgggcctcccacgaccgcgcacgtgggctgcttgacccattcgcgcgcgcgcgctagtgctcgcgtagtgactagtcctactactcctgctacccatgtgctcgctctactaacacatccagatcacgaacgcacasgaaacgcctcgcgtcgccgaccgccgccgccgctcgctcccaagctgccaacgccgccgccgctcccagctacctacctcccgcgcgccgatcgcctccgccgccgtagacctccctccctccttccctcgctgcttccgcctcgatcccgacctytcccgccgccgacgccgccgcctcgcattctccctcgccgccgactccgcctaggcggctagctaggcctcgtggccgcgcggcggcgatcgccgctgttagctaacttatcccccatcccctccttagctagggcgagcgagggaggtccggggcggcttggatcacgcccgggtggagccgccccgccccccttaccccacgtcctgggcggcgttgacctttcatccgatcccgcggccgaa

SEQ ID NO: 6009 - DNA, 2000 bp, Oryza sativa
  misc_feature (1)...(2000): n = A,T,C or G
tcttgtactttccacaaatatcaatgtggtgtaaaatacatactactctatccgtatcaaaatatatctacagtattcctcccgtttcatattataagttgttttgatttatacaagtcaaacaaatttattgaaaaatataacaccattttcaactcaaaacaaacagtattatgaaaatatattcactgctatatttaataaaactaatttattgttataaatgttgctaatttttttcttataaatttaatcaaacctaaataaatttgcctgtgaaaaaagtcaaagcaacatataatatgaaacggataggctaatgaaaatatatttatattgtgaaacggagaaattaataaggaacattttgctacaatgcatcgtgacttcgcggttttagcctataggacaccgcgcgaagtgacatttagggaagacactatcaaaagttgaatatttgctggtggacactgcacgcattaaaataataaatgccgggtgaggatgagagaaaaatcgtgtgaaatgtctaagatgttcttgggcccacagcactcctatctctcctctctctatccggcaacgacaatagcaaacggtaccggcgcttcacttggcggggattcaacagctcgcctggacgggtactcgctcgattcgcttggtgaggcgaatggcaggttcgtcgtggatctgctccaccgctgtggggaggaaccccgggaaacctcctctactcctagcgttgtcgttcgcaccgacatcgtcgatggaggccgtgaccctgacgcgccggcaaggaggaggcgatgagcagcggaggcatttggatgcgctcctacgctgcaatgcatgtgtgtgtaagcggaggccgtttatagggcgcgagaggacggcgagggccacgtggctgcggctgcggcaccgcatggcggcgcggggccgggggctgcgcgggaggacggcgagggccgcgtggctgcggctgtggcaccgcaaggcggcgtggggccgggggctgcgcgggaggacggcgagggccgcgtggctgcggctgcggcaccacacggcggcacgggcgcgagggctgcggcactgttgccgccggatagagagaagagagataagagtgctgacatgtgggcccaattatatttttgacatttcacatgaattctctmtcctcctcgtctggaaattattattttaatgggtgcggtgtccaccagcaaatatccaacttttaaatgtgtnttcnttaaaagtcactncgcgtagtgttntacggctaaaancgcgaagtcacgatgtcctgttgtaaaatttgccaattaataattatgtgtcagtcagatatattgttattctcatagaactaaaacactaaagtagtatgaatatttagcgagcagaaaacctcaagaaccacctccaattgaaaatagttgatgccagccaatctactgttagtgacacagggtagcaactatcgtcaactagatcgtgtactaggaaaaaaaccaaagagggaccatggtccaaaattttcaagtgaaattcacactaaaccgaatacmaaataaccacccgtcgcttaaaaaagaacaggttcagagtgttcagtaggtgaaaaaaaacgatgcgcgtggaacagtgagcaaaaacgaatcttcccttcaaacmaaaaaaaaaaaggatcattacaaaactttaaagagaatctgagaatacaatggctgaagaaacccacgcgcacggccgcaccctcgagcgaagccccccgtttctgtcccaccccgactccgccttcgcctcggcgtcgcgcgcgcgatataaattccgcgcccgattaaccgcatcccacaccaaacagcacaatctcagtatcggaatcatctcacactctcctctaaatcctcccaataaatcgatccatcgaaacagttcgctctcgattgatttgatttgatttgttgtctgctcgtctgctgcgaagatca

SEQ ID NO: 6010 - DNA, 2000 bp, Oryza sativa
tttctggaattgaaaagcgtgtagctgcttggacatttcttcctgaaggtaatttcgcgcgactttatctagtttgtcttttggagtttggagctagattaccattctctggctggtctctttcttgatcagaaaacgccgagtcaattcagattctgcattatgagcttggtcagaagtatgatgcccacttcgattatttccatgacaagaacaaccttaagcgtgggggtcatcgagtcgccactgtgcttatgtacttgaccgatgtcaaaaagggtggagagactgtatttccaaatgctgcggtatgcaattagctttgacattacccccttgtaatttcccaagacatctagtttagaagttctttgccattgcttgcagggaaggcatttacaactcaaggatgaaacttggtctgattgtgcaagatctggcctggcaggtagccttcaccccctatacatttctgaacgaaatggacaatatgaattgcctttctgcacaaagttaattaacctcagtagtaggaactaacgagaccaatttatcttcatctcctctctcagtgaagccaaagaaaggcgatgcgctactgttcttcagtctccatgttaacgcgacaacggatccagccagtcttcatggaagctgtccggtgatcgaaggcgagaaatggtctgcaacgaaatggatccatgtcagatcatttgataatcctccggatgtaagcctggatttgccgtgttccgatgaaaacgagcgctgcacgagatgggctgctgttggagagtgttacaggaacccaaaatacatggttggcaccaaggattcgctcggattctgccgcaagagctgcggggtttgcgatgcttaaaccctgcacccgccaaactgaagatctgaaaatcaaagtgtcatgttaggctgttagctattttcgcccactttacttacacagttacactacttgagaagttgagatgtacataacagacaaagcaggtttattagtatgtgtttctgtgtagtttaaccttgaacgatattgattgaaagtaattggaactttttttcaggtctaaagtgctactgaaatttttcgcaaaaaagttgggagtatttcttttagaggaaaactgcttcaatttgctctggtttctgtacgctgcatccgcttcggattaaaggtcactcgtgggcctcacgttttaccccagcccagaacacgcgttgtaccgttccggccgaatcagtatgggcctcacgtgtgtcacaatctcgatccggccttccggcccatctatcacggtccacaccttcgccgcattcccgtttcggcccaactagtacgggcccgcacgtgcgaagaagcctaagcctatgggcgaaaaggcccacacaacgtgggcgccacttcacgacgtggtgggcagccggaacggcggttcgtccgccgccagttcgccggagcaccgccgcggtcctaccatccttccttccgtcggatccatctactacggccggagatctcaaccagccacctacctgtatggatgcttctagtagagtctctcctaccgatctgcccgcccctgcccccccacggccaccgccgccgccggcggccggcaatcagggaggcaacgcgtcggcgaatgcgagcgctactcaaggtattcacctatgcaggtggaattctggctcgaatttgatattgcgtcaagctcgcccaagtcaaaagcccctctccccaacttgcagttgttttactgcggcctccagcggtcgccgctcctgcggttttccgccatcccgggcgcgcgatgccgtgggccggcgagggcggcgacacgttgtttcgagaaatcgatgctgtatataaacgattcttcagagattggctgtggaaacaagagccatttgatcttggattgggaaggtcaggttgcaagttcagttccattaccagaatcgctgctactagttgctagacc

SEQ ID NO: 6011 - DNA, 2000 bp, Oryza sativa
aaaaaactagattgtcatattcactctaccaaacaaaaaactggatcgccatatccaataaaatatggattgccatgtcccatccaaccttgaccgggaaccaaacacaccctaaaatagtggcgggccggctgagggacttaagtcccctctcctctcctccctctccccttatctcaccgttatgcctgccctctccttctctgctatctcctagctgtgttggcaagagctggtttccaaccaaatagtatgcacgaaaaacggagcggtccattagtactatgattaattaagtatttgctatttttttaaaaaaatggatcaatatgattttttttttagaaattttgtatagaaacttttttaaaaaacccatcgtttagcagtttgaagaaacgtacgcgcggaaaactagactagggagttggatccagctcttgcaaatatagccatagacatgtcgccaccgtcgttgaccactccccttgcaccgtcatgcttgtttgctcaatcagacgctatggagagccccaagtccaatgcttcaaattcagcagtggatccgataccggttacatccacggtctcaggagggaccgatatggcgtgtcaatgattttggtttcttggatttggggagtttgtgtgaattttgtcaatgttttttttaaaactgactgtgtatgttgaatgtgaatttgatgtgtactaaatctgattgtaggctgtgattggatttgttttcggttttttacaccaaaaatcgttgactagttggtcttaacctagtcatatgtgaagatcaattttcacataccgctgtcttaaaaaaatcctccgtaaaaatgatgatttttatggaccttttattagaagaggtcgtccgaaccgtgcctctcagtcgattaatcgattttagccgcctgtttaaaaaccgttttttatagtgaaccttaactaacgcgtgcgctcatacaaacacagctacgacatacctaactgctctagaacgcaggtatacgtgccccgccattagcaagtcacacgaatagtataagcaacctaggtctctttcttttctccgataagagttagataaagattaagattttcgtgccgcgcttttcaactgtgaaaactttctatatgaaagttgctctaaaatataatattaatctattttttaagtttgtaataattaaaactcaatcaatcatacgttaataccatctcattttacgtaaaaaaatttaatctttcatcttcagaagaaaagaacaccaccgtagccatccatttcgccatatatagattgctctttcatttcccgatcggttgattaatttcgcatgcgtcgccttttgaaatactatgcaaattatggatgcatgtttgcaattgggccggcacgagttaagaagaaaaatgggcaaactagtactggtgcatacacagtgggtttgagaatgacatggacgcttctaatatttccgggccctttttacacatgggcgcccacgtggccttccaaacgcgctcaatccaatcatccaaaccgaaaaataaaaaacccaaacttttttatgcagtagtagtaattttcagaagaaagaatgaaaataaaggaaaaaggctagcagaattggcttggctcgtcaaacctttggagtgcgtccgcgtgtgcgagctgcgcccgtgtgatgtgggcgggtgggtgttcgtgtctccgcttgtctccccgcggcgccctcctcaaatattctcaactccccaaccaattcattcccccgagctgagctgagctctcattccttccttctcctttccgccggcctcgcctctcgtctcctcctctcccctaccgatacgcacgctcgcttgcttgcacctcgcgcgcgagagacgagagagagacggcgagccctggcacgcacgagaagcgaatcgaagtggcggcgacaggagcagctgctgctggtggattatccgtcgtcaac

SEQ ID NO: 6012 - DNA, 2000 bp, Oryza sativa
acgaaaaaacatcagcatatacttcctgttaatatttactcttatacttcctgcaaatattttcagtgtatacccctatagcaagtaccaaaaaaaacagcatgcacagatgatttcagtgtataccaaccgaccaagccatggtagtgcctgacctcccaaaccagggaggctggctggtcccctctgtcctctgtcgccgcctgaatgttggaggacggcggttgagcgggatgatggggaggcgccaagccacagagaccatgctgttgcccccgttcccaattacctctcattttccgcgcacgcttttaaattgctaaatggtgtgttttttgcaaaatatttttatataaaaattatttaaaaaatcatattgattcatttttaaaaaaataattagctaatacttaaataattacgtgctaagagcatcaccaacagtctaacaataatctatccctaaaatttaatttttgagtttcctaaactgaaaataggtggtgaaaaaccccttcttccaagagatagcctaaattcaatctcaaaaactaaaagtgggcccttctgttaaactaccaacagaaattctagtttttttcctttcctgtgcacagaaggagatcgccccgatacgggaaggagaggagaaacgtggaaggaggggagaaacgcgtggaagaagggggattgggagtcgttctctcgccctcaaatacacgtaccgagaaaattggagatgtgaactccaaaacgtccagagctcttttgggaatatgttggaccattttttttaaccaaaatccccccaaaaaaaaggattggggatggaatagatagactgagcatcaccaacagtctacctatatgatttctaaaactaattttgagggattttagtccaagaatcagctccaacatatcctctactcttttacccaagttttggagttcccttcccccggttcctcgctctgtttatatgcgggcgcgaaagtcgctcccaatcacgcaatcccggctctcttctttgttcccgcgcgtgggagatagcgatctttctgtgcgtgaaagaaaaaaacggaattttctcttggcagtttaatataagggcccacttttaagtttcggggattgaatttaggctatctgttggagagaggggttttttcacttcctattttcagtttagaaaaccaaaaacaaaattttaagagaaaattatagataatctgttggtgatgctttaatggaccgctccatttttcgtgcgtgggatatggattccaacccaggttgccgaacacagctgtacagagcgagaaaccaggatttgggaatcataactattgggcctgagaattgggagacwsttggattagatttttcaaaaaaaaaaatcccccaaaattaggattgggattcatttagcaaatctgttgggcatgctagaggaataagcaactgtttgatccgtagttaggcacttttttttttttgagatcgatgtgtactaggcagcaaccatgtttgattagccagcacgcgattcttgggttaawagttgctactgtagtgtactaatatcaatactgtacaattcactgcgtttggttggtgatggtgtgagaacccattagccttttttatcctggcgcgaaaggcaatgtagtttaccagttacattgacctggacagtactctaaagctctaaatctctaagttcaaatattcacagtagcaaattttagattgggttgtttgatggattaaatggagaaaatttcaaattgagttatttgatgggggtaaattctcaatctaaaatgattttatatatccgattgaatgtaaagattgtgaaaaaaaatacctatctaagagaaacaaaaaaaatcagcctccttatccattggcccacttttggacatggacaagtgtttgtatatgcctggatgaaactggaaatcaaaccaccacaaccacacgtactcactcgc

SEQ ID NO: 6013 - DNA, 2000 bp, Oryza sativa
gacggacagtcaaacgttgacacgggaattcatggtttgtctttttttttacggaggaagtaagtagcttgtttttgtgtgcaatattgagctatgctaaatttaagtgtagaatccgatttggtatataactcttagagagatgtacgtatgtaacacaattaatttaatcatgactcactataatccaacaaattctttatccaattaatacgatatttttaataagatagtaatttatttagtcgataaaatttgacagtagtgccactatatacaacgttaacatcaaatattcttgactgaaaatagtacataatctcatacacctcttatggtgtcagctgaagtttatgtgctagctccaaacacctcggataggataggacttataaccaggtttacaaacatcgcctaccactgaaagcacaacgctgttgaatcctggaaaattcgctctcatggagagtcgaacccaggacctcaggtgctactgaggctcttgtaaccattaggctacaagccctttcgcacacggagtcctttcaaaaccacataaattcaaaaaattgtcagatagtttaaattttggtttaattttattaacttctgttggcttactaagcggatcatcaactctatccatctttgaaacctccaagtttcacaagcggttatgtgaaccctatatataacctgagagcacccgcaatggtaaagtaaggtgctctctataaaatatatacatctcaacaatagactagactaatagtaaatcatcccaatagtatgtctacatggatatctatagctctctcatccattacctcgtttttctctatagactatctccaagttattagatagttttactctctctctcttcatttaatctctttcaagtaggaaaatatactgatatggatatcttatagagagtctatagataactattgtggatgccctgatattttataatatactccagctaccacctacgactggagtgtagaaccatggtgatgcacagacgcactgtactagaggtgtacacgcatgtttgcgataataccactacttgtccgtaccggtgtactacactaccgatagtatacgtactagtatttgtgatttgtgcagcagcaattattgtgcccatttgccacagatgctccaatactgctagtagtagtaagtagtagtatacgctagtggcagtatatctgtaccatcatcagttgtgtattccatggctataaggtatacgtagttactccgtatctcttttcccaccggaactagaagctgaggtagctcccaactggctgacagaaatggacccaggtgggccccagcggcagaggcccgcgtaggcagacggcgcgagcgcgtgtagcgcgcgcaattgagctgtacgcctgtacagctggacgagtyaacgggtcaaacccaccgcaaaagtcccccgagtctctccaacccgtgtacgtacgtacgcgggcgattaaattagcggcgtggttaattaatcctaatcgcatgattatccctaattaaccacgatgggggttaatcgcctaaacttttggcttttaaagaagaagaagggraaaaaaaacttcaaaaaaggcgtaaactaatctccccggttgcggcgttctcccccacatggtcctttctttccaagtcgtccagcccagcctacccgcctctttcttccttcttcttcttcctcctggggktcctcccgtctatataaaccccgaaamcttccttcccgttttcccgccagtttcatcgcagcacacatccatccatccatccatctatccagagagcacagcaacggcgcatatatagtacccctctaccaaagcacaacaaccagaatctcctgagctcgatctagctactagcttgatctatccgatcaatcgactggcccgcgaggatcgaatcgagactcgaaagggagggattttgatccggatcggtcgacg

SEQ ID NO: 6014 - DNA, 1718 bp, Oryza sativa
aaaatyccccccmccccccccttccccccgcgctctctcccctattttcgccttcttcgtcaagctaattgtgttcgctaattgcgtttggatttggattccgattcgaagcagagcaaaccgctgcactagacgaccgttatatataggccagctggcttcggctggcgtatgcgggccgcttatgagccatctcaattgggcccatttagacaaactcaacccaactaggcccagagaagcccagccgccaaagcagatggcggacgtggccggcgccggagtggacgtggtttgcgggaggccgtttttaaaaaaacacttcatgcaatttctttcctcatccaagaaacgtcctgatttcttgacgaaacaaggacaaatcactcgagaagtcggaattttttaaaaaaaaattattatttaawtktcaaatggmaaaaatttaacatgatcggctaaaattataaggttaataccatgtcgaacaaccgcagttcaacaaagattgttattgttgatccactagggaaatattaaagtacatgaaaggtcatggcaaggggccaatcgaattgtggatgttctatatgtgctgcatgcacagtggcacatagtggttgttctttttttttaattttttatcccctatcgaacaattgtggttccacaggtgttgatcgatatgtacgcctatcgaattttggttgttcgatggggtgctaaaggggtgtttagattcaggggtgtaaacttttggtgtgtcacatcgggtattatatagggtgccgcatggggtatttcggatagtaataaaaaaactaattacagaatccgtcaatgaaaccacgagacaaatttattaagcctaattaatccgttattatcaaatgtttactgtagcaccacattgtcaaatcatgaagcaattagatttaaaagattcatctcgcaaattagtcgcaatctgtgcaattagttatttttttagcctatatttaatactccatccgtttcacaatgtaagtcattctaacatttcccacattcatattgatgttaatgaatatagacataatatttatgtcgggaaatgctaaaataacttacattgtgaaacgaaggaagtacttcatgtagttgtttaaatattcgatgtgacaggatgtaaaatttttatgtggaaactaaacagggcctaaacttgcaattttaatttgtcaacctctatttaaaaaagtattatttcttaaaaaaatattcgaaaattcgcatcctaggcaaaatcattcctctgtgttcttgaaaagaaacaaaaatattcctctgtgtttgttatccagttgaataactttagaatatatatggctcgtgcccggttgacacgggggagacgaaccagcgccaacgacggtgtccaaatccggtcaatttgactcggtcgtccgacgagccacgcgaaaccagcgtcggccatctgcaaccatcaacggcgaggcaacgcgacggacacgcgcgcatgcacgagaggcctcctcgattttagcgagctgccaccacggacagtgcatgcctaattataccttcttcctcctcctcctccgctggaacgcctttgcttcccaccactgcccgtcggtcgatcggtcgagcgagccggcgaacgcttgttgcctctcctccgttcgcgcttagctgggcagaggacgggggtgcca

SEQ ID NO: 6015 - DNA, 1050 bp, Oryza sativa
  misc_feature (1)...(1050): n = A,T,C or G
cgaggtaagttggggaagagggaggtatgacactcagggtggcgtgcgacaacggtgtagtcacctatgttgtgaagatgatgttgaggtggcatcatgtgatgatttttgtcttgagctcccagatctaggcagtagctacccttcttctcctctcgcgtttcagaagattggcgtgctcgaagacgacgtccttgcttcacctctaggaacccacgagaacggaggaccagaaaagtggatgggcatgttgtgaattttcaatgtttcaatccatgcatttgaatgtttcattggtttgagaaaattgttgcattgggttttagatagtgtcctacttttatttcttcgattttagatctatacatgtttcaatatctcaaaattattcgtttcatctggtgattcaattgcatttcactgttttcaagagttgaagtattcttttattgactattgaaatcctttttaataaggggtgaaataatgtccgacttttagcaaaaaaaatcagacttctgatatgtagtttattttttttaaaaaaaagcctaaaactccaaaaactcttgtaaaaccagggtgatttccctgccggagtacggtatatgtgtgattttggaaagggtaaattggaaccatgccattataattttgtaaagtttgagatatgccatcgatattttaatgacacgtaggacttatataagtcaatgacatgcgggtcaggatgtcatatctcaaccgactagcccctcctcccccaasggacyanyggnccccgcgggggctggscatgcgggttgttaactcggagcagaccccgggawagctccgagtttwcctcccccttcggtaagcyaacgcggggtccgcggctctgtcggagacgacgtcgctagtcggttggcaagtggagtccgacttgccgtcttcctccctcccaccatcacataaatcgcagggcacccaacccgcaactccaactcgccaacccaccctgtacccgccgctcgatcgccgccgttctcgcccgaagaaggaaagcgc

SEQ ID NO: 6016 - DNA, 2000 bp, Oryza sativa
acgtgtcagcagagctgcagtcagacagtgatgctgcaccaatctcttcatcacctagtactagtgcaccgagtggtggagcagtgcatagcacacatsctgaccaagtcamgtcgccryakccagcagcgtcagagcagtctgaacaggagcagcagacaacacaggcaagtgatcagacgagaccagtcacgagactacagaaaggtatttctaaacccaagcgatatacagatgggactgttaggtatggatgtcttactactactggtgagccagaaaatctccgagaggctatggcaaatagtaattggaggcttgccatggaacaagaatactctgcttttatgagtaataaaacttggcatctagttccaccaacccaaggtaaaaatataatagattgcaagtggatgtataagattaaaagaaaagctgatgggtcaatagacaggtataaggctagattagttgcaaaagggttcaagcagaggtatggtattgattatgaggacacttttagtctagttgttaaagctgcaacgattcgcctaattctgtctattgcagtctcaaaaggttggagtttgagacaacttgatgttcaaaatgcctttctgcatggatatttagaagaggaagtatatatgagacaacccccaggttttgagaacaaaggccagcctaattatttgtgtaagttagacaaagccttgtatggattgaaacaggcaccaagggcatggtactctcgcttaagtacgaaattgcaagaacttggatttatttcttcaaaggctgacacctccttgttcttttataacaagggtggttgcactatatttattcttgtgtatgttgatgatatcattgttgccagttcttctgcagaagttgttgcagccttacttaaggacttggagaaggattttgcattgaaagatcttggagatctgcactactttcttggaattgaggtcaagaaagtgagtcagggacttgtgctatcacaagcctggtacgcttctgatattctcaagagagctggaatgtctatttgcaaaccagctagtacacctttatctactactgaaaaattgtctattgaagatggagatttcttgggacaaaatgatgctagtcattatagaagcattgtaggggctttgcagtatctcactctgactagatcagacttatcattcttggtaaacaaggtctgtcaatttctacatagtcctactacagtgcattggtcagcagtaaaacgaattttaaggtatataaaagggactgtggaatttggacttagatttggtaagtctgattctatgcttattagtgctttttctgatgctgactgggctggttgttctgatgatagaagatctacaggaggttttgcagttttcttgggtcctaacttaatttcttggagtgctagaaaacaggctacggtttctagatctagtactgaagcagagtataaggccttagctaatgctacgacagaagttacgtgggtaaggaaaattttggatgaattgagaattgcaagaccttcggtagcacaattgtggtgtgataatttgggagctacttatttatcagctaatccagtctttcatgcaaggacaaagcacattgagattgattatcattttgtgagagagcaagttgcgaagaagctacttgatatacaatttatatctacaacagatcagctagctgatggtttcactaaatccctgccggcgccgagtttagcacagtatagacacaatctcaacttgggctaagttgtgattgaggtggagtgttgaaatatagataagtttagttatcatgtttctgttgttatctctttatccttatctcttgtaaccatatgttgttatccctttgtaatcgccacggtagaggctgtttctaccctatttaatacgtaccgcgacccagcgtgagggaatcgcgttccatctagttttcctatagtcggc

SEQ ID NO: 6017 - DNA, 2000 bp, Oryza sativa
  misc_feature (1)...(2000): n = A,T,C or G
acgtgagggatggagtaaggtgaaatggaatgaggtragggttttagggtttggttgccctgtacgaattttaaaccaattagatgctctagaatttgaaagattttccttttccytggggtttgggggggggggtttattgacagtctcttaaaaaacctcgtgtggnatgwaaacccctagatacttttctcattgcaggactgagaaaaaaaatacttaaggcttcctctaggtttctctcaaagcagcaagggtcracgagggggtccttttttaacccaaccccgaaaatccactcctacgggggagtctaatgtcaccgtccgagttgaatcctagaattttctgatagcaccatttttactagctaaaaatcctttttttttccttcccttcagttcatcaagattttgaagctctagccgcattacgcattatagtacgccatgtacaccaatgcctgagccaaaagcaattaagcagagatgatcatcgatctgatcgacctgaaacgatccccgaaatatcatcatcgatcctaaccaaatcaagcaacaaaaggtacgttctcctcaaaaaaaacaaaaaagaaaaaagtgagagagaargaawtaaagccgcagcagcagcaacagcaacagcgtacacacacacaagcaagcgtacgcaccactgtacgcacgcgcgtatacgtgctgtccctagcaaatgcaccagcaaccagtctccttttcccacaacgacaccacccagcattccagcaactagcagtccacgcctctccacgggcgcgcgcgcgcgcggccaccgtgagttggaccttccatccatcgatcgatcgatcgatccagcaacaaactggcatctcgcgcgcgcgcgcgagcgagcgagcgacgtcgtcgtcatatcgcatgtggcgcagacggcacgcacacgtattactgttgtttcgacgacgatccaggaagaaaaggggaaagtgatttcatcccctcgtgtgcatatataccaactaaatagtcatcaaaggatttgaaaatttttctggcaagatagattaatataaaatatatagcactctacaaacatgcaagttaaaaattcaacttgtacaagttgtaacaaaaatagcaaacatagatgcgaatgtacgttaactattttcggtttgatttgttcttttttgttgtaacctgtagaagtcaaatttggtcttgtatgtttgtatagtggtgtatttcatgttaatatatattatcatttttttcaatttttttaactatttacttcctccgttttatgttataatacattttaactttggtcaaaattaaactgctttaagtttgaccaaatttatagagaaaagtagtaatattttcaacctaggataaatttattatgaaaatatattgaattattgatttaatgaaactaatttagtattataaatattttactatatttatctatatatttagtcaaacttaaaacagtttaattttgttcaaaatcaaaacgacttataatctaaaactgaggaagtagatgacatataaacaaacgagagtacattcccacggaggaatgaaaatccatctccgaagaaaagctttagctttggtagagcgagcgagagctgcattggccacgcgagccaactaacccctccgagtccaggccggttggtacacgtgtcgccgccgccgtccgtttcccacccggagcccacgtggccgccatccgcccgtccgcccgacctaaccaccccccttcccccccgcgcctatatatatcagcacgcgccccaccacgctttgccaacccagcagcagcaagcagcgcacaagccccagcaccagcaagctgctactcatcatcagcgagagctagctagctgtgtgtgccacttacactgctgctgctgctggttctagctaagctcaccgatcgtcgtcttcgtcatcgccggtgacctggtgaattagtcgagagag

SEQ ID NO: 6018 - DNA, 2000 bp, Oryza sativa
gtagcttctaagcttcataaccatggaaaagacactgagttctgaatgaacacatggtccaggaaaactaatcccaccctgtaaactaattatccaaaagctacgaataatcagcacagtccagccaattttcagatcacatcttctaaaaggccaggaaacgtggtaataggaagttaattacttgataggacagtataaggagttgcgggggtggggactggggataagagttaatgggtgtcgattctgaccaataaagataaagtgcactgtgcgagacatccttgttcttacaaaccctgttggcctgccccatcaggctgtaatataaattccatttgttattcaatcaatatttgtaggttggtgattttgggcataacataaatggaatcatttatatgtaaggctttttcctaaactattaatgccccgttgacattctatgatatgcacaaaaggacatataactataaaaggttcatctcccactcaatggaaaagtagaaaactctgtttatgtatcttcaagatatacacctaagatcatgaataacataaagatgagaaacaaagaaatcgttgaggtaacttaaaaacataatatatgtatttccctcaacccataaaatttgcccctttcttttttgatacactctaacatacaatattgcacctttaatgcatcagctagagcacaaaccacaaagttacgattctataatcactagaaaggctgaataagactcaactttcctataaatctttgcatgaaagaactaaatttcattatgttagaaatgctatttattatagaatcatcaacagcttgaaagagcaacaaagtcctttattttgaatttattccaacaaagccagcaagctcacacatggtagcaacccctcaatcatattacacatgaagcaagttcgctgaatccattatcacttggccatatctttattgtgcaaaccgatacagtgattaaggagatgaactaaacatcaccagctaaataaatcctactgtaaaaggattatcttcttcaataatcaataccatatcaatgacactccaactaataaatggcatcaagaacttggacctgataattgatatagtgatatgtgccatccgaagactaactattaccacgcaaaccaaaacgaaagtcaaagaagaaactcagatttgaagcaaaacgggcctaactttaatcaagatccgatcgtttcttaatgtgcacacttcttcagttgtagcaatccaagaacacggattattcataagctacatcgaaaaataaattaggaatatagtcctgaaaaatcccaaatccaatccaattgcaggactgcaacatcgtccctcttgtttcaccctcccaagatcgattcccccctccacggtgagccccaagatcgaatgacaagagtcagagcatagaaccggctgaccttctcggagtattggcaggggacgcagggcccggatggggagcaccggtaggaggagttcccctgcgcctccacgaacccgagcagcgacctccgccccccggaggacgtcgtggcggcggcggccgcggcggccatcgcgatcgccggagggatccagcacagggcsrccrcsrcgaggagcagcagcagcagcagccgcmaccgccacgaggtcgtcgccggcgccttgttcgccatggctgcctccgccgcggtttcgctctcgctggcgcggtggtggttgccttttgttggaggttggagagatgcacccgttaacccgatactcttctcgggtcgggactcgcgttaacgggtctgaacacgcgaacctgacagagcggggttaacgggttagaaacctaatgggcgctaagtgattcgggttaacgggtttgaaccctcgaacccggatttatactgttcgtctagttctagtagtcttcgtgtcacgcagctgaaccaaccggccgccgccgccgccgccgccgccggca

SEQ ID NO: 6019 - DNA, 2000 bp, Oryza sativa
agaagtaataaacgaaccaacgagcaaagctcaattcaaacatgaaccaaaaacaccagagggctcgcgaacgaactgtacgtacggttggagcagtgggatctccttgctcgagtcggaagcctcgcctcgcgctcgcggccgtcgcctcctctcctcgcctcgcctatccagaggggagagcgatctgctcctggaagaagtagagagattttgaattcgaatcgcaacttgaggtaaacaagtggggggagtaaaatggcagctttttttttcctttactcctccctaccttctctctccacgccgaggagaggaggacgccgagagcgccaattccgaggcaactgcgagtagtagtacaagtctttgctccctctctgaccacgacgttttcaaagcggtgtccacgccttgccgtaccggccccaccgggaccacatgtcagtcagtgtgtagttggtgagtggattaacgaaaggtaggtgggcccacattgcatcttgaggcgcttttgggtgccgggattcgaatttcgacggcttggatcggggccaggcgttgatctacgcgccgtcggatggacaaaccacgcacgccgtcggcgtgtcagtttgaatctgacgcacccacactgttacgctccgacgaccttgccggatattcgcacgcacaccatgaaattgacatgtgggccggaatgcattggcccacgctcttgctaccgtccaggtgcaggagccttgcgggcttggcgtatgtggatgacgcgggcccacgtcaaagcgacacatttttgaagtggtacacgccaacgaactgggcgggaccgcgggaagaggcttaggccctgtatagatggggctaaaatttttaagtccctatcacattggatgtttagaaattaattataaatattaaacgtagactattaataaaactcatccataatcttggactaattcgcgagacgaatctattgagcctaattaatccatgattagcctatgtgatgctacagtaaacattctctaattatggattaattaggcttaaaaaaattgtctcgtgaattagctttcatttatgtaattagttttataagtagtctatatttaatactataaattagtgtctaaatatagggactaaagttaagtccctggatccaaacaccacattagctaagttatcgtcacctaataatttgacggttatcatatttaccataaaaaccatatagttatcgtgatgtatactgcaatttcaaaaaccgagaaggttattgcatgtgataatcatgataacctcacgattttgtaaaccctgtaggtgccatgtcacattgtatctcgatatcagctatatgcatggccaacttacatggcctttaacttaacagcgatttcaatttttacccttcaaccgaaataccagatacaatgaattattcaagtgtcaaaaccggtgcaatataggtaatgatggtataatagcgggtggttttatccaacgtgacaatttgatctaagtcaacagcgctaagtcggtgtagaatacgagaggcagaaggcggatgcttacagggagattgacgccggcgacgccactcgacgacctcgacagcacgaaccctagcggcgcagtacaagcgtccttgaaagctcgggggacagacaggacaggaagagggagaataaacaaactttcttgcttagaacttggacacgacacggctccggcacaatgtatatgggccgcacctagaccataatcccgtttcgaatgggctgcaaactcgaatgggctgcaaacttgaacgggccaccctatctatgggccgattgtcgttgggaaatgggcttacacgataatgggccttgacggcccatagagaaggcccatagagaaggaatggctcgcgggaaaggctcgggctctccgctctcctcatcttcatctcctccggccatccccttctcccctcatccgccgcggcc

SEQ ID NO: 6020 - DNA, 2000 bp, Oryza sativa
ctatggttaccacaagaacttgaaaaaaaaaacccaaccttttggcaatagtgaattctcgtattgtggtggagtcaaataataaagaaaaaacaataaagttaaaaactaatttaaaatgttgaattaaggcctttgcttttaattaaccgagaggttgcaaataacgtaaaaataaaaacataaagtcaagatgtgaaattaagatatctgcttttacttaactgagaggctacaaataacaacgaatgggttgtgttaatgtgtgaggtgttggagctcaaccacatctcttcaatgtgcaaattacaattcaccaactgataaacatatttcacacaatcaaacccttatcttgccataaactttgaggatggtttcgactagcagatcagcagcggaacaataataaacacatgcacataaagacacaatgatttatgtggaaaaacctcctcggtgtgaggataaaaaaaccacggaaccaacggtccactccaagcttcaactataatcaattaggatatacatggagtcttctctgaaaaatctagaggcatattataacagcagctataacattaagttacacacttggcatcatcaacattaaccatcaaagctaacaagaggccatcttcggttctcaggtgagttctcccaaaccacagatgcaaattacacgaaacttggcagaaatgatggtatacgagtcccttccaagctatccaaaaaaacagtccaaccggacactgtttgacccctcaaactgacattctaccaattgttgcgcaagctgtaactgcagtaactcgagctgacaaaccaccactcaaatccggtgctatattcaacccatccttatacaaatcgaccagattgaagtgctcaaagtgagaaacaaacttaccaagtttagtgccaatccaaccacgttcgagcctctaatcgctaacttgatgaagatagggtaagagctcccaagctgaacaaactgcacatcttctcccctctcctttccctctcttgtgttttgctagtttcttcttcaccccaatcgccgctactatctctcccccaatggaaggtagggtttttctttccatcataaagagatgagacaatttccatcattgatcaaggcataaatcaatggctcatatttgttagacttttgggttgcaatgggctgaaagcaaagactccatgtggagggaattttgcccgaacaagaggtgactgtgataatcatattggtctcaccgagcaacgcggcctaccaatgctttagtgtacttactgtcagcgccaacaagaatctagagatagtggtcttgtttactttataggagctttcaaccaaaccaatatttgataatattaaatttaggtacattttgatattatcaaatttaagtagtgttgaatatatttgattcgaaatcttatcaaaattttgtatagttctgaagagcgaaaacttttagaattagcaaaatttaacagaatagcattggtaagaacatgttcagttttttccccccatcaaaatttggtaggatcgaacacgctcgacggctcgagaatcaagacgatggtgacgagcaactggaaggcgttcgcagggttgtggttgttgtacgttgttgttgacggcgatggttatggcgagaggcttcgagggcgttctatagtaaaacagtgaaaccatgcggcgcacgagccactcgcactcgcactcgcactcgcaccaccaaacgtcgcggccgcgccgaaacgtgcatcgctctcctcaacccgacgggacgtgtcacacactcacaccgcgccaccacagaccacaccacgtaccgatcgatcgcacatcaccgtccgtttcgctcaactccacaaaaacccaaaaaatatttcgcccaaattctcccacgtactagggcmacmaccccgaagcgcgcgccgccgcctccgcctcsgcctccgcctcgatcccatcgcgcgct

SEQ ID NO: 6021 - DNA, 80 bp, Oryza sativa
ttkkccccccccccttcgratggggtttaggcscttgctgtaaattggagktktgcagatgagcttgaacccggggcggc

SEQ ID NO: 6022 - DNA, 1480 bp, Oryza sativa
cgtagtaatgtagtacagctgtaaagagaggaccacgaggtgcacagtgtttagtaaaaatcagtaacgtggtgcaacacacatgggtaaaagtgaaaaataggtgttgaacggcaccactaagcaattaatcgaaatatgacgataatatagatatagaaaggaggctgagtgggagaccgttgagtaacaccgacaccaagcccgtgtctacaaaggcgacatgagggcgcagatgttcagggcgagaggcggtgtcaagaatgccagaggaggaagggattgagataagatctactactatatggtatggatcttgacaaaattttagccgtctacaataattgactgatagattaggaaaaggaggcaactaactaattgcaagctcttaagcaaccacataggagaaaaaacagcttattagttccagtatggtcaactacattacttggatttggcactttctttttggcttggtttggttcagtccagttgtaagtgcatggaactaacaagttggagctttggaagaccacgcaggacttcagatgaaaacaaaattattagttgatttttttaaaagacgatagaaatgttttatatcttcggcctttgccaactgacacctatgtgtttgagttgaaaaagaaaaaaaaaagagtgatcgggacaagttttcaactcctctgaaaagatcatcaccagaattaaaaagctaagaccaattttaataaattttagtgatagatgatgtaccatcaacaataaaggtgtatataatgattttatcaatcttaagatacaccaacccagttttcaaacgtgttcatatgactaggaggtgtgtgtaatgtctatgtttgtattatgattcaaaaaaacaaaatatgtatataatatttataaatcttcaagttccttagaataaaattatattttgccgtgtaatcccaattgctaagagtaactaattagttactcttaaaacaataccgtgcacctatctgtcggaacaagtttatatgtcggcaatgatatttgccggcagcagttggcctgacagaccttgtctgtcggtaaaaattttcctgacacataatataacagcatatggggtctttactgacagatttgtagttgaggaattcagggcgtggtgtagtgtaagtaactttaaaattcactggtagtcaaaatttcaaaattttgatcaaatcttcttcttaacgttgtacacttatgactactagagggagtagtagatatacatacagatggagatatgataagcaaacagaagatatattcatgagatcatcctcattatttttgctttaaattcgtgatatcaccctcattaacttttctttggccctttttctccaacctcgaaatgtaaatacagctcctaacctttcattagctttggacacattgaagcatctcgcgttccttggttagccttcactccttcagc

SEQ ID NO: 6023 - DNA, 2000 bp, Oryza sativa
cgcgcgccgcccacgctgaagcccaggaggtgcacgtagtagaacgtcgccatcctggggttcctccccatcggcgtgaaggacgcgcccgccgctgccgccaccgcgccggcgccgaacgttacggtggaggaacggttggaggagggcctcaccgacgaggtccggtccacgaggcagtaggagaarctccggccgaagctgcgggcgatctgggaagggaacgacagcctgcaaggccgaagcccaagagtcccgaagcggcgatgaagagcccctcgttgtcgtggccgcacccgatggccaaccgctgcaagcgggcgccccgcgcgaaggtgagcgtctcggaggcgaagtccccggcggtgacagagccgtcgccgtaggctacctggtagaggcaggagttgcggcgcctgtcgcagccggcggaatcgaggcggcggcagatgggcgcgacgcagtccaccgcggcgtaggagccggagcggcgcgggtcgaagaccctgccggaatgcgcgtagcagtggcggcagggcgcgcactggagccagacgacgtcgctgccggtgtcgagcaccatgagcgcggtggtggcgggcgtgccgaccccgacctgggcgaagtactccccggtcccctgcgggaggccggacagcaggggcgccgcgaagccgccgcggcggcgcgggcgcgtggcattgttgggtgcagcaagcagggcggcggcgcgcgcggcgtcccgggcgaggaggtgcgcgagcagatcggaggcggtggcgttgagcgcgaagtgctcgcggtgggcgaggcggaagtggagcgtggaggcgttggtgcggggcgcggcgaggctgagctgctgctcctgagtgataggatccggggagagcgggttggcgagaagggattgggtgcgcacggccttggagaaggcggcggggagaggcagcaacagcagcgcagcgatgaggaagacatggaacgccattgccgttgaggggagcatctcgatctcgatcggaggtggtggagatgaagcagaggaggagaggataattgggagagagaggtggccggcggttgctagctggggaattaaatgttgtttcttcttcttcttcttcttcttcttcgcggtggctgatcgatcaaagtgaattgaattgaagtgaaagccaacagcggcggctgccacgtcctctactggatcgatagatcgatccgcacttcactgcagcgacttcaattcgaccaaggatgcactgggaaaatcatcacttgctgcctggatcttgcacaagtacacacactcggttaattaccagcagcagtttacagtctacaaggaatctgggcattcgggaatcgggagagcgagatgtgccgtgtgcgtgcgtgtccgttgtttcaggacacacaccatgatggcaatctcccgttgggcctaccagccgaaaagttagctaattggcccatggcatcattttgggcccaaatgcatgtggtcccgacgacagaaggcccacaatgtcgtccgtccagcgcagcgcaaaactgggggacggcaaccaatcgcagcagtccatgttccgcggcgcgggtggatcggcgaggactccatcttccccggcaattccggcgaaagcatctcaaattggtaccaaatggcagccatggcgagcgcgacaaaccgccagaggcacctaattttggcactggtcgtccccagcagagcagatgaacaagagaggtgcctcgcaattcccaaaacgaaacgaaacgaaaggaaacaaagcgatccttcttgcgctccggcgccgccgtctccccctcgcgcggttgcctgagccaagaacaggatcggaggccaggccccatgcatgcatgttaattagtctgtcactgatcacttcatcccattagccattagctgtttctcatccagacggacgcgccatccaacacacatcgatcgatcggaggttgattggccggcc

SEQ ID NO: 6024 - DNA, 2000 bp, Oryza sativa
attggtactgtgctagagatcgtgaacggtaaagctgtgtattgacaacggaatgtggatttggtttggtccatcttctttaggaactaggatgctagggaagaagcagggtcaatttggcgtttggcaacaaacattagtcaatttggcgtttgactaagtttatttgtctataaacttagtcaaacttaaagcagagtcatcttgagctagcatgttgtgagcctgtaaattaacttgactatgcaatgccttgtttgttccctttattctgtgctccttgtaggagtctgaccataatctaatagataaaaattatatatacaaaaaaaaaaggtgagcgtgcatgtttaggatagaattgtttggtacactcatttgtggcttggatgcgatgcaaatgcgttgaaatatattatagacatttctatgtatatctttattgtagcgagtataggctgtttttagcaagattttgatggcgatctagtggaaatgtggaatgacatctgctaaaatttccatgacttaggtttagcttatatcgtaactattttccgaatgccatcagaaggattgtcttcacctaacaatcaccattcttccatatttatctcagctttgtttcctgttaatactgagcactcagtatgtacatgaactaccctcatgccaaatagaatggttttcccaaaccatttaggtttcatttggttggaagttgtaatgtatcacactggttttgtgacaaagaattgagtgtaatgtacgtgggttacatcagactttgtgttctcttggagttctcctgccgtcctacttttattcttaattcatgcatcgggattagagttttccaaccaaataacaggtaacgtcttaattgtgcactcaatcatgatctagaggagaagttgcaaaccaaatgccctggtttaagtgctagtaaatactttccactttttcctttatggtcgcttattgaccatgagtcattgaaaacatgtttggcctttaatgtaagggggatttaaccagagtcacctgtttctgatctacttggctcaaaccgatggggtcaaaccttggaaaatatcttataacaaaatactactacctccgtttcaggttataggatgttttgactttggtcaaagtcaaactgtttcaagtttgacaaagtttatagaaaaaaataataacattttgaacccaagacaaatttattactatgaaaatatattcaattattgatttaataaaactaatttgatattataaatattactatatttgtctataaacttagtcaaacttaaagtagattgactttaaccaaagtcaaaacgtcttataacctgaaaacggagggagtactaacaaattacaattctaagtctgttatgaatacagtcaaatgccatattgtgtcaaatgtgacatcattagttttacaaatttgtaaggcatcataccatcttacttttttaatggttgctgtcacgttcgttatctacatatgaaacaataattctttgcaatgtcttaatactatcaacttatttttccagttactgcacataacctgggcagaaggcatcaacagggggaagtttggttatggttcatcagcccattcttttcccactggaaattttttcaaatcttggtcaacttccgtggatccaacatggagagttttctgctattcatcatctgaatcgttcaatcatatttctccagaaactttgtgggaggtttgtcactgaattgcacaattaaacttttttgctcgtttttggtacataattcagttttgttaaaattaaatataagagttaaagcatttttaaaggatttatgattaatcatttgtgggtttgatccgtgaaacttccataaagaagtcaataatcattttgtgtctggtagtatagtactacaatcaccttcttcttaatgttgtaaacacacttcataattaactagaacatacggca

SEQ ID NO: 6025 - DNA, 2000 bp, Oryza sativa
ttcctccgtctccgtcccataatataaggaattttaagtttttgcttgtaacgtttgaccactcgtattattcaaatttttttaaaattattatttattttatttgtgacttaatttattatctatattattttaagtacaatttttcttttttttaaataatttgaataagacgagtggtcaaacgttccaaacaaaaacttaaaatctcttatattgtaggacggaggtagtatataaaaactaaggagatggagataagggagaagcaaaaaaggtaaagtcttatctataaggttcagcttcctcccattcaggcctctgtctattattattcgacacaacaggggagaggatcagaggagaggagctacaatgacgtttgatttgatatccggggccaagcacaaaacctaagaatagtcttctttaaggtatccgcttctttttaagattgtaaagagataactccatatcctggtccatgactggttgttgttttgttcagaccaaactcagaagtgaatttcccagttttgtgttgagctagaatcaatcttatacagtaaatactatattcgtgggatcattgatcaggtctaagctaacaagagtaacaacattagctgaaaatcaatgataaggaaaattcccatttgttaaggacaaaagggaaatcatttcaattcgtatgagcaaaaattaatgaagagaaaggaggttcctttccctctatttctcacacaaagagaaagcacggtgccttttgaaaaccgaacaagagaccatgaagcaaatagatatatagtaatggtcataaaaagatccacggttagtctaataaagcagtgctaagctagtcgtttatgagaggaaaaaaaaagaacccaattagtggccaacttttgggcaatgcccctcgtgcatctccaaaggtggcccccctgctggtctttcccgctagtggcaggttgcgagttcagcctggggctctcagctttcaggtgcaaaaaacggtactactccactaggcactagtagtaggtaggtatccgtagccccgtatctccatttcttttccaatttccagtattccccaagatcccccccaagtgcttgggccgccgtatacgtacgcgtctacgcgaggcgggcgagaggatcggcggcccatcgtgccgcgcgcgcgcggtggtgtacgcgttcggatggacggcccagcacacgggggcgttttttccacccgggccccgtggccgtgggcgcacgcacggtgcgctcctcgtgcgcgcgtgcgattccccggattctccccgtaatccgcccagtttttttcgctcgccgctcgctgcggagtgcaacgcgccgagcggagagacgcggctgcagtgctgcacccgcgcgagtcgaaacgcaggctgggccgttcgttgggcggtggagcgacagggctcacgtgaggtgggccttgggagagtttggggtccgaaaggcagaaatgaaccgttgctgctgtagtactacgcgaagcagcggaattaacgggttggaaggaggaggagcaacacttggttggatccgatctcattctcacctatacaggactgacatgtgggccgctaaatattaacgcgtcgctgaccgagagacctcgggcgttacacgacagatcagagcgggctatgaaagcaccttcgtggctaagcatttgttggtacaagttcgccgaagactcgaaatccttagcgatgacctcatcgtgttatttaagtgtggcatttttttttgaagcaatggaaaattcaatatttcgattatgtatatataccgcatcagcttcggagacaggcagtcacgatatcctcgaaaagaaaaaaaggggagaaaagaaaaaaaaggcaaccacctgaagcgtccgttgggtccaggaattacgtcgagcacgacgcggcgcccagctgtaccgtctgaccagtaggccccacctccccgccgtcgac

SEQ ID NO: 6026 - DNA, 2000 bp, Oryza sativa
ttttttaaaataaaattagaatttgtgcactcactctgaaaaaaaatctaatcatttgtctagatttaaatttagaattgggtttttttggtacggaatgagtagagatgatctcttaccgataggtgactcatgctctcttctcttctccatcttatctaccgaggagttttcatgtatttttagtctctattatacttttccacaccatatcggagtcgttcctgtctgtgactgtcacttttctgaacttactgccaccaactttttactgtgtcatgcagccatatcatcaccatccatgatcagtaaggacactagctaggtaaagtactggggaattccatgtactggatattgcatatgccaaattgccaatccacaagagtattaattaattgcatatgctgttggctgtatatgcggcagataaaatttaaattaatactggaacaacggactggcggtatgtacaccacaaattaccacaatgtatacagtttaaacacatgcagagtccaaccagtctttaattaactccaggcaccaacaaattaagctacaccaaacagcggaggggaactaatcaaacgactagtagtttcttcggtttgaacagggaaaaagatcgaagcaaaattctattaggtaaaataatccaaatcatcgatatatttaggatcgctatatatagttggagagcaagatagcacatgtgttaattacccggtcttaacagccgcttgaaccaaacggaacaagcaggcactttccacggaggcgcttctgcttgttttgtctcactaaacaatgatcaattagctagtctccgtgtagacgcatcacggatgtgtgtggattattgggaagaaaaaaggacgttaatttgtttcagctcagtactatatttcactatagtactatctacttggactagacccatgacacgtcaggtcatcagcttagctaatcctacggagatgcatggtggttggttatggatgcgaatgattagtacatgcacacacggtgggtcgtcaaacgcagcaagtccaagcacatggaacgttgaacatgtttgcctcacaacaggttgctattacgagtacttgtggtcaacgtacgataggctttactcggtcataaacttatatatacattaagcgtatgatttgctgaaatgataacggataagttttagatttgtgacattttgatgcaccttatggtcacgcgcgtattcatacgaaagtgattttgagatatatatatatcaagttccaaaagaaaaataaattcatttcaagttgaattagtctgaactaatttcatgagtacatcatgtcatcatgtatggaattatcacaccatttcctttttctttagaaaatatcacactatcagaactagctagcctttctctacgctagctactccatcagttcaaaaatataacaacatatgattgaacatgacatatcctaatacgattagcttcaaataaaaaaaccaacgttggttttgtattaatttctactactatatacgaaggggtacccttttattttgtagaaaaatcagtattaattcattgtacgcatgcaacaagtggagtccctagctactccctagccgtagcgtgtaacaagtggaataatagtccatttacactgtagaggtagctaagggacgatttctcaagtatcttcagaacaaacatgtctgttgattattttactgtaatccctgtgtacttcttgtctccttcctttttgttgactcacctactctgttaatctctacgttactccaaatctccaacatcttctcctagaccttcacatccttcacacatctatataaaccctagaacacaccatgtcatccaacacccaagcagattaagctaattaactaccatcaacacaccctaatccaaaggtgccaagcttgcaggaaacagtaagctagctagcagtctagcactgcttcatttgatc

SEQ ID NO: 6027 - DNA, 2000 bp, Oryza sativa
tgaaaataaagataaagattaagtgtttcatgcaaaacgatgtggtaataatgtgtgattaattaagttttaattattacaaacttgaaaaataaattaattaactttcatatagaaagttttcgcatgtaacgtaccatttagtaatttgaaaagcgtgtcacgagtattcaaaagtttattaagactgtttcatagataaaaaagttcaggcttgtgtgcttcttcagttccaccggttgcaaagttggcaatagtagggccgtattttaaggatacaatggattttaaccgtatcgcaaaatctgagcatttcacttaaaaaagaacttaatttcaaatggtcatgatcaaatccctacttggaaaggttctactatgatgacacagttggagccgttcccacgaggcaaagaaaaaaagaaagaaagraaaagaaaaaagagcattgatcacacgcgaacctaataaaaggaatcaatcataatatggttggctcaacgtagcaagcaagatgaggcatattatcgggcacggaacattgtgatgtgacaattgcacaatacatactgtatatagcaagcttcggttactcgcatgttcttatttaggatcagttaggctgtgcatgtggtgtgcataagaggaaaaattactgattactagtattaaacaagagtttagtgtcgcagctccaatattacacttaaccgactgtttcattgaaaagtaaaaacaatgaatttaataaaccaaaatagagctttgtgtcatttttttgtgtgctttgttcatagaattacaatggattcagaattccatgaacaaatgcaatctcctgacacatcaaaaccaaaaaaattcagaactgactgtaccttcaaaattttgacggatgtcacccgagtacataggaatcaggtgccaattaacaacccacgattagatggaatcacgttaatgtttcaaaacttcgatgatttggctgatcttgtggagaaagcattgcgcgttctagcgatttcgcagtcgctacgaacaaataatgcacgattaggtctaactgattaactcttaattttgcgtctcaagggctgaatcatcagatacatcaaacagcctaatcacagcgactaatccctccgcacatcgctgttaagtattaaccccttcatcattagtggcgcccatggcgtatataagccgctctttcccccacccttatggcgattttaaaaacccaaaagcaactcacaccggaacaaaaacgagaagccagcgaagaggcaaatcaaatcgaatcgcccaaaggaggcgacgagccaccggctgcagcctgcagcgggaraggtctcaggtgcgggggagcagaggcctcgtcggcgagcgcggggacgccccatcgcggtgccccaccgccggcgaacggggcgtcgcggggttcggcggggatcccgccgtggagcggcggcggcggcggcgtcgtagccggagcactccgatcgtggcgaatgtcggtggggagagccgcggtaaggtccctgtctcgggcagtggcgcgcggttggtgggaactgtgtgcagtacagttgctaagcttctcaatcacttcttttttttttctcgtgaggggtggcttctccctcttttcctgtgcgtagtacagacgcgaaaacgtcggccatggattttgtgaggcttggtgtttctgttggatttctgttattgttgttgttgttgttctcgtttgagtaaattcactgtgagggttctattggatagaacaggagtatggtttgttaaattttgatgcaaagcgtagtgctgttcgatttacgcttatgttttttccccgatgctcttgcagaaatcgcttccggcgtggagctgttgcctgtaggagatgtggagattgggcattggagtactggagattgaagttctgcgagggtgatttgctgctgtgaaattgctgaagttttggtaagagattgggaacc

SEQ ID NO: 6028 - DNA, 2000 bp, Oryza sativa
ttagaagcagtacgatcttatttggtggagttgaaaattataagaaacaactgacaagcaatcaaccaacatatactgaatatgggaaagtttcttttagcttttctaaattaagtactgattcttaaacttaagtgagaatctagcctgttcaggggcgacggctaaaggacatagcaccactagtctacgcgattgcaaaaaagaagaatgcaagcctgcaacaagtatcgctttcccgaccaatggttggttgacctcggtttgccggtaacctcaggctggacgacagaactaattagccaacttgtcaatgtctagggtgctgttcatagcctgcagttgacagagtacgaaaaggacaagatcacatggaagctaactagtcacggcgaatacatgacgacatcggcctacaacgcacaacttcttggcataaaagcttcaatttcaatgcccctatctggaagccctaggcgccgcgcaaatgtaaaacattcgcttcgcttggcttgttatccaaaatagagtatggacctccgacagattggcaacccgtgggtaatcgaaaatggctccatctgcccctttgtcgaaggaatcaggaaacggccctcacctcctggcggagtgtagatatgtgaaagaatctaggcgacacttgcagactggacaacatgtgaacaaataagaccaacgttatggcaacaagcctcgacgctactcaagtggtgggaggccaccgcatgttccaacgaagcgccaaagaaagccttgcagactctaatgctattagtcgcctaggatatttggaatgaaaggaaccgcagagtttttcagcaccaagagcttccggtggctagtctgatagccaaaattaaggaggatgccaaaacatgggtcttggcgggcgcgaaacaccttgataggtggcttaccttttaacatgttcgggccaaaggccttgagacggtaaagttttctatttgcgcttgcgcatgtacaattttattcctctattcaatgaaattggtggctcactggttcattaaaaaaaaaagaatctagcctgttcgggaagaagaggattttgttcgtgagagagagagagagagagagagagagagagagagagaaggaggaggaggattttcaggcttcgcattgcccaacctctgcttctgttggcccaagaagaatcccaggcgcccatgggctggcagtttaccacggacctacctagcctaccttagctatctaagcgggccgacctagtagccacgtgcctagtgtagattaaagttgccgggccagcaggaagccacgctgcaatggcatcttcccctgtccttcgcgtacgtgaaaacaaacccaggtaagcttagaatcttcttgcccgttggactgggacacccaccaatcccaccatgccccgatattcctccggtctcggttcatgtgatgtcctctcttgtgtgatcacggagcaagcattcttaaacggcaaaagaaaatcaccaacttgctcacgcagtcacgctgcaccgcgcgaagcgacgcccgataggccaagatcgcgagataaaataacaaccaatgatcataaggaaacaagcccgcgatgtgtcgtgtgcagcaatcttggtcatttgcgggatcgagtgcttcacagctaaccaaatattcggccgatgatttaacacattatcagcgtagatgtacgtacgatttgttaattaatctacgagccttgctagggcaggtgttctgccagccaatccagatcgccctcgtatgcacgctcacatgatggcagggcagggttcacatgagctctaacggtcgattaattaatcccggggctcgactataaatacctccctaatcccatgatcaaaaccatctcaagcagcctaatcatctccagctgatcaagagctcttaattagctagctagtgattagctgcgcttgtgatcgatcgatctcgggtacgtagca

SEQ ID NO: 6029 - DNA, 2000 bp, Oryza sativa
acaaccttttgttccgtacttcttcataccacacaaaaacaaaaaaaaagataaagtcacaaccatttcaacaaaaattccaacaatgtcccaatgacaagtgggcccacaacctgaaccggctgacacggtcccacatttcagtgacagatatgaacaccctgtgaaccatgtggacggtctcttgcacacacaggagaatattttgttgtgcaggggagatgaacatggacaacctatgatgatcagttgatcacctatgatttgttgaaaacaatgagcagaggaaaacaatgctggtttggtagacattctcagggttgatggagctcaaaaactggtgacagcggctagtggtttttcacagctcctgttctttgtttaactaacaaacagctgcatgttcatatgtttgtgcctaagaactttcttaagcgtgtcccaacaaccccttttggtgagagcaatggctcaacaaccttagccactttgtggattttttttcttttgttccatgatgattaggaactgcatgcaggggacttgttttaacggtgctaatcttttgtttggttcgttgttgtgatgtatccatgcagataagagataattcagttggcctaactactttactgatgagcacatggttttttcatcaaaagtttgtctggatttttaatattgatgacagtatgctataaaaattactaaaacatggtgaaaaaaagtacatttgtctcattggtgatagaaataaatatagcacattaattggtaaaaaaaacataaatatgtagtttaggcctttagggtgcatttcgactataacaatttatttcgcattttgcctggatatagtaaatgagggtgacaattttttaataaatgaacttatgaacacaaccacaaaaattaggctaataagtccacaaaccttaagaaaattatcaatatttttttaaaagtttatgtaagtaatacattagtggtaccattaaagagtttacgagttagaactattaagactttcatcccatggaccacaccaatctatctagtttagtgctcatttgtcatctcccacattgaacatctcataattaatcttctcctaactccaaaccagccagccagccagagaacaagtacacaaaagaattaagtatcctaggagataaataccatgtcacattgtcactcaaaagcccatgaaacaatcatgtgctaaaaaaccaggctaagtcatgcatgtgtccatgtagcagagaggataagactagagagcagccaggccacattataatagagggcaacaaaaaaaacaaaaaaaatccagcagctagcttcactggttttgaaggcttccctaactagatgctggatttgctgctgcatgggcggcgccccctgtattggccacctcaccacctccatggattgcagctgtcctctctaccttaaccctttgaccagtgcttgtttgtgtgtagcactagtagacaaagcaccatccatgacttgaaaagaaaattcaccaaattggttgcaagtattggttgatggctcttatctatctagtaagtagaactagtagaggagataatttgcagatgttttgctttcttttcttgtcctcaccgaatcctactaacctcctctttgtggtaggcatgtgcataagtgtcaagtgtctatatatattcttctgcacattctttgctccctgcccatagatacacatttcctcttcttcttcttcttgttcttgttcttgtgtcctgactgttcttgataaagctcagatttgggaattggaccacatcataacattctttggcagagtttgtgaaggtacatttggagtttggattaatttcaggtggttagctgttcttgatcgttcttcttgttgttggttgctggaagattcgaagattttttttgtgtgtgtgtgtaaattgtggtgttcttgtttggcattgttgctcagttagttgatc

SEQ ID NO: 6030 - DNA, 2000 bp, Oryza sativa
atcgagtcactctcgagcctcgacttacacacacactagtcaaatgcatgcatgcatggcagtcaaattaagcgactcaaatgcatggcagccaaagcgccggtgatctagctatgcaagcacccccaaagaaaaggtcaccaattcagcacccaattaacacctccctgtcttcaattcagtgtacaaaattcaaagtgtaattaattattactactacttgctggagtagtagctactagatgaagccatcatttcggtgaatatagtaactgaatatcgctgctattagtctatttctttttaattgcaccgcagacgcacacgcatacactatttcacacacaatattacactcacacgcctccgtgaatgtgtccccctaacatatgctttaagggacggaatcacggaaactagtactagatccatgttcttactaaaattctattgaaaacacacctacgtgtgtgtaatattggtagacaccaggatttaaaccctgataggtgaagtcatatattcacaaccgttagtcactttatttatattagttgatgccttttggattatgtatatagtacacaccgagtgtatttttagtataatagtttatcacataaagggtgtatttttaaaggtgagtccactagaactctttaatattattttatctttattctcattttaaccatccaaccaatactaatccctcctccttggttctctctctctttttctctccatgttaataaaagacagcagtctttttactagggatacaagcggtgtgggcaagaggattttttttagcccgcttatctcatttctagtttattttttcttctaaattttatactaccatgtgagaaataaactagcaagtgggtttttatgtggatagcgggactacccacttgcatccctacttttaaccctccttcttaatctctctgactagctaagataacattctttttggggacagaacaaatatatgcaattgaattatttggaatgggaactataggctaaattcttgctgtttttcccaaatcttattcccttctcatgtggtggaattgagttactttatactacaaatcttattgttgcttcctttttagccatgctaaataattactcccttcgtttcgaaatgtttgacgccgttgactttttagcacatgtttgaccattcgtcttattcaaaaaatttaagtaattattaattcttttcctatcgtttgattcattgttaaatatatttttatgtaggcatataattttatatatttcacaaaagtttttgaataagacgaacggtcaaacatgtgctaaaaagttaacggtgtcaaatatttcgaaacggagggagtatatcccacaattggtggacaatttcttatgtacccggcctctctctctcaaaaaaaagagagattaatttctttccagaagtggctatctatttttggcatcttttcctaatataaatgttcttgcttaaaatattcacaaagtctctaaacacaagctagctcagtagctcactcttatgttgatctcacaccaatgaaccaaaaatctttagatatgaatgagatatcacacatcaacgatattttcaatatcgcaagtacactaaatttagctatccacacacaaaaaaaattatgttaccatggcccacctgtcatacaggtggtcaacatgagctgggggcaatgagcaggtgtacacgtgacgaaaatacaatgccagtgctgcgtggaagaattagtaattgtttaatatttagcgcacgtgtcccatgtgcgtcttcctcctccatacgcgtgtatataagccatggcctccttgactcccccctcccacacaacacaagctccacattttcctcctctcttcttcttcttcctccgatcgacgattcgctctctcgctctcgctcgatttccgtttctttgattattgttgtcgagtgtaactgatccgcc

SEQ ID NO: 6031 - DNA, 2000 bp, Oryza sativa
gttaattaaaatacactacatggtgggctgtgggtgcatggttttgttagtcgtgcccatggcgattaaggaccggttcgcgggatgccctggaagaacttaccgtacttaccacaagccagcgtgggcaacggctgggcttgtagtgtagcttttctctagtcgacgtacccaggcgagggtgggcgtgatggagttgggtcggccggggtgtccggttgatcggcttccggattcaccgcggcacgaaaggggggctgcccgttgcctgctggggacgggggtgaaccctaaggtgtggtgctatcggttagagggggttatgcgaagggtcctgtcacggcctctttccggtatgtcgtggtggcatgtcggcgcacgggaacgtgtcgtggggctgtgtcttgtgggtacagttgtacacctctgatcagagtaaaactattcgaatagccgtgcccgcggttatgggcggtcgaccagattcaccgtgattagtctcacccctagttagcttatggaactggttagttcaggaggtggtttgggcctgttgcaacgtgggtagcgttggacagtgattggttaatattgataaatcactacagctgttttactgctttcaactactgcttttaaatgctagctttatgcaaatgagcctttagcctcctttggatatatcctgcatcatacctcctctcccggtatgacttgctgagtacagtgggtagtactcagccttgctctttttcccccacaccagagctgaagatcttcctagtgggagctgtcttgtcaaagttggtttcgtcgctgacgtcaatgattgcctgtggagtggagtcgccccgctacagaagtcaagtttccaagtctagctcgttttatcttttccgctgcatttgtaatcttttatattttcgtaagacgtggatctgtatgtcaacaattgtcgtttgtgtaccctggctggtcctggacaggggtttaatacacattcagcttagaaattctggttcgtgaatttctgggcgtgacacagccctagcgccgtccccatgcgagagcagagtgctggcttgtttggtaactcgagggaaggggattgggagtttacacgagggaattgatgatgagattaagatgggaatttgatttttaatcccaatatcttgtttggtagaggtgatggaaattgatagggaatttagttggagattaggtcattaataaaaacggatggctgagatttgcttaaacaaagtaaaggaggaattccctcccaattacctgcccctacccaggtattgaaaaggatggagttccttcctcaattccccatcctcatcccaccaaaattttcatgtctcccaactaaacaaaactattaatagcctcatccctctaaactcccaatctctcctaaaaactccctccaaccaaacgggccaaggaaggagagaaacagagaaagaggaggggaaaagagagtagggtgctgacgtggacaccctgacgtgtgggtctcacgtgggtctcacgctgagtcagctgtcgcgttggataaaactggaatcaaaaccgccaaaggaccaaatttgcattggttttgtaagtttagggatgcgttgtatccggttttgcggttgggggacgattttgtaattcgatgacaagttgagggaccttcggtgtactttttccttttttttactttgagttgagactactatactgaacgggctgcagtgaattcccagacaggcaggccagcggccagcccatccagctggccaagtcttcgtcgtcgtcctcctcaatcacatattggagacagcgacgcgcccatctgatttagacgggaggacgccggccgcctgacttcctccctccgagactccttcgcggcgaaggctttacagagctgcaggcagctcatgccgttataatccccctcgcgactcgcgagccaagtgagaccaacccccaactcgacg

SEQ ID NO: 6032 - DNA, 2000 bp, Oryza sativa
gagagagagaaggggggggtraggattggaggacaaattgaggatgatagaagaatgaaccaaaagtaaattatattatagggcttagtttggaacatgttaagttgttgagatgtgttgtttaatgcatcgacatgtgtcagaagtctgtctaccaatattattgaaaaactatagattctatatgataggatataatccagaacattcttccattcacctaataatgttactcatctttttggtagttggtttttttaaatggtgttcaacctaggctaaaatattaaatctttgttggtatagtggcattgtgttgggcggtatggttaaacagaaaatggtgcagtctttaatggctcgaaaacgaactcatttttataggtgattttcaagggggacatcttgggcgcaacattggtcgctgctgcttaaagagaatcatggcaataggctgaaagaatgctgcaagccattggaatctagagattggagttcttttctaagtttggttggaatgtgagaaagagaatagatgtgtagtttcttttctccttgagtttgttgtttaaatgattttatctagatggttgtgtaccctcttgtaaaggggagtgggtctatgtgctcatatttagacttttggccgtgtacatccttgattccttgttggtgtagagaccaggttttaatccattatgtaaaaattcagaacattctttcatggtttcagagcaattcttgtattatctcagttacgacctacagatggggttgtcaattgtttgatgccctaatataatgacatgtcattgagataccgatggcatatctcaaactttgaaaaattataatggtatggttccaaattaccctataaaataagaccaactaagacaagaattcctgtatgaaattaggaggtacttctttttgcaaggaaattagtaggctagatgaaaggatttaccaaccaattaaggatgatcaaaacatccccaattaagcttgagaatggtagttccagagctgtcagacattccatacacagtatgcatggtcctctgaacgtcgttgcatactatttccagaaatccattaaaaaaatttctgttcttccccattcttggaagcaggttgtccatctgattactccatgaattctccatactttcattaagatatctgtgagaaatctcctgaaatctgcattgttttctcttccataggctaccttggagccccatacgtttccattctcagctaagagctaaacatcttatacctgaattttatgcttctagattcatcagagacgagtgatcggaacagatcatgctgctacatctagattataccacgttgacattcccatacacatgccattttttcctgataacatgtcattagcaaagccattaggcacataatgacttgtgaaactgcaaatggaagcctgtggatcgtacatctgtcagggttcagttttcatgtaagcttaattagtgttagtggttctcaagagtgcagcactaacgaaatgtgtaggattatatttgagctgattatctgtacccatgagtgctccaagtgtccttgattttgctttcttagtgctgaactgtccataggaggattagctaagttggaagctattactgattagccatacaagtagaccacatagtgaagcaacaagagtgaggattcaggcacatttgtctcagttcccaacttcccatgctgacagaatctagtggtactaggctccaaatatctgaaccaacctagctgatcaacaacaagcaacctgagttgagaagatccaaagatttctaaccgctttcggcgcgtataaatagaccccctgattgaatccttggtctccatcgatcgccacattcagcaacacatctcacaagaccgaaactgcaaactttgcaagcatctctgcatagtggtttcgtctgaattgtagtacacattttacacctggaaag

SEQ ID NO: 6033 - DNA, 2000 bp, Oryza sativa
ctcactccatctgtcttatagaaaacaaacataggatttataaaacataggatgagatgcaacacatactaatactatgaatatggtaggagcctattcaaatttattttttatgtgatagagggagtaatatgttaggcactaattgacatgtcatgatttaggagaatgaccctataaattcgatcaggctccgccactacgtatgtggactagagtacccgaaaggatggagtgaaaccgatcaatccccaccctttttatttctgaagtggcatcggatatataccctactttctcccccctaaaatatagctacctaaatgaggacatcctccagactgggagaatttattttaagaaattggttttttggatggagtagtatgttaggaattaataattgagataaaatgtctcaaatacatagaggttgatatgattaaagacatgatatgttgggtacggctttcgagtgctagtgaggtgatagggtaactaaatacaaggaataatgtgataaagtttatattctatatatcatacataggtggtgtttgaatctcctgaagataaagatgaagattaagtgtttcacgcaaaacgaggtgataataacgagtgactaattgggttttaataattacaaacttgaaaaatgaattaatctaatactttagaataattttcatatagaaagttttcgtacgaaacgcatcgttagtagtttgaaaagcatgccacgagtatctaaattttcatccacatgttatataacttggataaacttttggatactcgtggcacgcttttcaaactgctaaacggtacgtttcgtgcgaaaactttttatatgaaagttattctaaaatatcagaataatctattttttaagtttataatagttgaacctcaattagtcacacgttatacgtgaaacacttaatctttatcttcatcttcatcttcagaagattcaaacaccaccataagaaatgaacgggaccatagttttatttgagataaaatttaaattaaagatagctatattttgagacagagggagtacgtaatacatgggtgagtaaaatatttttctcaatagtcctaaaatattctcaaccactatcattcagcagaacatgaaatcaatcccaatatacccgattcccaaaatatcttagttccgtacctctatcaacgagatcctgtcgtcggcggatggcaaacaacataaccttaacacctcaagcatattcaatccgaacattacacaatttcaataggagtactaccttttaacttttcctcgaaaccacaaaactaaaactccacaagttccttgatacaaaacccgccgaattatttgaacaaaatggtacatcctccgttttaaaaatataatttttaagattagacataggtattaagaaaactggtgaaaaattaaattgaaagaggttatagttaattgagaagaaaatatggatgaagaaattaattatattttagaatgaattttaaagattaaaagttattatattttagaacaaaggaaacagaacattcccaaaaaaaaagcagaaccaaattaagggtctgtttagtacagctccaactcctaaatattgcttcaggagttaagtctggagtgaagttgtggagctgcctaaacccagctccacaactctagtacattttgtgagagagctccacccaattctactcctagttttggtggagctaaaactgtttggctgatggagctagagctggagctggaactatgccaaacagaccctaactgcccatggccatgatctatctcattcctccctcctcacctgttgccttgcccctacaccatccaagaggagagaagaccaccaaaataaacttgaccacttcgcctctctctctctctctctccagcctggaagcctcttctctctctaagaccccatttcttggaagctcactgcccccaaccaggcagagcc

SEQ ID NO: 6034 - DNA, 2000 bp, Oryza sativa
aaacattctttccaaaacaaaaaagttgtggttccctgctactctgccaaactcaacttagattctgttgggtgtgtttagttcacgctaaaattggaagtttggttgaaattggaacgatgtgatgaaaaagttgaaagtttacgtgtgtgagaaagttttgatgtgatggaaaagttagaagtttgaagaaaaagtttggatctaaactcggccatacttttaaacagaaccaaactacgatcctaagagggaatttcaggtgcaatcgcagctccagaacacctgaaattcacacccagaagaacacctgaaattcacacacagaactcggactgttctctcgtcgtatctagaaacaccacatttcgcagatgaaccgtgtggtagacattagtacactgcatgacaattgacaacaaagcatcatcattgatgttacttctcctgccatctccttaggttgtatttagatataaaatttagattcaaacttcagcccttttccattacatcaacctgtcatacacacaacttttcagtcacatcatctccaattttaaccmaaatwtaaactttgcgctgaactaaacgcagccttagaaaacagcaggatcgtcctgaaaacgatctcgtcggaagtgtcccccgtttctccagcgacttctccggccctgcgtgggcacgtactccgcaggaagatacgctgaagtaatccaggcgcagggacgagcccgagccccaccgccaaaatctgtttccgagcaggtagccacacgggctttccttgtcgttgtgacaacgcagcgcagcggtgcagccgtgcagcgcacgcagcgcattgcgttgtctgcgttgcacgcccgtcgcgcgcgcggacgtcgctcgcgtctgcagatccagaagcagtgaggaagcgccgggtcggcgtcgcaacggccctcctgttgccggcttaaatgcgggcgacaaggacggcgcgtgggcgcccatgcgaccgcgttgcttgccttgggcagttggcaccacagccgagcggacacgcgcgcggggggcggacggttacatgcgcgcgttaggtgaggtcggggccttgctgagtcggtgctgcgtgggatgtgaccaagacgtctgggcttggtttggtagggaaccttgaagttgaagaagcagtgcacagcacagcacagtcgtttttgcctctgcttcctccacatcgatcaatcacctgttcgccgtggatcccgtgcggccgctatctcggggaacaattctcgtgcacgccacagtgtgtgttcattcgagccataacgtctcggtgcaatgcacgaagaacgtagctatacaagtggccttgcaaagtacgagtaacctagcatcggctcggcgcagtggggcccctttcgtagctcccgacacaataccggcccctttttttcccggggatccggtgcgtgcaggaatgtgcaggcacatggggcgcttctcggaaagcggcagccggcgggcatggccatctggccgtctcgataccatagagaaatctcgaatctcgctttcgagcaatgaatataccacacctggccttcacatggaaggtggggctacctccaaaagctccatttctagccaggccgaatggccgagcggatgacgcggccactcacgaaacgagcagctgcaagcctgcaaccagcaggcagcaagaggagggtctacgccttctttacgcgaacgtggacctcgcctttctgatccaccggtgactcggccggcccggttgctgactccgcaaatccactgcgcgcctttgcgaaaaggatccaccaccccgccgcgacgcctatataggccgctctccgtggctgcactccggtaccaatccacttttccttccacgctaaggcaaacagcgcaacgcagcacacaacacaagcactagctgctcgatctcgtgaggctcgtagtaagcacactagctgcagatcgagcgaacagcc

SEQ ID NO: 6035 - DNA, 2000 bp, Oryza sativa
gataataaagtaagtcacaaataaaataaataataatttcaaaaaaatttgaataaaacgagtggtcaaacgttgcaagaaaaactcaaaatctcttatattatgggatgggacgaagggagtagcagaatctatagagatgtggccttcttaatcatcctgcatttgtatccgaataaattctgtgccatgtgatttatgatacgacacgaacaatatgatgctttctttataaatatcatatattgtttgtgtttatatgccatatccatagttatatactccctccgtctcataataggtgacgtttttgawtttttttatttacaacgtttgaccattcgttttatttgaaaaactagtgcaaatataaaaaaaataagtcatatgtaaagtacttttgacaataaagcaaatgacaaacaaaataaataataattctaaaattttttgaataagacgaatgattaaatattgacaaataaaaactcaaaaagacaagtaatatgggacggagatagtatatgtgaagttgctttaatcattttttttgataaaatttgttataggaccctgcaacattatagttttagcccatcgacacaaaagaaaaataatcaattttttggaggaaggcactgcgtgggtgacgccagctctggacaacgccttgttaccgtgcaccatggctggacaacctctgccatggccaagtcggccaagcctcgagctagcacctttgccttccgagaaaattgatattatgccatttttagggtggggtttcgctgaaatgctactttcgaatgtggtttcgttaaaatgccatttttaaacgaagccaacttgccggaatgccattttgtccattttatatgatttggaaatgttttgacacatacaccgacctttttgccttggcctatccacccacatgtgtgagaaagagggtcgttggcgatggagatggcgaatgatggcaggaaggggagaagagcaaagcgaaacgaggaaggggaagagcagaggtgctggagacgtcgtgttcgggagatgctcgcacgggcgtgaccggtgcgacgggggcggaggtccacgacagcgagacgactaagaagaagctcgggtagaaggcacatatgcccgcacgggcgtgactggtgcgatgggggcggaggtccatgacagcgacgtcactaaggaggagctcgggtagaaggcacatatgctcgtgcggctgtgattggtgcgaccgtggttgctcctagaggtgggttcagcgtcggagaatgcattgatggcgtggggtggacctcctgggtgagtgcgggcgcagggagtggcgcccctagagcgaattgaggaagggggcatggtgttggcgttagaatgcaggcttggggaggagcaacggagaagaaatggcgatggtggcttgccactgacgaacagaaaagcaattgaagagatggaatctataggggtattttggtcaaatcaccgacaaaaacaaggaaaaaaaatcatctattgataagaaatggatgaaatggcattccgacaagttagcttcgtttgaaaaatggtattttgatgaagccacatttgagagtggcattccagcgaaacctcgttatgaatatgacaatatcaattttctcatcattccctcacctcgaatatggaacattgggatatgtaaaccgcctggtgagtggtgactaatgacttctcggagtctatcgttcaaataaaaggatgtgtttgttgaaaaaaaatattataataacatggattttacttttcttttcgttttaataagcactatccaacttggacttctccggcttcggagttgagagccgttgggtttttggttcttgggccctaccctatccagcctattaccacctgccgagggaatgcgatgcacattccctttgctcgaggtcgaatactcggaatccacgacacgagacgagacgaaagcttttgccgca

SEQ ID NO: 6036 - DNA, 2000 bp, Oryza sativa
gcattttaacgaaaccacttttgggartggcattctggcgaaayccatcctgacgatggctaaatgtcaattttctcttttcattgagcacctatattactaagtgcatgtatgctatgccaaatgtttatacctagcatacctaattagctggtacgaaatcaacgacttaatccaaacccttatgattgaactaaatcctaaaaatgtattcttacccctatatcaatactaccaatcatccatagttaaaagcaagttggtctgaccatattctttatttttattgttttgtacatgataaggtatatacatgacgcaataaggtagagtgctatgtcacaataggtcgtctcttgcttaccatgagaataggtttatggtcctctagtttttcatctactccacatgtggctctcttcttctttttatttggctccgcttataaattttattgttcttaatacataggtgcgcaactcttttgtgtattaaaaaaaataattttcatgaacacaagagtgtcaagcaggcaaaaattgttttatatctaggacaacctatatgtttcatttataaggcaatatgattttatagggaatggttatgaacatgttgttcttttcatctacaaaagttagcaacaatttatacgattatcatatgaacacgttatctttttattttataccggttcatattatttcacagtattactgcaatagaaaaaaactaaattccagcactataataagaaaggatttaataattaaacacaagtatcacaccaacaataaagagaaggaaaagggacacgctctccctctcctccatcttcttccccagcaagaaagaaaaagcccctactttttataaccccacatctcccagggacccaaccgcaaaaccccacaccctccctccgattcccatccgtccaaccacgatccaacggcccacaaccccaccacgtggcgtaaatacacgtcgaggcgaggggcaaaccggtaatttccccgtcgccatcgggggctttcttttttatcagtgtctctctctccccccacccccaccttcccctgaagagagagagtgagagagagagagagagagagagaggagacgccaccacgcgcaccgagctcgcgattccaatccccgcacgcctcctccgccaccgccgcctcggcctccgccgccgccgcgaccagggttagggtttgccctcttgctccccctgcctgattccacccccccccttgagtttgtgggtgacccgtttgatctgtgggcttctttttcttttttttgtttttttcttggggtcgattcgattcgatcgatcgatccgcgtggtgctggtgttggggaggggggatcggttttgggttggtgcggggatcttgatgtggggggtcgttgtttgatttggtatttgatgtggttggttattggttattgggctcgaggggaaagcgtttatgtttgattttttttttcggttgtgtattaggctatgtgatctttcaggttgaaatgattagattcgcgtgagtttcctgatctttttttggggttgatttgttgtagaaccgtgggcgattaatcattactcggggtaaatgtgagtgggtaaaacgtgttacagcagatttacggtgtttgaatttgatttcgtcgaaatggataggcgcgtttggttgataagatgaggaatccacttttgtgatggcgatttcgttgcgcctcatagaaattaggatcttgtttcataaagtgtaagctcgccgcagtgggttataggttattttaaaagtcacaattatatggaaatttcgataggaaaattgtagcaactaggtgcttcttggattatcttaccgcccgatttaattggacactagttgatttatccgtatgttaaattttaaatttgtttcttatacgcatttcggtattgagttttgcattgtttgtttgatgaacagatcacagttgcg

SEQ ID NO: 6037 - DNA, 2000 bp, Oryza sativa
gaagttttggtctgaattctgaaggcttaaagccttaaaccccacagtgaactcttagagttttcaagtcttctcattgtaagagtaaaccctgaactatttgatcgccttcgttcttcaatcttgacgtcttgtggttgtggtgtagaggattgaaagcagcatgtgttgataggcctgagcctgcacctctcttctggaagagggatacgcaattggtttcagtttcctgtcagaaaaatagaatagcaatagcgccaacaaaaaagaaaagaaaagaggttccagtgctgctgatagaaaataaaaaagaaacattccatggattccatgcacgtgcttacgatttatggtagattccaaaacacaaaaaatattatgaataaactcatccttgatctatactactactcgtacaaacataagatgaatacattctctcctctttttttctctgcggatttgctactgaacctgatgaaatttgaagttctggactggtctgaactatgaaggcttaaaccccacagaaacgaaaaaaaaagaaaatacagtaataaactcttcagttctcaagtcttctcattgaaagagtaaaccctgaagtctgaactgaacatgcaatttccttctagttagttgatcctgacaggtcaagtctgaaccgaagcttcagtttctatcatcctcttcttcccccaggttgctgatcctgtcaagcaacgccacgagctagtcaatcaatggccagggattagaataatcgatgactaggttccagtactgtaccaatcaattctctactgaattccaaattctcaatacaggacgcttagggtgtgtttagttgacgttaaaattggaagtttggttgaaattggaacgatgtgatgaaaagattagaagtttatgtgtaggaaagttttgatgtaatgaaaaagttgaaagtttgaagaaaaaatttggaactaaactcggcctaaactgtaattttttcctctccatttgtaatttactggggtgtcattgtcctgcttaccaaaccaactttccaagctggtgtgtttttttttcctttgccgcttgtcgccgtcgcatttgagctccacaagtcgtccgtgcgaggtttcaaacgtcaaagtcctcttcacattgtcctgcatatatcttttatattccaagaaatctaaactcaatcaagaaccgaattttaaaacccctttatctttttcggggaaagaaaacctttaattctttacttctaaaaccctgttcagccccaccgtttagcctttacattaccaacataagctaaactttaaaattaaatttaaacttagagttaattttaggttttttctcatgtttatttttaagtatttgcttttgtatcactaagaaaatataactaattatttaatcgttaataagctgttccgctaatacccaaacactaaaatcaaattggcaacttggcatgtactccttaaaaagtagaaattgatatttgtgaaaattatataatctgaaattatagtattatgtgaaaaaagaccggacaccatactccttagacaataactgtccaacggcatctgctctcactgactcactcatctctagaagaagcaaacaaacaccaactactcctccatctatctgtaccggattatcctaatcgcgtttactaaactccgctaaaatctcttgtattcccacaaaatttccccaaaattttttactaaaacttttttctcaagatagaaaaaactatatatccttttggtttgcaaaggttttactaggttatttgcccccctcttctagaacgcatccagaattcgtggactctgcgacccaactcacacggcgaagcacacagaattttttttcccaaatccatttattttcctctcttctctctctcgaatcgaatcgaatcgcctcgcctcctttgttgaattgaatccaagctcgattcgccgccgccgcacgccgcc

SEQ ID NO: 6038 - DNA, 2000 bp, Oryza sativa
tgaagaagatgcacgccggcgacgaccgcatgaaggctgcgagtgtccaacgtctcatgaagcaggttgagaacatgacgttccgtgacggagagaacgtcggcgacttcgcgatgcgcatcaacggtctcgtcgccagcctgcgcgagcttggtgaggagatggaggacagccgcgtcgtgaagaaagttctgcgcgtggtccccaagagactgaagcaagtcgcggtggcgattgagatgctcgccgatatcgacaccatgaagatcgaggagctcgtcggccggttgcaggtggcggaggacgcggacgctgaggatcaagcggcgtctagcgcggagcatgctgggcaactcctgctcacggaggagcaatgggaggcgaggcggcgtcaacgccgtggcaaggagcatgtgcacggcggcattggtgagaagggcggcagccacgacgacgacgacgatggcagcagcacaagctcgggacacggtaggagccgctaccgaggaaagtgcttcgactgcggagaacgcggtcacatggcgaggaactgtccgcggaagaagaaggaacaggcgttgctttgtaacgtcgatgaggagccgacgctgctgtgataacgaagtgtgccatgtcgtgtttagggggagattgttggaaataaacacgtcatggtgtattcctggcgtggttgagtcagtgtgtgtgtgtgtcgtgctgctgcatgtgtgcgtcgtgtgcgttctgttagtttgattgagtcgtgatcgcgagtgcatggctgctgcatggttgtttgcatggccgttgcagtgttgatcgagtcgtgggagtgcgtggtgtgcgtggcgtcggttcttgcggaggaagccgcgtcgtccgggcgagcgtgcggctcacggcgacattgagcgggttctgcggaacgtggtgcaatggccggcatggaggctagctcccggtgtgtccccggtctataagaggcccttgtactccttcgttgtttctttgcaaggttcagtgagtaataaagccaagatacaggagckatcggctccgcggcattcgtcgctgtaaaatccattgttcatcgtagcctcaccggcgtttgtgttcgtgagtgtgagagtattcctgggcttagccaacatcgtctgccgccgcccggcttgccgctcctccgccgttggcagtcgctcctcccccgccgcccgcgcactgcccctccccccgccacccgcgctcttcgcctcccccgttggcgcctcgtcccctccctccttgtagcgcacccgcccgtctcgcgcgacgccagcgtcgccgtcgtgcgtggcgtgacgccgtgacccgtcggtcggcctgcccaagtcgtagaggagaagaagagtgatagagatgaggaagggagagaagaggggagagagaggagttgacgtggccatgctgacatgtggggcccacgtgggtcccacgctgactcagccgccacgtcgaataaaaccggggtcaaaactaacaaaggatctaaagtaaatggttttgttagttgagggacgtccggtatatggttttacggttgggggacaaaggatctaaagtaaatggttttgttagttgagggacgtccggtatatggttttacggttgggggacaattttgtaactcgatgacaagttgagggaccttgggtgtactttttcctatccgcgttctttgacacgataaaaatccaaaattaccggtccggcccacgacgcaggtgcggaggtagccacctctctttccgcacgctcccgtccccaccgctcttatccgcttctctccccgtgccctctcccgcttcttccccgcgcgtagccacgcacgcctcaccgcgccccccttctccggctccgccgcgcgttctacttctaccgttaccgcccgcggcaacaacagctaggtagatacacgtcgcgcgttcgagcctaaggtacctgctctctcgcgcgcgccaccg

SEQ ID NO: 6039 - DNA, 2000 bp, Oryza sativa
tcctcattgatcttcttttctgaattctgaacaactctgcctgctgcattttttctgatttctgaaatgatgctctgctcgatcttggcattctgaagtctgaaattgctactgcagctggtattatcttgagctgcttttcacttctgctgaaatgtcgaattgtcgatgtgcctgtgcttggaagatggtgcttgtgttcttgtaagataattttggattatgatgtcgaatgcatgctcctggagaacgctggcagttgctgctatactctgtttgcgtttgtcatactcctctatttttaactttgacacagtcttcgagatactagtttgatcaataatatctatataaaagtaaaatattttaaataaaaagtaaaatgttttaaataaaaagagttgtatattgttatagtttatttaatgataaattaccatcaattacattattgatttttttattttttttgctattaatagtcacaattataaatatttgacttgatatatgctaaaatacttacttatttttggatgaaggaagtagtcggtatggttgtttctttgtttctattagcgaatgtcgttttgtgacatactaaaatgctataaaaatgagaatatgggcaatcttctactactatcacatcatcattttgttctttttttttctttgaagcggattgcgtatgttgtacaacattttggggtgtgaagttcatggcatgctcacgccagacgatgactgtagactatagtactatttcggttgaaaattagcatttgcattattattctattagttagcctgtgttcttcttgaggaggttgggaaccatccctctacacgcaaagtggtgtgatagagtaacgcatgattaaaaagaattaatatgatttttaaagcaattttgttataattgtttttacaaaacatactattaacacgaaacggaaggggtgagttgagaacataagacagatgctttccgaaagaacgattgagctaccctgattaatcaataccagtagcaaaaatgaccagcaatcctgcctcataaaacaatgacatataggtttgctaatgccaactgctaagccmaatacaaattcgtatctgttctagaagactaaaagtagtctattggaaacagaacaatccggtcaaacagaagcatcttgtatgaaaatggtagtccaggacgaaaaagaaaaaaaatgagccgacaactacgttgacatcgttaggtaaacgtaaacaaaattccttacgaaaaaaaaaaamcaaaaacacatgtagaccctgtagagaccgatcagtggtccccacgagaccacgaagaccatgtccattggaagcgtagaagaaaagcggaaagagtttgaccgatgcatcggaacacggcccgccacgctggcaccagacggttttgatgggccggaccagtctcggcggctcggcccaccaccacccatccatccatccatccatcgcggcgcatcgtacggtccagagctaacccagcggcgggtccaaacccgcgtgcggcgcggcgcgtcaccatccaccgtttattcgcagctcgttttatcactacttaaccctttcttcgagatttcccttttcttggaggcgccacgtttaaagggcggagtcgctgtaattagagaagaggatttaaagagagagaaggccattctctcttgattgcttggagaggaagaagaacaagagccgccaccgccgccgttaggtttttatttattttttttctcgatctgatccgaggaggagcgaagcgaagaagggcaagatgcattcgacgaatctgctgctggaggagcccatcaggatggcatccatcctggagccatccaagcccgtaagttgctcgaatgctttgatttcgcttcagatttgtttggkttttttttgttgatgaaccctaaattcgattgatctgcggggaaaaaaatgcacagagcttcttcccggcg

SEQ ID NO: 6040 - DNA, 2000 bp, Oryza sativa
gagccctccaacttcactcgcggcgtagggaaagtacaggggtgagcagcatggcacgcgtcggcgaaggtggtggcatgctccagtgtaggcggcaatgcgggcagcatgctccaacgaaggcagcgaagccagcgacatgggaaagaagcagctatgaagggagtcgagctcgaggcggccctgccgacctgccttctccactctcggcaaggggttgctggatccgaggaggtccaccgagtttcccccaccgaagccagtcacgtggggaggagctcaaaccctgcctccaccacgagctccttcctacgacggtgaagtatctccgggtcggctagacatatagcggtaggttgatgcgtgcgtgcggcatggctacttgcttcttcaatttcctcatgccgttgtctctgtaggtgcgggttgatctgtgcctagtcaatgtaccgtcacccggagctcctcgccaccccgagctagctcctcttccaccaggtgcacctccaccgcctccattcagcgagcgatgggcttgtctccaatgagattgtgcggtcaacgcaattgatgttcgcgagctagcttcaccattgccggccaccttgctcctcctccacgagcttagcaatggcgagtcactcatcaatcttgtctccatgaaatcagaggatcgttggattgtgaaaaaggggaaggagaaggaggaggagagtgtgacataaggaacccataagctttttatatttatagtgctgagtagactgccacattagcaccatgttggttaaaaccggactacaaaccggtaagaggggaggggaagggggaggggggtaactgcacggaactaaaagctaggggatgcaaaatacccggctttaaagtttagctagatgtgtattttaggcaaatgtgcaagagttcgggggtataaaatggacttatctctttttctcttcatgtcttttgcatgcatttaactaacatatcttcctgtaattcgctttgttttaaatcctctatcgttcaacttcaacaccacgttatttgcacgcatctaggtgatcttgatctttgtattaacgatggttgtggcttatattttaaaataaagaaagtggaatttagctcgaagaaagcggtagagagaaatccaaaatctggaccttgcggcggcgagagaggaacaaacctacaccgacagtgttgtcaatatgtgtgatccagcaatagacaaattgtacagggatgatgagctagctagctagccgtgacagccttctcttccggtgatccgtctcgtaacgtctggaagcagctagctaccttcctgcagctatgctccaattaatcaacttccatcgtatccattgatcgatggctctttcttcatttcaaaggagaccttagaattctcttttatatcaatctttttacaggaacaaaatttaattcctatataatttgttaaaaattctctgttctaaaggagagggaactaatttcaattggacagatgagttagctcttagctctgccgtgatcatggaatccattaattcatctttggcggcactattaatccattaattaatgtattggatcctcgtagacaatacggagtggagtactgtttaatttggagcttagccatccactagcttagctagtacagcttagactgccatggttgcggagcaggatggtgacgtggatcccacgtgtcaagtggcaccgatctcgtgagccctatttaatcccctccgacccgcccgattcctccatatccgatcccttctcgatcatcgctcatcatcacaatcatcaacagctcagttcatccgtgccgtgttaatttagctagctagcaatcgagctcagttttcctaattaattgctagctcgatttgctcggtgatctcttcaattcgccggagcttggaatcaatcgagagattagagtgtacgtgagagctagcgggagatcgtcggcggcg

SEQ ID NO: 6041 - DNA, 2000 bp, Oryza sativa
tttctgtacttctcttccatttcactttgattcatatcagattccagtttttgtttttttttactgactgtagagtagatctttaggatttatgaacaagttattgttcacgttatcagatgaactttgtgtattctgagaactgagtgttctttcttgtttcaggcaaataatggcaacttctctgtcatggagggagggagtaggaaacaacctttctccaaagttccttctttgggtggtttgttggaactgttggatcagtgagcctataattcgagccaactatcttcgagtgagtacagttgacatgagcatcgaatgcgatctcgccttatctttcttttagtacctcgttgctgaccatcccctttgacagatacactgatgtatggacaatgctaggctcagtcagtagtcagtggttgggttgctgctttcttcaagtttcctgccgccctgatgctcgtcttgcacggagatattcagatttactgtgtattttggtgaatggtaaatcataatttgccctgtaatgttgttgctgtacatgtcagactagcctggattatttcactcaatttgtgctagtgagaaccacttgctacgtatggtagattgataataaagagattgtgctgagtccatgcatctaaaactcggatactttttttttttactgaaaacagttggagagacttctgctgcgctatattaatagatatataataaaactcagatacttctcccttgaattattagttcgtttctgcatatatttaagcttaaaccaaacatctaaactattaaaatatcttccatcagattgagttgtatgaattctcttaccaatgcaatcccaaatgtgattaatgaggaaaagtttttttttcctctttctgaataaacccgagttcatactgtacaaagttcagctgtattgggcgttcagtccagcaaccggattcaaaagtcctgcttaagatatcatctgatcttccgcaaccagtctcaccaagattatgtaactaattcatagtctttaatctcttcgttccaaaataaataaatttaatacttaattctttatttcaaaataaataaatctaatacgagatatgacaatcctatccttttgagtagctgaatgtgttgtaagatttggaggctgtgttcagacctttgtttcttttttcttttgtttggattgccgctgaggctgaacctatgatcatttctagtaaaagaaatgggggttttgagtcttgctcaaaagaaaaaagatatgacacattctattatcatgaatctacagtaaccactaagaaaaacatcatgttaaacattaaggttccgttcttttctccaacaagagttggataaagattaagattttcgtggcacgcttttttaaactgttaaaaggtgtgtttcgtgcgaaaaactttttatataaaaattactctaaaatatcatattaatctatttttcaagtttgtaataattaaaactcaatcagtcatacgttaataccatctcgttttgtgtaaaaaacttcatcttaacaccgcctaagtgtaaaattacaaatgagggccggtgacgattaggggattggttttcgtcggatgtcgaaggacagagtagtggaggtgctcgtctccgccgagttcagtcggcggagctcaccggcggcgacgggacggggaccctaacttttacaaaatagcccctacttggatcctaccaactctaacttttgcacaatagcccatatatttacatagtagcccccctgtatgatcctaaatattacagcatagcccatactgaccccgatcacaattcgcaacggacaatggctggtgccctacattttacaaagtagccccccttctgcttagatcctactagtaactttttttacaaaaatgaccctcctgtaaagtagactggctcgtcttcttccccttccatcctccccaaaatcgtcgccgcgg

SEQ ID NO: 6042 - DNA, 2000 bp, Oryza sativa
gcagagctaacttgtaaccgttttccaggttccttatagcatggtgaaagaaccagttccaatggggccagggccatggggtkgcgaaggaggccggccatgggatgatggtgtctacactggtgtgaagcaagtctatgtgatgagaggcacctttatcggctcgatacagatcgagtacgacaggggtgaccaatccgtctggtctgcaaggcatggaaccagtggccacataacccatagggtgagtactgagtgctattatcaatcaagttccgttgtcaaggaataaaattcatgaaacatacaacaacaatataggatctgttcatcattcttcggtggcatgtcaaacaataacctctctccaaatgcacttgcagattaaactggactacccacacgaggtcctgacatgcgtatacggctactacaacaccaacagggaggaagggcccagggttctgaggtcgatcaccttcatcagcaaccgagggaagtacgggccattcggagaggagttcggggcatacttctcgtcggcgaagacggaagggaaggttgtgggcttccatggccggagcgggcaacacctggacgccattggggtgcatatgcagcactggatgggagacaggaggcctgctcccaagtacgtgctatcaaagtacctcttctgattgagctatggatgaaaacttgaattcctttgaaacaaaaagtgaatacttgaattacatgtagtttagccaatagtcatatagataacagatgggctggtttcgatttgagctttggaggctgtaacattttgggatatggaacagtttaagcctgcggatgagtccgttccttgtactcaggcaggcaggcatatacttaatgcatgacgatttatgagtaaattcaaatgaaattcacattttctgattcttttgcttgccgtggagaattggagacctgttttcaagacttgtgtcatttgtgtggtccactttctccgaatttgttgtggtcaccagattagctgcactgcatgtctgcatctctgcagatctcatgttcatgatttgagacctcccggccacttcaggacgggcatccaatgttgaattcagcaggaaagtataatgcagtaatgcacatgaaatgctttgaaatcaagtgctgtgcaaaactgaaaatgaggcaacatcaaacaagtggaaatgaaaatgttttcttttttattgaagtggaaatgaagttgacacgctgcttaggagctaactagagagtcttcttaggaaagctttagcttcgttttaatccatcaaaaaagctaaaatgtttatggtacttttaattctagaataagctgtagctaatcgaatcaaaaactccccaaacatacccattatcacatatcgcagccgcccatgtttaggaaggttgtcccttcccttggtacaagcaccgaaaaaatgcccatccgatccgaccgttcgttctagatcggttccagatcggacggccaaggacagagatatgggacaccgctcattacaacaagggtctaaattgtacggccgcattttttcgtttatgcttatgtttattattcaaaatttaaattttcaggcttaaatttgaaattgattttagagttttttcatcaaaatttatttttcagtctttgcttttagattgctaagaacacgtatataaaagttttattcacatattatttttcatttgtaaatataccgtttggccaattgggggccggtaatttcgcacagaatagaggggcatattcgaccattcgtcacgtcaccagctaggataaagtttcgattcctctcccaacgacaatatctttgggaaggcgagccatggccaaggggagcacatagtcagaacaccgcagagcaagtgtgtgtcctgcctcgcgtgaaagataagcggcgctctgctctgctcgccgaggagagagagaagagagagagagagagctagag

SEQ ID NO: 6043 - DNA, 2000 bp, Oryza sativa
caaataaaagaataatgaagtttaaaaagtgcatattacaatttcttcatttctatagctcatcatgtactcatcgcacatatattatattaatgaaacaagctttcagtagtctgaataagcattttcatcgttattataaaccatctctagctccgaaggaaaatcgatattttgtaatcaatattgatgatgctcttacaactgcaataggcaatcaagtgatcaacccataccacatccttacgagcaatttattttgtcctccctttgctattacggagtattcatgaaaagaaggtgtctctcccagatgctcctggcccaggcgcatcgcacgaccacgacaaatcaataattggcatgagataattaacaacggctcccctgcatcccaaaaggcaaaagacaccagcccgggttgccaactcatcatgtcatcctacccctcccagccctgtcacgctcttgttctctccctagaatcctgtgggctcggtctatacactactagctactcgttcaggaaatctcaaagcaactggtgcattcaggttattccggtttaccttaggcattcctcctcccatgaacacaaagcatccttatctaaaaagattaacagtgttgatcgtgcattgttttttcctatcataattgatggtaaatcccatgtttatttagtactcactcagtaaaactaaaatcccaatctttcaccgaggtatgactaaatttttcattatttctagggagcttcttttccttaaaataaatcaaatttataaattttgatcaaaggtagtcaaattagataaacttacatgatattctctacttcccatatttcaaaaatagcgacttagtatgagatggaacacatcctaatattaggtatttggacatgggacctatccaaactcgtaatattagaatttgtcacatctcatagtaggttattgtatttttatgatagagttagtatttttttagaaattagttttcaaaatttccttttattatatatttatagtttaattataattatgacataatatagtttaggaaaaattccaaatactccctaattttgattgaaagtcctcaactttaaaaccggatatttaatcccctcccacctcaccaaaactttataataccattatatataatctcctaatgtggttttgcaatgtggtttttaatctaatatgtatatacgttgaatgagtttgactacgtggcatacacattggatatatgtgttaaaatctccacccaaatctttattttttttcctccttgtttgttctgacttacataatattactatgatatcactatcgagtataaattgagaaccgagtattaatgatatataaatatattatattaattattcaaaatcactcatttatgcttttaaattcacaaaaccaccatccgaaaacaccttaggtcttgttcggtttagagagtattaaagaatattggaggggattgatgaggaataattctacaccacaatacatgtggaataaatccccttcaatctctccctcgcagggattaaccgaacaaggcattagaggacaatataaatgatattgcaaagtttagggggttggatgtataattttaaagttaagaatgctagatgaatttcctaccaaagtttagtggggtatatagactctttaatatagtttatccatcgtaagttcgtaccgacagtgaaggcacatatttggtcggtacaatttaaggaaatagttttttccgccatgtggttggcaagaaatatttgctgacaaaataatatgtactactattgatatggacatttgccacactaaataataaacacactccaataattccacatcttggtctatagaccaggcctaactaactcaaacccgtctctgctccccgctatttacacttcgcaatacccagatgctctgctcccctcgtctccctctgcggcaagctctctc

SEQ ID NO: 6044 - DNA, 2000 bp, Oryza sativa
tccctccgtttctaaatatttaatatttaacgccgttgattttttttaaacatgttttactattcgtcttattaaaaaattaagtaattattaattcttttcatatcatttaattcattgttaaatatacttttatgtatacatatagttttacatatttcataaattttttgactaagacgaacggtcaagcgtgtgctaaaaagttaacggtgtcaaacatttagaaacggattgagtattaattagatgcaatacaaggaaaaaaaattctcatgcataagcatgcgcgtatgtatcggggcatccctccttaaattttgacacctatagctgcacgaaacttggagcaactataccttctaaacatcccccgtgtttccacataaacttgattggtcggtcaagcaaccgctactcatacgcgctcgagacgggctcacaagcagctagggtacgcttaattgccagcacggcaagctggccggccgccgggtaacatgcacgcagtggtcgtgccccacacgggcgtgcatgcagcgccgcagggagaggaggaggctttgctcgcgcgatcggtcggactgggacgatcgatggagtattaagcaaacaaccggcacggacggacgtgagcgacaagtggttggctggagctggaagtctggaaccagttacatattcgaacgtcatgcatgcgtcttatttgaaaccctgggttttcgtgtccagtttgtccatctgttttatttaaaaaaaatatgaaaaaaattaaaaagatgagtcacgcataaagtattaatcatgttttatcatttaacaacaatgaaaatactaattataaaaaaaatttcatataagacggacagtcaaacgttggacacggaaatccagggtttgtttctttttgggatggagggagtagtctttaaaagagggccattatttcttattattactctatctaacaacaaggtgtcgtcttttgcatgaaccgataaggagaacgaaagctttaatttgacatgctgggccggctcctgtcattctgtcaatgccaaagcggatggcaattcaaactggccactaattttctggtcggtttgcttaattttaatttcaaactgaacgcttgaatactcaactctatatatatgctgatttgctgaattttctgctcggtttcagtacgatcgcaatcgattcttccatcattatagatactcatgtcacgtggacatcacgttagccaaaacagctcataacgctatcgagaaaattcgtttgcatcgattttagaagttgtgggacgacacctgatttcgcggttgagggatgtggcacaaactcaatttgtatagttaagggacataaaatggactttgctattgagcggattgagtacagtgagatcgagagcaccagaagcgaagcagcacgtatcactcaatgatgggccttgaccgaaaacgacgctgtcagactgcgactgggccgagcgctacagtttcctttcagcacgcgcgcaaatcccacccccctggtccccttgcctccctcggcccatcccgccgcgcacgcgagacgtgtcgtcccaatccgccacgtcctcgcccaaagctccacgacagcagccagcagcaggtgaagcagcttggcaatttggcagtggtcgtgggctcgtggctggaaagtggaggaaaccaacctgcaaaacccaaggcggcgtgcgtccgtcggtggaagccgcggacgaatcgccacgcccaccgttcggattggccccgtcgcactcacacaacttgtgtgcagccctgacacacaaccgcatcagatgagagctcccccggaaaaagcaaagccaaaaaacccccgagattttacagccataccccgcacaccacgcacgcagatcttttctcctcttcctcctcctcccttgactttcccccacggcgaggcgagggcgcgaggcggcgatcaccgcgtccaagccggcg

SEQ ID NO: 6045 - DNA, 656 bp, Oryza sativa
  misc_feature (1)...(656): n = A,T,C or G
atcagccctagaatgakaagtcgttaactagttgtagagmtggatatgggsatamagaagccaggtatrtgtgcagrcakgtagggagttggcacgsccgcacatgcacgnatgrtgrgastgagagtgagttggsrcgagggcaccacctctmcacattatcattaatgtttcctattgtttgttttgtttgtgtctcgacgagatgtataaatttggttggtacaatattacaaatattaatatatatatattatgaaacgtacattgtacgtgcatgtttatactagtataatatataaaacagagggagtactacatattttccctatcatgggtaaacagtacagtgaactcggcccatttaggcccacccacctgtatttggatcgagacccaaaccagcccacgaaaatttgggccgcaaaatacgggtgggccggcctatacacttttgtgatagtgaacatgcagctttcacttcaactggtttagctgcgacggccagggcacgtcaaaattaggcagtgtggggatcggatcgcacgcgccacggggagccggacgaaaacgagaagctcacagccaccgccgcgcgccaccagcttatactctctctctctctctctctctcgtcgacgcgccgatgcgccgag

SEQ ID NO: 6046 - DNA, 2000 bp, Oryza sativa
aagtgccacgttaaagccacgtacaacgaagactcggtcgatatcgccacgtaggcgtcacgtcagtgaaaccgccctccaaaaccgccgagggagtcaaattacaccggtttcaagagtttggggggtcaagatatctggttttgtggtttaggatcacggattagatttcgatcgcttttgagggtcacgaagtgaacttattccctttttttttcgatctaagtaggccaataaaattcagatagcggatagctttttcgatccagttaagtccagcattatccgaacctgctccacgggccgttcattcttttaattttgagtaaattccctgtgtacccctcactcaatccctttcgtacccctgaaatttacccgatctcttctacaatctacacccttaaaattttaacttgatcccttccatatccctaccgttacattttccatcatttcactattatatttggttgcaaatgtccttttacccttgatactttaggtttgaatataggcttcaaaaacgattaaaaattttgtttgagtgcacagtatgtacattttataaaactaatgagactaaataattagtgcaaaaaattttgacataaattttagaaataaaacaaatgtaataaattaaaattttttatttgaaattttaataggacagtggattttttaatcgggagcatttataaaaaaatattgtgaacattggtagtcctatctttatatgaatgctccctaattttttatgtctttttttaaaaataaatacatatttttttatttcattatctaaaaataaattttgggataaataatgcatcgcacaacaaactaataactataatagtctcatgcgagaagtttttacatttttaataatataattcatatagaaattagatagtcaactaacggtcaactgacgggaggggtatagaaggggtcaaaatcaaatttgaggggtatagaaggaagtaagcaaaattcagggatatataagggattagctaaaattttagcggtatacaattgattttctctttaatttttcatgactatgaaacacgggcaaatatacggtggaaaaaccccaactttggtaaaatgtttgttcacgaatggagctactgctcttgacgatcttggattgatcatctatgcatttcaagattagcgttgacttggaaaaggagaacctgacatagataccctgaagatgataacctgaaccgacgaagaaatgtttacagtttactgcatcgctgagaagtaagaactagtataaagtatcgatcagttcgttggctcgatctatctagtttagcatcatcatctcaccagattgtttgttcgctgcaaaggtagctatcaaccaccccgtgatgcatctttttagctacatggaaccaactttctcatgattctcaccgtgagatcgaaaccacagctgctctgagttgacctccttagcataatcctgaatcccggatgcaatttgagtgtttgactatgaacacagcttgaaaaagactgccatggccactaatctactcactagttatccttagaaagaattggaccttggctttctacactttttttttccctgtacctatcgaactctttgagaatttgaggtgtttttgcatccattcactgatactaccatagccacacaagcagaagacgtaaatctgaataattacaggaataccgaatactcctatgtgataaattcagagataaatgagcaacatgccaagtccgatgctttccatggcgcgcagcggctgcttcccgcgaacgacgcggcgtggcggtttccgggccaacggctgacatgtcggccccacttttgacctctgcaggttgggcccacgagccatagactcccagtggcgcttaaaacgtctcgaggcacgagtcacagcgctactccacatctgtttgctcgtgctctccggatctcgaatccatccgccgcg

SEQ ID NO: 6047 - DNA, 2000 bp, Oryza sativa
tgaaagggaaatgggcgtgttcggagtgtatggaggaaacaagaagcaaatggttgaagcattcacacaagacggtctacatgggtcataggagatttctcccaaggtatcacccgtataggaatatgagaaagaatttcaatggacacagagatacagtcggacccccggcagagctaacagggacagaggtgcacaacttagtgatgggaataaccaacgagtttggaaaaaagaggaaagttggaaagacaaaagagaagagcacatcgaaggaaaaaacagaggagcatgtggaaaaacaaaagacaaaagagaggagcatcaagacaaggttgtgtttggatcgaaagtcgttgccttggtaatcaagttgggttccttgatccatccatggtgaacgaggttaatttacaacagagcttcactgaggtggttgactatgtcaaccggtgtttatgggcccatcaagacaaggagtatattttttacatagaagacttttgagaaaaaaaacatagtttacaaacgttcttacgaaaaagagtggtacaacataggaaggacatgcatgaaaatcaatgcggatgtattttaacatttaattcttgatgaaaataattttaaaaatagtttgatgtaaattagaatatttttaataaaataatatcattaacttgacattttaatttactttcgcataattatggtttttttcctacaaatgtctaaacaaaatttgtcttcgattagcatagaacataattaaccacgcccctatttagcgttatttctaacgtgttgacaagctatacgcatatacccaataatggtatttataattatataggatgttggtatcagatatacatgagattgtgataaaagaaacggaagagaagaacttttaggcgttcatagtgtgtcatgagcatttgcagtgtctcgcgcgtcagctagaccagggacaatctttagctatatactccctccgtccaaaaaaaacccaatcctatatcaggattgggttactcaatcctatatcaggattgggtttttttttgggacggatggagtatgccacagtgcaagttgcttcttgtgggtcccaccagtgccagctttaccattttttttctctcttctctctctcctttccaattttccccaccgcgtagagagcactgcgcatcggcggagcagccaagtgcgacgacgccgaccggaggggcgcgggcctggggctcacggcaaaccacctcttcccctccccccccccgaggaaaacaatcggcgagcgccggcgacgcagaagcggtggacgggtcagcggcagatgagtcggtggtggaggagctcggcgacgcggatgtggacgggtcagcggcagatgagtcggtggtggaggagctcggcgacgcggatcaagaggcgtcgaccggcgagggtgccactgcttcaccatccaccacctccatgggcgagctcctgtcgtcgccgccggatgggacggcgaattaggcgcggatctagatcggattgacgcctctaccctcccctcttcggcgagcttctccggcgaggacgtggcttctcggcaagcttcttcttctctctcttcctagaaaaaatcagctctcttttgacgaggttcttgtagccaaaggaagccacgcgaacccgatgaaaacgtggaccccaccattttctctcctccacgcacacattttgtttatatggatagacattaccacacacatcacgtgtgtgcattatgaacgcttttataattattcagacttcttacatggatatttgcagtttgataaactgacatataattagcagttaaaagaaaaagattagctacgaaatcgctttttgcccagttcaaaaaagacaaaaatcgccattagctggctgctagtggagtatttctgggcggggcgctctcttcccttcccccgcgcctccacttccgcctcgckckcgcaccgacc

SEQ ID NO: 6048 - DNA, 852 bp, Oryza sativa
  misc_feature (1)...(852): n = A,T,C or G
gtttttrgaaataaaamargsaawtttgcnamcttgggggraaaaawcccrgggttaaaagggttmaagtaaaasgggaaaatccccaargtggaanttgrggaaaaagggkgctyccaaaatttytttttggcaaaaaggttttcaaaaagtttaaacctaaaraaaaycggscwaacaaaggtttggccaattttnargrsycmgcrgwwntttgggggaaaawctgaagggtaattcaaatgggccccccttgrraaacgkkgaaaacggggrhyaattattssggggtaaaaawtttttyccccaaaaaccsggttcmaattttarggycttwaaaaaaycmaaaggggccgawtttttacgggaaaaaaaaaagstttttgaacctgkttaarrataaccggaaaaggggaaayccgggaawamcmmccttkgaaccaatwcytggggccaacctttwrggraccccccawtttccsgttkggcttkraattgcaaaaatgaaaaaatcggggggtttcccccccggaaaaacccttcccktttccgscgggtttgacccaaggacccaatttttccctttawtcmccccaaatcmaacmaaaycccycsaaacccttawtcsgawtccccttkgccccgcccccccccccccsgggycccagscyyccaacmrgsccmgktaccctaagggtccccstttgaaaccctyaaattcsaaaaggggggggggggattggggttttttttaattattattttctgttttgtttgtttgggttggttcgaggtgatgaggattttggtactggttatgcagccggggtgggtggaaattcctgattggtg

SEQ ID NO: 6049 - DNA, 2000 bp, Oryza sativa
ttcagaagacagagcactgatgtctgatggtctcttgatatagttaccagatgtctgatggtcatgataaggtgcaatgggccattgaaaaatcttatctgtattcgctattcagtgaggtcactccaccatttgatatagcatatagagggttggtgaatctcagaatatggaaattgtgtgggggttcagagtccccgtggaaattaagttttcctttggcaaatgtaccatgaaaagatttaccttcgtaggaaatagactacctctagtgttaacaaaaccaattggttttaacgaaaaccgttggattaacgtaaggagttagatcaaatgtcattgtttttaccggctttcgcttggtttccagcaagccaatggagggtggtttttacttctaaaacagaaagaaagttggactgaagagatatggattatacttttcttctcctgtcacttgacggtttatatatattggtatgatttcttccctattttgtttccctgtcttgttcagttagatagatttgtaataagatagcaataattgagatgattctaaatcttttaaaatttctacttttcagaatatatcctggagcactctactttgaccagaggataaaactaaggttgatcgtttggcatgaaaaccatctattgaccctcatatgctaatataagtgggatacccctacttcaaataaaagagagagagagagagagaaataaaagaaaccattgttctttgactgcaaatttctttaacaagccatatgaacgtgcaatatatcgacatatagaataataatatttccacaaccattcatatataatctaaaagtatttctaatagaggcatcgatccatacaaggaaataaggaagccactctagcattgcaggaaacaacttacatatatgcgcgatcaactctaagagaaagccatgcaaaaagattgatatagaccactatttttgctattcatgatttaagcaattcaattatattggtcacaaccaatttgaacggctaaataagtcaacacttacacaatgcattatgtggaccccacttaactaagacgtcagatatgccataaataataaatatacaatagctaacggctataaaattttcaattgtaaaggcgcgtcaatcatatttggcacacttaactttttaaaagctagcgttacaagttaggttttaaccatgccgtcgtatagtagtatttatacgctttgttcaaaacacaacggtaatatgtattattagctactaccttacaaacataaatatagtctcaactatccttatatgacataaataccaacgtttttttttcataaatttttcaacgacttacaatactggaagtgttatactccactattcaatggacaccataggccgccgcagcaacccaggtcattttctagctccctgggactgtatacatgtatgtaggacccatgaattggtgaaaataaggatacgaatcatatgagagccctgaaaacatgaacccaaacaagggaataactatatatgatgatgatgatgatgatcaaatwaaagcacaaaagggttgtggttctttaaataaaaccgaacgcaccaacacgggccgttattcgctagggaacgaatcgctagtcgccgaggcgaggcggaagaatacgagcaaaagtcgacgaccaaaccatgggggccagcgcgcgcccaaacgtccgtttcccgtttcgccgtcagcgcgactcggcgagcgagagagcgagcgagcgcctgtgcgcctgtgtggcttgaacggcacacccccgcccgcccacgcttataatactgtcgcttacgcctttattttttcttctctccttcatctgttcgtcctctcctctctcctctctctcgccctctccacactggcacactctctgtgaatctctccttctgttcctggttaattcgctcttcttcctctcgtatctccgccgcgatcg

SEQ ID NO: 6050 - DNA, 2000 bp, Oryza sativa
ttcatggctcgggaaaaaatataattccctcatttcttctcttatatatcaaagaactttacaatgttctgtcgatgtgtcatatcccttaaaaatcatttataatatgggatagggagagtaataaaagcatcgccggagctgatccctggctccctgcttgtacttgcacgtacggtcattgtctcattgatgttcatagctgtacaatcgatgcatatcatgcatatacgttatgggcaatggttatcaagttgcaaaacgcatgaaaaacatataaagataccgtacacctgatcaatgaataagagggtggaacccacaaatgcgtcactcaactggcacgcgaatttatgttgattataaaacataatattttatcagcaacataaaaatgaattcatggataaaattttatatacgtgtcattaatgattttaaaaccaatgttagaaacaaattacaattgaaaaaaccttaaaatcaacttaaaagttgagttttaaaatttaaaatttggcaactgcctataagttgaaaggcaacaatgaggctgtttgttgcacaattttacacgaggttagatttaaaagtgcgattggattttgaaggtgtgaggaggaccaagaaatgatgcaacatgccattatttagagatgatggctatacttctaatcatggatggaaatttagcaatacaatttgcttctaaaaatgtcttatcattcgagttatgttagcaaccgttaatgcttttgcgatgcagacatatgggctgcggaatgtataatattaatagcttggttatagcttttaattaataaataaatgaaaggttaggattatcctaatatctataaaagattggattttatttagcacaactatttatttcattttcatagatatatttgtacgcattgattaatccttccgttatacactagaatgaatcatttgcaacatctcttagggcagtcccagccctccatctaggatggtgtctatggcattaactacattgccatgtaggacttttagtttatgtggcactatattaattgagagagagtgaagagaggaagaaactgggtctcatgcaagacacaacttcaacacgagaacctatgcactagacactatcaagttttgcattgggagagaattatcaagttttgcattgggagagaatattgtcttcataatagataaagaataaatatgattggtagagaagaaagatgatgtatttattaatggtctaatttaagaaagtatgggttgtagagtatagtttctattgtgatgtcttattgacatggcaccatagacactacttatggacaccataggttgggactgcccttagtacctgttcctttcaaagcggctattgctttgggcaactcctttttgtttgttaataggtttactggacggctaaacggagtatgttttatataaaaaataaatttatttttaagcttatattaattaatacctaattaattacgagctagattcacctttgtttccgagcctgtaaccgttgattcaagctacatgtggacttgctttttttagtggtttaactgttaaccgtttctgggtccgttacagacctgacaggtagacacgtagctgaaatcagaggagtccaaggtccaaatccaactggcatgcccagtcaccacactgcttctgaacacctggacggttcgatcgtacagtcaaacctgccaaacagcgtatccacctggccggacagcggaatccacatcctcccgcgagacccggcgcgcgccacgctatcgcgacgttctcgtcgatcgtcctcctcacaggtcacagctcacctcgacttgaccactcctacacggccctttactatttagtacgactccgcacgctgcatgcgcagggaagacgactagccaaggcgccctcgcctcccgccgccgaccacgcgcgctatctgcatgccaagttgccgagctagg

SEQ ID NO: 6051 - DNA, 2000 bp, Oryza sativa
cgtcggtggggcggtgggccgagcgacggcgggcaccaggggcggtggccgcagcgagaggagcggtgcacgacggcgggagataggagagacggccggcggacgagaggagcaccgcgcggtcggcctcccttcctctccctctgtcatccgcggtgaagagatggggtggaaaaggtgggtttttttatttgactgataggtgggtcccgcatatttcgtttaatttttttggttttcaattttgttcctttatttttttctgatcaaaacgccacgtcaatgccacgtgagatgaggatctagtcaaagggagccacgtatgcgccgcgtcatccaaaaccggccacaatactaccgagggacctcttatgcacgatttggttttgtaagttgagggatatgttttctggattgaggatgaaaatcatactgggctacaaattgagggaatggagtgaacttattccctggccttgtgggtgtacaattgagctacagaattcagaacagaaacggcattcacagaacaggaacatcacaagtcacaacatctcctactaccatacgagcatgcagaattcagaatagaaacggcattcccacctaacgcggaccatgacacctgatgccttcacactttggaactgaccgggagcatgagcatggaaggatgggccacgcacagggtcgcgttccattgttgttgatctgaagtctgaactgcaaaaggagcatttcagtctcgtaggaggagagtgccttactgtctgaaaaacatcgcccgtaatttgttctttcagactttcagagggcgctcagagcagtaggaacattcttggatcggttggtaggcgagcgaccatcttctgacatctggagtcttgaatagcgtctcaatctcaatccgaccccggaaacaaagcagatgcttccattttgccttctaattaatcaggggtctactgtcaaaaataataataatcaggggtctaatcctctactgtccagtccttcacccagaatatatatgcagtgttcatgtcacgcttttgtcttataaattaactagtggcaacagcatattgatgtctgaccactggataacaccgacgcaaatcatctgcatctcatgcacagggaaaatcaatcttaccgtcctaaaactcgtttgataaacagcaagtgtgaagtcattatcaaaatagttggtgcgtagcttggcccagttgatctccatgtgaagaggtaaatcagatgccacaccggaggcccgctgagctagatacaatccggacggtacactccactttgctgaattatttttcgccgcgccgctttgttgaattatcaaatgaaaagatattgcacctaaaagaacagtttaggctcgaagctataatgctcctttgatgcgtatctctcagttgggcatccgagagaaaggagaattttgatgtgagccaccctttttctctgcttccagtgtacgttttcgaataatttgacaattgaccatttgtaaatgaaaagatgtgtagtctatagtggaattagattttgtctggtcatttaatcagtgacacatgggtgataatatcgaccagccaaaatcagcaaactgagaaaactgcacaggatcgatatcatcacgatgggaaaaaaaaggaacttttcttgagacttaaatcatgatgattttattggttgttggcatgcacagaacaaccagagctttggctctgttcatccaaaggcgttccatttcctcatcggtaaagcgagctcgatatattctttcccacacgttcggtgacaaccactcggccaccaaacctccccgttgttgcaatcgatcaatgctgctatatataagggacatgctttccgtcgcgtctcgtcttctcatggttgcaactctccaagaatcatctcaagtgtaaacacgtacgcgctgccaaccttatttcccagattatctgatcagtgactccatcgca

SEQ ID NO: 6052 - DNA, 2000 bp, Oryza sativa
tgtgacgctcgcctcctcctcctcctcctccttgtcctcgtcctccccgccatgcccgcgccctcaccacgcccgtcgtcgggggctcgctcgacgcctgcmtccccgccacgccccccacgcgcccacgcccaccggccacctgcgcttgtccagctccaattctgccggagtagctggattatgcgcggtgggtatggctgtcgctgccactggatgcccacctctccaccacgcccgccgccggccactkgccactgstcgcctmccggccgctggccactacccgccaaccgatggcgtcctggagagagaaaggaagaggggaaagagagagaggggagggagtatgacaggtagggccgcgtcaagggtatttggtctggcaaaaatataaaattgagcaaaaacatttctattaacataaaaaaacaaaaatggtattttggtgaacacctctcagtttacaatggcattatatagtgaatcagtttaaagcgatggtattccaacgaaaccagatggtataatcctaatttttggtactactactggtactatactctgttgacgacttgcgctgcatactttactgtttagagaaaaggtttttgcttgattgacacacaaaaaataatggcaccgttatagactgatgaaaaaaaaactgtgtttgtcaggatcccatgatcctggcactacatttgctcacaaatcactttgattatgaacttccttctttaattaatgttacactttggttaatgattagggagacctaaccttgtggtgtacagatcacatgatgagggtgtgtttagttatttgagtgtaaattttttgaagtatacgaacacacatttgaagtattaaacgtagactaataacaaaacaaattacatgttccacctgtaaactacaagacgaatttattaagctaattaatccgtcattagcaaatgtttactgtagcatcacgttgtcaaatcatgacgtaattatgctcaaaagattcgtctcgcaatttacatacaaatcgtgcaattggttttatttttttccccatttaatatcccatgtatgcgtccaaacatttaatgtttttaaccaattttttttatctaaacaagaccgagttgtgaaaatttggcctatatgctatggaatgaagcagatgaagaggcaaaaagtacagctgctagcacagcagacagactggcgtgctcatatagattttaacttttttttcaaacttctaacttttccgtcacatcaaactttcctacacacataaacttttaactttttcatcacatcgtttcaatttctttaaacttttaattttaacgtggaactaaacacagcctcaagctgttgggcagatgagttcactggttagagttcactgctcatataatgcgcttgctagctagcaccattattcatctatcgatctatcatgatatactattatattatatattacttcctccgtttcataatgtaagactttctagtattacccatatacatatagatgttaatgaatctaacatcatgtttagattcattaacatctaaatgaatatgaacaatgctataaagtcttacaatgtgaaacgtatgatgtatacggtattagtacactgtacgtgagataccatgcacgttattagaagatcatcgtggattaaattataacaatcataggtatagaacaaaaagataacagtattacatataaaggaatactcaatcaatcaatagaaaattagccacgctggtctcgcccagacttattattattattattcgtgataccaatcttttttaaaaaagccagcacgctattttctcggccatcgcgtactcatatataaatcgtacgtactcagggtgttgggcagatcagttcacttggttagcgagcgcgtgcggcggcaggcattgaaccctgtgatcgagcgatcgagctagctagacttccagcacgagcggcg

SEQ ID NO: 6053 - DNA, 2000 bp, Oryza sativa
tacacggcggtatcttgtaccatcaatcagtgatgatgtggaagcaggaccttcattacagcctgatgattccattgatctgcagtatcaagccaaggctcctatgatccgcaaagcagtaagcctatattatctattcagttcctatgcagtttctgtagttgattggacctaaatttgtgtcagatataagttgtctttgcgagacttcaaatagtttttacaatcactccatgcataatttaactaatatatttaactcgaagggtctgctgattgttgtaggttgataaactgcacggtatggtaaagaaggccaagatggccatgacatccacagctgatacaaccaaacaagccttggtctttgagtttctgcatggctttcaggatgttctccatgaccttggcgagatcagggaaatggtggttccgctactagtccacatgttgaatcagctgccgctcaagactacttttgctagaagctgaacagaacattgttcatgccgatcaagaagctcagcatcaggaagaggaagagcttcacatggtggatgatgcaacaatgaccctcgagcctatggatgaggaggataatggtttcaacaatgtcatctgcccatgtccttcactggagttggaggaacacagtcactcagctacaccagccatcgatgagtgtgatacagccactcctgctccaggctctgcaatcccacagcaaagcactagtgttgatcaagatggacatctggaaaatcctaacgaaatgggccagattgaactaatggtggaacctatgtatgtggatcacaatgattccaacaatgtgctctcatccagcacgtcagctcaggcgctgttggagaattgtgaagtagcagaggcagtcaatgaaaatgtcgatccagccacccaagttactggctcatctaccccagaacagggcacggatgtcatagtagatgctgaacaagaaaacccagccacaacagagggcaactaacttcaatgccgtcccctcgtctgcaaaggtgacaggcgattctgatttctccccttatggaccaattcgtgccacctatgtatagtgcttagatgccgttgtccgaaggttcagcatattgctgacatattgccctggttgtttgaccatgatgggctccactggaaattttagccgtaattactgatgtagcttacatatctcttgctttccaaagtcattacacttatcattatcaacatttttggtttttttttgtttttgaacatgcattcgattttcaattggaacttaacgctgccaatgcatatactatgttcttatacaaagaacaagaaaaagaaaaggttggaggtaggtaatggcgtaactagttgggccacgcacggcgaaactagtatatgatgccaatgccatgatggtcaatattgctttcatattaaagttttttttacattttgagttgattttttaaaagtcaagatgaaaggggagaccacagttgaaagtttcatatgatttgagttggaagttttatgatttaagttgaaattttcatattaaataagtgctatgaaagggaaaagaagtgtggctgtgtgctaggcgaggcgctagcaatctcgtgggggaagcgaagagaggcccaaaccgctggttgcctgcttggcccatgggtttgagaagaccatgggctcgagcggcccaagaccatggacttgaggaaggagtcgtagtcgtcgtatcttgatgacacgtgcgaccggcccgcgcgctcgtcgttattccgcggcgccatcttcctctctcctccgccctacgcgtcgccccgcctcgcctggccttccccgcgcatcctgcacggagccctaggaggctaggagaggaagaagaacacgcgcgcggggggatagtggatagccgaagcaactcgatcgatctgtggccgcgatcgtagctctcttcttggtccgatctcgtctctcccggc

SEQ ID NO: 6054 - DNA, 2000 bp, Oryza sativa
acgcagccaccaatgaccaatccacgcgccccgctcgtgagctccactccagcgccgccaagtgctcgcgatgggcgcggcatctcacacctgtcgacaccaggttgggagttcgagttgggaaaacgcccggtggcccgaggagcagcgattccgcgaggacgcgcacacgctttgcatccgagagcagtgttgccatgacacgcgcgcgcgaatcaccaatgcgaatgaagaaccgtggcgtgggcgaccgtcacgttgttccctttggacagatgagcgctgatttgctgaccgtctcatctcattgccttctatgtagacaaatatatttggatgagctgatccaccatgacccttttaaccacacgacaatgcatacgcgattgtttgctttcgaacagcgtagacaatttttttttactggaggaacaacaatgtgtacaaatttgggctccttttattttaagtgttgaatctagagaacgtgatagagatcaaatgactcattttggtcatattatatggtcaaaactcaaaatcccacaattaaccatgacgaacacctgtcaatttcgatgtgagaatatcctcctgagctcaaattagccacccactattcacaggttgctactctgtgtcctaaacctgacacgaataagcgcctcataagagcatctccagcagagaccctaaatacaattcttaaacagtttttaggtgctaaggacaaaaaataaactccagcaaagcccttactatatgccctaaaataggaaggacctcaaatacccctccgcagcccttaggcctgggggctgtagaccgaggccctatcgccgtttttctacgcgggaggaaatttcctggcgtgtggtgtctgtcatccctcccgcggaatcgctgccacggcgccgatcttcgccagctcgctggttccgccgctcgtggccgacggtgcgaccatccagtacctccaccggccactgcttgtcgtccgcgtgcccgcttgcttgttttttcatggtccttgatcagttcgcacactgatgcactatatggtaaacaagaatgttctgaaattcatgaccatcagaaacatgttctaaacaatcctgctctcgattggtttatggctaactgtggttctaaatgatcatggcataaaaaatattgttctgttcctttaaagtttgtggtgcttggtaggttgagacaattaggctgcttgcaattatgcagtagttccttcaaagattattctgcagtgttgttcttttgtgtcagttgtgagttgaagtttaacttcaaggttttttttttctaggaggatttaagctctttctgaagtttctcagatagattagattggaaaaggtatagagttaattttatctattgattatacttcttatttaattgaactacgtagtgtcttgaatacttgccggtaggatttcactcccatgtttgagaattttgaatttgaattatgatatttaaaattatggatttgaatacaattgaattctatgcattagaaatatttgtatttgaattattactatgttaaactaggtgtaagcatagagtataatcagaaatacargagaaaaagaaatgggggctaagaaatagggtctgctagtagagttggagataatttttgaattcttagtaaatggggacagccctcatttaacctttgatgactctaaaatagtgactactgatggagatgctctaagtcataacccagccatctcatcgttaatctctcggcggccggctggcagcagaaaccaccataccagaaaccgctcttctttccccttctccacgcttcgcttcgcttctctcctctcttcgccgagaaatatttaaaccgctccccaccggccacctcgtcggtttcgtccggtaagagaaaaccgtttcttttttttggcgaatcgcattcgcgcactaccaaacaccaacgcgagctcggaaagctactg

SEQ ID NO: 6055 - DNA, 2000 bp, Oryza sativa
ttgcttgctactactactaaccaaaaaggttccctcgcaacaaggacaccaccagaatctgtatgcatggcggccgtcgctggccagcacacagtttcggcgaggccagttcacatgtgacgaaaaatgtggctcacaatgcaaatctggacagcatcttccatccctaattagggtcctgtgttgactaattaatggttttttacaaattgcaatcagtatttggtcaagacaagaggagttacagagttagtagtacaatgcatcttccccggggagatttaatgcgcaaatgagccttgaatttaaaatctacgactttcttctagattcagaattctgaagtagtagtgcagaccaattttgccacttttggtttcgtccagtcgaattcaagagaagaaacctgttgaaacaatcctagtaccagtttcctcctctgctcctgatccataccttaccttttttattttagtagtttcaacaaactttcaacctacagccataccaaacaagtaactaaaacagtttaaaaatggtttacggataaagtccatggcagccattgactagtagtagtacaaacgcacaaacatacgcatttgcacccatctttccacaaagaaatgagcaaaaattttaagaaaagatcaacaaaactgacctggtctccgtgatttctctatactcaccatcgctgccaagttgcctagcttccatcgaacatgcgatcgagaagagatcaagccaaatttgttcttggcaaccggcagcctgcacaagaggtccaagtctttctttcttttgctgttcttgttgtcaattgaaagtctcggtgcgtgctgggtccagatccaatgaacatttggagaaattggggctaggcaaaatccaaatgcgaggttctaaccgattctttccttccgtgggaaatctgtaatcggatttgcgaatcgcatgcagcccagatattcttgacacagtttgaaagtttgctcaaaatgattttgaacatgtaagttctgttcattagtgctaaactggtcctagaatacagtgttttcttaatataaaaacttattacactgtactaacatttctataaaaaaaaagagaagaactttttctcagagacagcatcaataagacaaaaaaaagttacatgggaaaaagagaaaacacaactaaaaagagaaaaacacatattaccacaattaactattctctctgttcctgaagacatacttcatttttttcatattttaagtcgttttagttttttctaattaaacttttttaagtttgatgaattttgaagaaaaatatagccaatgttttcaatataaaacaaatatgctatccaaaatatatttaatatttaatgaaactaattttattttgtagatgttgctaattttctctgtaaacttaattaaatcttaaaaataatggcaaataaatgacttgtaatatagaacgggagagtatctttttttaagctaaggatcgagagcagagtgaaagtaaaataatagggccggagtaataattaccagctggttcatcccaaaaggtagtagtgaaggagtcaacaaatgaatccaaattagctagcctaaattctttcaaggagggccaaattgtaaccctcctggttgttggcatgtggtgtttttccttgaccctgcttgcagatgcaaccagccagccagaagactcttctatcctcttaatttgacagaataatcccagatctaataaaaaacacagtttaatcctccttattttctaaaatgaaaatagtagtactactactaattatcatcacaaatgacatgattgatgctacctttagtctttagaccctaattatcctccacatgctgaaatgaaaaccacactgacattaaaaaaataaacaattgatgccttttccggagcagaaatggtagtagtactactagtagtagtattctactgtcaagaccaagacggcgaca

SEQ ID NO: 6056 - DNA, 2000 bp, Oryza sativa
tagggttgggtttgttctccattttatacccatgggtatcttattggttcaaaagctatgcccgatgggtaaatgggcatgggtatgggtaatcactacccatgcccgctttgcccgtttacccgcgaaatctaacttacatgtaggctaggagtaaaatccactagaatacataagccacgttctttgttttctacggtttcccttttatttcccttattatttctctcctcttactctatcgccgccagaggagagacacgacaccgaggtggagaatatttgatgttttaagttcgattcgaagttagtagcttgtagactttttgttccactgcttttgttgtggcgggtaaacgggcacgcccgcgggcataaggcgcccgcgggcaatgggcatgggcaaccatccttacccgtcatgtagtaatgggtatacccacgggcacaaataatctcacgggcatgggtatgggtaggcactacctgtgcccgtcacacccgattgccatccctacacacaccctaatttccagaagcaaatataaaatctctcccctctactctcctcaatccaccgatggcagccagtggcaaacgagcaccaactgacggctcccctactccacccaccatgatccactagaggccggcgatatatagctccatggtgcccctcctctctcctcgcagcggcgacgtccaaagaggctgggaacgcggcggcggattgagtaggccgaggtggtggtgaagccaccgagtagcgggggttggggggggaggacgacagctccatggtgcccctcctctctcctcacggtggcagcaaccaattaggaggctagggacacggcggtggcggagccaccaagtggaaggcgacgtgacgagctcggtcgggaggggggggagggagaggacgacgacaagctctgcggcgcatgccagtgcccctcctctcccggcccgcgatgaggagacgaagcccctcctcaaaggacgacgacctcgacaacagcggcgtgtgcgctcggctgccaccatcatcgcctctctcctctcaagcgttgaggaggagcgggattcggcctagagctcgacggcgccgcctggatctagccaaaggtcagcgacagtggctggcaacttgagctccaccatagccaactctctcctttcccgcgcctcagcggtagtcagctcgctggggcccctcccctcccagccgacgacgaggagatggggcttgagggctcggagggcgacggcgacagcagtaatggagctcggtagtggattggcgtcctcctcgtcgtccattgccggctcccctctcttctcctccaaggatggggaggtggggatggtggggattgttgcagcctcgcagtaagattccttgtttttcttagctttttcagctgaggctctcggctctcaagttagtcttgtgttacccacgaagtaatggtctctcaccgccacgatagcatgctatcctacgtggtgagccgtggccatgctccacgtaggaacactgtgaagggccacacgattccaaaaatccaaaagtaactaaattttgatggcattttcatgtgattaaaaaaatagacaacaaacagtcctttccaaatataatcaagagctagcgatcaaagttctggctggaccacacagcatacatgctgcacaagtgcacagtctacactacttgtgcggatctacccactcggccactcctgtctgtagtgctgtagtagatctccaatctcaatcgagaaaaggccatcgagtcggtgagattctttcacatatatagttcgccgtgaaagtctatttatagtaaatccggtgcctatatatacgtcaaatcaaatcaactatcagtgtgtgagctatacacactgacagtgtagtgtgctgctctcctagctagctagagaacgccacacactggactggactggatggaggcgtcgtcgaacaccaacgcc

SEQ ID NO: 6057 - DNA, 145 bp, Oryza sativa
  misc_feature (1)...(145): n = A,T,C or G
ngtttaaccaagaaatggttccgcgccgtgyttgcgcggcttgtgccccsaagcggaacgggaagcgtttggggtcctgtgccgccgctgggtccggatccagaggtccgattggcggggcctgcgcgcgcgcgccggcccggcc

SEQ ID NO: 6058 - DNA, 625 bp, Oryza sativa
gagcatttagctagtattatggacgcccttagtgctcagtcaatcaccacacagccatttcttttttattcaggccggtcaaaaggggttcaggagttggtagcatcactaatatgctctgttcgtttgggcaggttcccaactcctctttcttgttttccgtgcgcacgcttttcaaactgctaaacggtacgtttttttgcaaaaaaattctttaagaaagttgcttaaaaaaatcatattaatctatttttgaaaaaaaattagctaatacttaattaatcacgtgctaatggaccgctccgtttttcgtgcataggagtttggttcccatctcccccaaacgaacaggggcgtgaaacagttggggcatgtggcatcgtctcatctttccgcggatcgccagcacaacacagccatcgcgcccccaaccgccgtcaggctgctaacatgtcaacagctagcaacctggcaccacaaagcaaagcatatcatccgtccgtccgtccgtccatccacggctgaggagcgcacgaaccgacgaagaaaaagggggcaaatcgcaaatccatccatcactttgccgccgccgccgccgtttcctcctcctccctttccgagagag

SEQ ID NO: 6059 - DNA, 629 bp, Oryza sativa
ttgsgggggtttttttttttttttggaratttcggtgccctttgcscttsgsgtttcggggttcaaagtttttttttttttgcggtttcatctgcttcatcatcaagtaatgggaggagatttttgagtcttgcagtttaatctgcttcttcttcgagaaataatgggagggaagaaaaataaatcgttgcttcttgctgcgaatctgggggctttcctgttcgtccgttccctacagtttcttttgcccatgtcgagttcttgatttgagctcctttaatgtgaatttgtttgtatttttcttcttggatgctgccttctctttccagtttctacacgtttggtgatgtagctagctactgctgcccatgtctcaatcactgataaactctggatctcatcatctttgcaggctcgtcagttgcagtattccctcctcaaaatatataaaaaggaaggagctccctgaggctagttggattggatgacgtctcgtgaaagttgcaagtgatggtgctctgactggtcttttgcctttgatgtctctgctggtgatgggataagttggcgcactatctatcttggctgtgtgttctgttgaatcttgtctagttgtgggtgtgtgtgtg

SEQ ID NO: 6060 - DNA, 652 bp, Oryza sativa
taataataataagaagaagaagaagaagaagaagaagaagaaataaagacgaagatcgaattggagctataatatgctaacttatctagctaggcagttcaaagtacactgggtagctagctagtagttcctgcgagctggtttcatgcaggcaatgcagctggcgagagctgcatatgcaaaactccaaatcagagacatcttttcgattgggtagctttcaagctgtttcaagtggccatgcgcatagctcgtacaactgtctatctctgctcgatctcacacgttccagttcatgcagctcgatcgatcgccgacgtcgacaaagccctcatgcatgcctccgtactgcatgcatgccctagctaattagctctaactcactgtgtagcacaatctagattgaatataaccgacaaactttgctagctactagctcttctttttcatgttattatacttgcttcaagctaatctttaatttttcatgttattagatataggaataactaatcaaataaattaaagaaataggacagttacaagagatgtgatcatcaattaattaactacagtagttgatttacacttacctggatgcatatgcaattgatcatcaggtgcaactttggaggaagggacaggggcgacc

SEQ ID NO: 6061 - DNA, 140 bp, Oryza sativa
  misc_feature (1)...(140): n = A,T,C or G
gwgccgccggnaaccccggcttggaacaatttgcgcgcagcaaggctttaactaccgcatccttgggcgngccgggttaagccgccgccgccagcgtcgtcgaccgggggawtcgagctgcttaaacacgcagaacccgg

SEQ ID NO: 6062 - DNA, 2000 bp, Oryza sativa
tttctgttgtaccatgcaagatccaatgtctctaggtcttacttggggtcaagatagtccacggtataaaagggatccctagggaggggtgtaaagcatcgaatctcatcgccaacacacccaccatagtttacgaagccagagtacgcggagccaagtcgtcggaaaatcttgcgagtacatcgactacgatcttgtcggtatcatcgagttcgtctacttcctttgtaatctgtggttttccatcatcaatcccatataaactggagtagggctattacttgataaggggcttgaaccagtataatccttgtcttctgtttgcttgatgtcgtattacgtagatcctcgttccaacgtaccataatatcctaatcatccggtctacgagtatcactcgtcgacaaaagaggctgaatttatactatttacattattaaatattataatcactattgttttgtgctaataaagggaaggaaagttaaaagaggacgttttgtatccatttatattaaatattgtagccattattgatttgtgctaataaaaggaaggaaggttaaggagggtgaatttgtattaatatagtttaatcacaatattattttgggcaaatagaggaattaaagttaaaaaggacacatttgtacccatttataataaatattgtagccactataaatttgtaccaattttgcaatttggctatttgcattaatgtagtttatcccctattagtttgtgctaatcgagggaagaaagttaatgatggtgaatttgtaccatttatatagaacttctgttccaaaataagtttatatttggcttcttcagttcgtcccaaaataaatttatttttaagcaattattgcattgggatttgtaaaaatagaatatatatatatatatatatcggaatcggagtagttaaagagagaaaccaattgcattgcgatttgataaagtgagagtatttttagctcttttattttatattkkatatkkrtatgtatrtgatgrawraraaagaactttattttggatggagggagtagtatattgtagtcactatcaacgtgtactgatatagggaagacaagtaatttggaaggtgcattcatatcaattcatatattaatatagtgttgcgcttataatttgcgttaataattgtctgatggttgttgacaatcaaatcgatggcattggctttagagtcgactgggttgccaactttttcggaggtattgcttcatcccaaaatataaaaaactagtaccagattagatattttatagtactacgaatctgattatattgtctgtcaagattcgtaatactataaaatgtttaatatgatcttagatttttatattttaaaataaagggatcgagtaatgaaggaacaaagatgcatggtagttggcaatatttgtccattccacatgccggagatagccaaacattatggttaggctcatttgctcgcatctctaggctctagctatgttttaagatgtggaaaaaaaaattttcctcttctattcccttaatataatttacccagttttcgagaaaaagaaaagcaccaacaaagtaaaggaaagttaacgaggttgaagtatcatctgttaaccattgatctcacaacaatagcatgtttcatcccaaaaaccagctcggaagcaatatttagcagctataagttgtactctgattttttagcacacactttggacccagctcagcatgcaaaaatcgctgggacatagctgtgtacgcgcaaaaaatagaaaaaacaaaacacacaataaaagaaatatagagaggcaaagctaggctgccgggaaaacgttgttaaatgtttagcgcacgtgtcccatgtgcgccttcctcgtccacacgcattatatatagccatcgcctcctccttgactcctccccacccaagctcacacatctccctctctccctcttcttcttctcctcctctcgcc

SEQ ID NO: 6063 - DNA, 2000 bp, Oryza sativa
agatcatagccttgtctttcttgtgctgaaatgattactgtcagaaacggtgtgacagggactgtcttttgttagatcattctgttaagtcatcctatgttttgcacaacttaattattactactattcccttaggctagaatctcattctgtgcatgtactactactatttctgattgcttagcaaataatgataagaaaaaaaaagggggggggggaactattccttgtgcggctgtgacccacaaactcccttttcttgggtcagcacgcagtcgtaagcacaagctctgaagcctctgcgtcactgtcatccatctcctgctctacacacggaaacaggtttgaagattcctggtcagttcttccaaccttctaagttgacctctcttttgccaatagtattgtgctattctcctcttctttgatccgtttgaccagtagcaatttggagtggagggttgactggtcagcggtcaacactgtctatatgagcttttgaactttcctaagtccaccaaactttgccaaaaagcagttctatggtgagtgaatgccaacacaaaagatgctactagttggtatcaagcttaaaatgcaacagagcatgtcattatcccagtgagaataagcataccacatcaggctccaaatatgtgattgttctggaaggcatcgcattaatacctgcaatttcgatgtaatatccgtgagctttggaaaaggctggagctaattagatcatcacacttgttatcttttattttcacaagtcaaaagttctgagcttttggcatggtagcttaatgcttatggtgaatatgacattaattaaacaaaagaaaaagaaaagcctatgcgtgttcccttttcttcctcctttattttctcctttgcaatggagattggagctcctttcttggaaactcttgtgtttaatttctacacaaccaactgaatcagggggaaaaacaacaagttgacttacaaaatggaatcaaatagtctacaaagtagtaaagcttatgcaattatgcactgtaatattcccaagataaatggaaccagatgagattaattgacattaaaaacataaagtagatccatactactccaagtaatgctttcttctttcgcaaactacgaactaccatagtatacgatgtcaagtttttcggccggtaccgataccgggtgtacttagcaaattcctcctgatctcccagtaatagcactagtacgatgatgagtatgaccaaagactggtcaacggggagcaagcacccaggaaaataaaaggagagaaatacaaagggaaaaaataagaattaaactttgcatggtttctgtttggtcaaacttctcttcctcttaccagcatatcatatctccccaaacccaactaagttcagagttcagacctcagacagccatggccaccggccttaaattcatctgtgcccataaccacatctctgatctctctccatgaatccaaccctagcttagatcaataatgtccttgctaagctatctcctccaattctgcttctgaatttctccattctttccagcaagcttaccaaagcaagcaagcaagcagagaaagaaccgatcaccattccatttcgcttctctcccagttcacgcaatcttgcagtgtttgctacatggtaggaagtgaataaaaagacctgatatctgtcagagctttgtttgtcgtcctagatcactaatttttcagagtttcagactttgggagtttgctgctgccgtcttgttggtcgcctctgcaacttctcttgtgtttctctgaacttgccatgcatgatccttccattgctcctgcctgcaagcttggctcttcaaatctgccattgcaacatcgatcttgcattgcttgcaacatctgaagtctgaatctgcaagctgattgatccaaagctacagaacatcagsttagctttcgsgtgtcgtgtcgtgtccaagaattgtgcccc

SEQ ID NO: 6064 - DNA, 2000 bp, Oryza sativa
tcgcgccgctgctgccgtgccctcggcgacatcagggacctcgccgccaccgccgcggagccccgggccgtgtgcgcgtgcatcctgtcggagatgctcgccgctggcgacggcagggtcgactccggccgcgccgccggcctccccgccgcctgcaacgtccgagtcggcttcatcccgaccagcccaaacttcaactgcttcaggtaaattacaagaactccccattacgcttcaaaaaataaaaacattttagaattcttttttcttcatatgagctgattttgttttcaaattcttttgcagggttcgttgaagaatgaacaaagcatcaacacatggaggagttacaatttgaaaaccattgcaaccttcaagctttacattgttcttaagtttcaccattgtttgtgtttcatcttaagaatattataagcaatacattctcaatcttcagttcatcagtctctttcggctttggctagtgcagctttgctttcgtgaattctcaagcattaatgatgcagttttgagcttggtttgtcctaacccaatacacgcgtcacctggaaattgacattacacttgcacaaaccttcactgggcctaacaagttcggcccattaagcccagatgctatctgggcctcacgtgccgattaaacctggcccaaatgattacttagacctcatcaagttgcgtccttttctaatcatttttcttcaaactatttttttcttgcaaagttgcaagaaaccgcagaaatcaaacttcattatgaaataagggtctgttcactttgatgccattttcaaccttactaaattttggtaaagttaaaaaaaaaagtggctacatttagtttgctgccaaattttggtaactatataagaaatcatatcaggcaactatgccaaaattttggtaatgccaaaaatttagtaaggtttttttttatcaaagtgaacaggtcctaaatatatggttccgtagtccgtacagtttacgtacagaaatggtcttccagcattatggttgcgtaattctgaacttccttcggcccaaattcatcaagatatacagcagccaatgttgtacaggtcaattttctgcttctgtctgacctgttccatggataaaatttgtcgttaggaacagttagtcaaaattattatttaatgaacgttatttttcccagattactggggaactatagtgataagcagcagtagtagtactttgtgctcacctgttgataataattaattgagcaggtgattgctctgattaagattggtacttgctccgatagagaactctacggattaactttgtttgttggatatatgtccaatactcaatgtttacttttgtaaggtgtaccttaatttggcactgcccaagaaaattttgacaagtacttattttttaaaaatatttgataccgttgaattttagatataagtttgactattcatcttataaaaatattatctatatgacttatatttttacacatttgcatacgtattttgattaagacgaatggtaaaacatgtttaaatgtcatcaaacataaagaaaagggagggagtaatcgatctctcttccattcttacagcatactggtaataattactagtataaaaccatgttcagacatatagagaattggaatatgattctctacccaacatatgcataaacctgactgttgttattccaaagttacaaagctaattttgcttggttttgaaaagaatttgcaaagttaatttggacttcaaaatccaccctcctgaaaaaaaagaaatccatgggtggaatgagaagttgaaaagaaaaatcttttggtcatgtgcttgcatggtctcagtcaaccaaagacattttccctatatatctttaccaatctctcccagcttgcaaggcatcaatcttgaaagctcctctctctttcttcctctctcgtcgtcgtgtcgtcgccgccgtcgccggag

SEQ ID NO: 6065 - DNA, 2000 bp, Oryza sativa
tgtttaattagttcaggaccaagacattcaactgcattaggtattaactacggctgctgacaaattaagaaaaatctatagaaaatgtgctcctctttagtcttttccatggaatttccatccggcggttatcttaagatttcttaaaagaacatcaatttcctagcttttgattgatatagaaatgtatactctttcamatacgtwcgggtgataacacgtaactaaatcatgctgcaccatacacgtgtgtgtgcatctattctacatccatactaggagttagatttaggtgtggtccgaacaaacacaytsgctccagccattgatattttggcttgttatctacaaattcgtatcaatgcatattgttacattgttgttttctcatttgatcggcaacgatgacaccatactctctgcacggagcaatagcacgatggattgattattggtaagtaaaatacatgagggtacgacaaaaacaactagaggcttagacaagatgaagaaggcacattctgctgacacatgctaccggatataggtgcaatgtaaaatagcgtatagacaaaaaaagaaagggtaaactaggttgagtcatgagaattaagggacagataggttcacaggatctatacacctttaaaactactataagccattaaaaagcgactaactttatagaaaaaaaaaccatgcaacccataattgacgactatcttttccaaaccattttttcacacaaacactacatttatttggtcaaacttacacaccggtataagtacactttccataaattttgtgtaaatgaacttatacacagacaagaaaagaaaaaaggaaacatttttcataatacaagaaattggggctgccatgccaatcagcaaggcaggcagatgaaaagaaaggaggggaggcgatggatggagacgcatacgccgtgtctgtacagccagcggaggctgcacagaatccacctaagcttcaggtgagctggccctggccggtggccgcttgccttttctatttctgaggccctgcccggtttctaatttcaacgagccaaaacagacggagagcagcagcagcagagagaaggagaagaaaaaaaatggaggaataaaaagggcaagacagagagagagaaaaaaaaagaaaggcaagagaggagagaatcccaattccccaagtacacgagaggggagaggagagcagagcgcactacaagagaggagagagagagagagggtttkaggaggagagaggggcagccagcagcaggggcagaagcattagaagcgggcagcagtagatagagccatctatctgtacaggtataaatccttccttccttcctcctcgctcatcgataggaggagagagagagagggaggggggcagattgggtggtgtggtggtggggatttttctcgggtgcgggggggatataggggatgagctgattggggggtggtcggttcaaagccgcgatctttgagtcgggatctggggttcgtgatcccctcttcccccaactatgggttcgatctaggtgcgtacctgtgttatttctcgctttttttttgtttgatctctttaatcttgctccgtcgagttagattcgtgttgttcgagattttgcggggggtgaaagatttggttttggggggagatcgattgaggcatcggtggaagattcgatttttgtgcctcgttttattttacactcggttctcagatctcagcggttccaaaccctgccaaatttttcctagcagatctcagcggtttcttccggttcttgatccatttgtaccggtcgatttcatcctcgcttacccttttttttcctccttttataaattcgattcctgcagatcacggcaaggagattagagagggagcgaaagatctttccttatttttttttgtatcaaaaatctcagaagagcaggaggaaagaggaataaatcgggagcgagggagaaggc

SEQ ID NO: 6066 - DNA, 2000 bp, Oryza sativa
tctgagcataaacacttatctagtgaactggaaagtttttgggataattttttttwaaaaaatcgcattttagccgcgaaggtgaatggttaccatgcaaaccaacagatgaggtaggggtaaagtagagtaaatctaaagtaaatgacgagccttgtatattgaattgcattgtctcaattgaatcggcataacctttataaagatattaatcttagtaaaaataaagacttttcatgtattattgggatagatatacagtagcactcaagaaaccttgatcctagagcaagaaaatacacacgaaaagaaaaaactaaattcgatctagactttaggttgccgatcagacagctcaaatcataagagtaggtacaatagcagactataagccagctataaacatattttaaagagataaaagaagagagagaagagcagcgggctacagatctgtagccagctgcagcacggacttcaaggcgtaatgtgtgtatgacaggtgggaccaggtattaatagtatagtaagcaactattgtatgaattgactattacattggctatagatgatttgaagctagtagtgggctgtactattaaacttgctctaaggrmctaattagcccgattagactgtctaactaggtgcgatcaaatcataagggacctaattagcccgtggtacgaatgtttgtttgaccgacctttaggcatatactatttttttttcaaatttagattaaattcaatcyarcmttcaawttttacaatcaaaatatttcatttgacccctttgccatcaccgctgtctataggagcttgacaaaaagtttttgcttagggacacctataaaacgcaacaatgaaaaactataggaataggaaacatgcatgaatatgataggaacatacgtgtacttacgtgtaacacagatgattaagacataaggaaaatgtaagatgggttgttaacacatgaaacttacaaaacaaacctaaattataattcatttggttaatgtatcattaacttgtgtcaatttgttgttttattacttgagaaaaggaatgaaaaaaaatrgatgtttgkaaatgtttcaattcatattgatctatggcaaaggaaagatattccctatttttcctatgctccatccatcaaaaaaatgaatagtgcaaccctagaagaatttaattaatctacttttcctacagaattcgtataaaccaaagagtcatactttattagcctatgaaccacaacaaaatttaaattttagaactcagtttcaagttgattttagagttatttcatcgtagactcgtagtatattttttaatatgaacttctaaatcattaatactattttacttagaaatgatttttgttatttcttttattattttcatggcggtagcttgtacaaacataggcctaaattaaagaagtgcaggggactttctacgtataaaaagcaacagactaattcttagttcagactacagggttgtttaaattgtagccaaaataaacgttactaaaatttggcaatggcagtatttcttatatatttatcaaagtttatcaagaaattaaatatatacgaatatttagcaactttaaaaaaatagtatgatttgaaatggcattaatatgaatggcccctacaataaaatcctagtactaactggtttcgttcaatttattttacatcttatcagccgtaggttaaataaaacagagaggactaaaaagaagtagagtggactttctgcgtaagaagagcagcaaattaattcttcagagttcagacaaattaaaaccccactggccactggcgcaagaaaaccgagcaagctcagctcagctgtcacggtgtcacctgtcagcgcccacaactgctcgctccgtcctccaaagcccgcgagatccaaagccgaacgccactagctagctgagagagaagcgccggccggcgagggggctagtgcgcggga

SEQ ID NO: 6067 - DNA, 2000 bp, Oryza sativa
tgggtgtgacaatgtaccacgtacatactctctcccttgtccctatattcctttttccttggtattttggacatcaaatagtttttaatacattttttttgttaattaggtgtttattcgaaataaaactatatcaatgtgaaaatatatttcatgacaattctattgatattttttaatataaaaagttttgtatattaatgaattattaagattttaaaattttgtcccacgaaaacggagataagtacatcttagcatatgattaagcaatcatcactagccaagcgcaatcttttgcaatacattaaaatagagttcttccccaagtcaatcggccacattctctttcatgcaagctagcaaccagcctgccttgttatttttttaaggaatagaatgagggatggatgtccacactccacgcttctcgatcatgctcttaaacattacaatttttgtaaaaaaaattcatacatatatttcataaaaaaagttttaaatccagtatgcagctttatgatactaaatatatccatttgtgccctaaagtaattcgcaaatcattcagctatttaaccgttcagccattcaacacaaaagaatgtacctcgttggccctctcaagaaggcgatccatagacaaacctctgtaatcttgcgggagactattttgatgcctcaagaggatattgccttgttcgtttaattaaaaaccatccaaacggttatgaatttctttttaaaaaaatatgataacactcatacaacatatctatacaactccataaatttttttatctaaactcaactcacacatcgagatatwaaaaagggagacaaatccaacatatgaatagtagcataatataatgttcatatatgaatttgtcactttttttctcaatgtgtaagtcgaatttaaacttgtttttttttggactgatagatatcattatactttatattgtcaattttttaaaaaatctttcataactatttatatcgaaattgaaagaaaaatttatatgagggaacatcccctcgatcttgcacgagtttaccattcgccattcggttgtatagcacttgttcatgtataaaccaagaagacactaaaatgcgcaatttcaatagtttaactaatccaatctttgttgatttgttgctatagtacttcaacaataccgagctactgttatttgcatattggaacactagtctttcacacgtattgttgtactacatccgtcccaaaatatagtacggagggagtagctgctagctggagtagctagtgttctcgagtccaaacattcatggacggtcggggcaccgtgagagccggataagtgcagacagtggtaccaaaccaacagtacaacttctgcagtatcccgtacgcgcgctcgatcatcagcttgcatagtcacggaaaaagcccaccacgtacataaccgataagatcaatcgatcggtttcacggagcaatgcaaatctatcttcagagcagcaatgcctctatgactctattcgcatccagtgatgcaaatccatcgccaagatgcaatctatatacccccggtacccattgcattgtgtatcacaacgctagcttgtacatgtgcgcgcatgaactacgggcttaatttgcacctccgagcgaaacattgatcgtttcttatgaagcacacgcccactggtgggtcagtcacgatcgcgcattcaaaatctctcatgtttttacagtaaaatccaccctggagcctggatgacgggagaatgtagaccgctcctcaactctgtgctcgttggacttggacgcagcctataagtggctgaccccgagttctccgagttagcaagaagccactccactcggccgctcctgcatgtataactagctagttctagctcgctcaggcactcgatccaccgccgggcgcgttggattgagataggctgaggagatgatatccgggcacgacttctacacggtg

SEQ ID NO: 6068 - DNA, 2000 bp, Oryza sativa
actagcatattgacttacattttgggaataattaattatttgccactcttacggatggtgataaatgatttgccactggacccatatgtcatagacacatgagggctcacatgtcatagacagcgagcggcaaataattaattaccacatcttaaaagtggccaaaagttaaatgtcccaggatcatatgattacagtatacaattacaattaacttatattttggatcatgctagcagaagctgcttcaatggttccctagcaatgtaagtatgctgttgggcctgtagaatagggtgctttagtgttttaatgggccttgaaaattgtaatgattaatcagtcctgtatgatgtgggccaagcccatgaatacatgcctctacatgctaacataagttacagataggaccaggcgaccagcagtaactgaatttggatatacctttttgtccacttctgtcttcaattcatgaaatttctttactaaaaatatttacttcgaggaaatttcagaaaaccctgagttttgggtcatgggtctcacaaaacacagtttttaccatggaaaacaacttttgtttgctaataaaatgcagtgaggattacacaaggctggagaaagagtatggccaactagaataactcccatgaagccttttcctaaaaatgtgttaaaatttttcaaccagattcccaatcctacggtccaataaccagatcatagatttacatgatgatcgatctggaaaagagaatagttattagcacgatgtgatcaggatttgatttgcagcctctacactgagctgatacactagcttcaatcaaatgaaaatttaattatttaaagaccacatctgattgattgtggttcatatagagtattttgaatgcaatcatcatttaagcatgctctctgaggtcccagatgctgatagtgcaaaccgcaacaacaattgtactttaatttgctgaaacctgaaactaccccctaacaaactgacttaaatggacccaattacaccggcaagcgactgcaagataccagctaagaagaaaaagctttcaccgataaacactaaaaccgccataactaagacagattagttagggctacaactaaccaattattcgagcttttattcttttccccgaggaatcaattattccagctttaaggaactttaagaaacactggagcaaaccctaaaatcgcaaccatactaagctccgtccatccagaaaaagcaaaagcgactccagagcagccgcaaaaaagaccaaagcctcacatccccaaacacaaaaaatttagctcaaacacatgaacatcggggagctagcctcaccggggtcgcactgccggtagaacttctccacatctgcacaaccacacaaaaaaaagaacagcaaatccatcaaatcaatcaatcaatcaatcagcaaagagcatcccaaacaacaccgaagagagctacccaccggtggtgagcgccttgacgatgcccgcgcggcgcgcgcggaagtcgcggaagacgtcctccgcggaccgcgcgttgtggtgcaccgccgcccccgccgcgttcccggcggcggcagccgcagcaccagcgccgcctccctcgtccatccgccgggagctccttgctagggtttcaggcgagtgggagtggggggagcgagcgagagtggtggtggtggtggcctcgtagtggagagcgagagaggattagagaggaggggcaaaatcgcagccaggtccagacgaggacctaaacgcaaataaacaaattacaggggctagcacgaaaacgaaatcccagtttccaccctgggtggggtggggcccacctgtcggggcggttgatgggctcttctagagttttgtctcgtggcccacggagaagagtcagagaccactcgtcttcttccttccgctcgctcgctcgctcggctgacgtgtacgcttcgcggcggaggcggcggcggcggcttccg

SEQ ID NO: 6069 - DNA, 2000 bp, Oryza sativa
atgcgcgccgcgttcgccgtggcatcgcgctcgccgccacggcaacgccatgtgtgtcgcgcgccgcgccgagttgcgtttcgtccgcgtcacctcatacaattggcaggcaggctgaatgcgttgggtcaccattgtttaatcgataaatcttctcctcctgctcctcggctcggctagcgtccaaatcccatgaaatttctccgaacgtcgccgcgccaatttggacgccatgttcgatcgatccatccgtgcatggagcttggctggtggtttaaataagttaattagccactgtcagttaagcaaggcgcatcactaagggcgtgttcagcacccctttttcccatcccatatttcttgtttttcgcgcgcacgcttttcaaactattaaacggtgtattttttataaaaagtttctatacgaaagttgcttaaaaaatatattaatccattttttaaaaaatagcaaatacttaattaatcacgtgttaatgggattgctccgttttcaatgttattttcgggttggaaaccagcatatacggacacaccctaagttattatacaatagttattttcagctattttatcggatggttggcttatttactccacatctatacaaagtatgttttttttttcaaaatttcttctaatacagtgcttagcccactaattctaaactatttgttaggtttatttgttaaaacatttaatttattgtaataataaaaatagatattatacgacaataatacgattaatatgttttgaacatgtcataaagatggcatgaaattacattgaatgatttctatgtattatgtgagatttcagagtacttgacaaatctccaattaaatgcactgtagctggtacaatactctattaagtttcagatcaaatacttatacgaatagtcctgcatttttgcagttaattttcactgatatttgtacatgaaagatatattttttttcaagtacatctgaaatctgaagagtagcgatgaagaaacaaaacaggtcaaaccatgtgagaccagcaaagatacaaaacagcacgtcatgcatattgacaaggaggaggaaaagaaaagagatagagaggaaaggaaaaaaagagtagtactagtatagtagagctacatacataaatgtccctttttcttttctttctaggtaagaaaggtgtagagagcaagaaaagaagaagaaaaaaagagatttaaaatggaacaaaagggcacaaaaacagtcaccaccaccactcccaaatccctctcagaaattaggacttgtagagcccatctctgagcccctgccttgctggccctgaacctctctctcttcctggttgcttcttttgcagttttttttttcccttcctcctctcttgattgtgttgtgcagtttgtttgtgtagtggaggaggagataaaaaagataccctgatctatctgttcatcgaggctgtctgcaagatttggcaggagaggtaggcagggggggagaagcgaaaaagcgcatctttttttagtcgtcttggttcagtttcctggttgcttcttttggatcctggagaggagaggaggagcccaccgtttctccaccaaaaacccaatccttgctgcttcctccgagcttgagatcgattggttccttccagatctaaggccatccctttcggctgcgagatcgatcgcscaggaatctcgaagctaatcctagaaagaaagagagaaaaaaaaggcgagttatttttcgcttctttctccttatgttccaaaatgcaagtagagtagggttgtctcgttgatccttctccctctgatgatcatatggtttgtggttcttgatcctgggatgcgtgtttgtttggatgcaattgcaggtttcgcgaagaaacgagaggaggagagggaaggtaaaggaatgggctttgtgaggaagtgggcgatggggaggtgtcggagatgaaggatgctatctgctgcg

SEQ ID NO: 6070 - DNA, 2000 bp, Oryza sativa
ctctccacgaccacctcgtctggtgtcacaccccgccgctcgccatggtcgtcgacgccgagcatgccgcacgccgctgtggaccctgcagcccgtgccgtcgacgcacctattgcctgccgtcaccgtcgacgccgggatcgaatcttgcagcatgtcgctggcaatgcaatgcaccctgctgctcagtgctcaccgccaccatcgaagccggggctggactccgccggccgcacacatccccgaaccatcgaaccccgcagctcgccgctgccgccatcaacgccggccccggacctcgccttccgctgatgccgccgtcaacactggccccaccgcccaccctagaggccaacatctcgcccttacatatgaaaagtctatactaccctttcacctctcttcaaaagatggtaccaccatatgggctaaaatggtactgcacggtaccgagaaatctcaatcaccgtctgatatgtcccaattgacggctaggatttggtacgcctacctctgctggacgggagcaaatcacttataaaattccatctataaattggccacataatcagttatctagctatcctctcttcagtcacacataaacatgttctttcccagtactgcaaatatgcgcgagcaaaataataccataatagtatcaatagccatgaccatcctcctgctggttgcgttcttctgtcggatcaagaagcaggctgccatggcagccaagaacaagaggaagaagcaacccaagctgccaccggggccagctaccatgccggtgttgggtaacatgcaccagatgctgatgaacaagccggtgttcaggtggatccaccgccttctcgacgagatggacatcgagatccggtcagagacccttatatttcttgtcttccttccctttcccgtccatcagatcggtaccgscccatcttcctccttccgctcctcatcgggctgccattggggagaagcgcggatgtcagggggagtgggagcagatcagtggcaccaacgacgagctggttcatgccagcgtgctcgccaggttggcggccggcgagacgacgggcactttgctagtattaccgaactagagtaattagtattctttcctatcattttgagagtattgaatggtactattccaaatgtaacgactactccccccgtcaaaaaaaaaaaaggataaaccctgggtttccgtatccaacgtttaattgttggtaaatgataaaatataattaatactttatatgtgacttgtcttttaaatttttttggtaagtttttttaaataagacggatggtcaaacgttaaacccgaaaacctagggtttgtctttttttgacgaagggagtatatagcttctaaattacaaaaacattattaaaaaatttaacatttatcaaaaaaatgtttatataatatacaatattttggaacatttacattaatttaaagaatagatgattgaagttctaaaaatgaatagcgatcgactagtgtcaattagttggcgacaaacagagcacacctttttccaggacatttgtcaatatttgaatggaacaacaaaagccgagcaccacgcgaacactagcaatagttctttcttctttttttttaggaaatgccattcggctagctttattgatcattaaacattaaacattgttacatcgtttgccaaagcgcttagaatataaccaggaggttcatcgacccaagtacaagactctttcgtactaaaagcaatagttctttctttattgaaaaggaaaacgtgatgaagtttcattccacacgtgtttagaattccatctataaattaattggccacagaatcagtgatatatctagctaggctatctgcactcccaaaaaaaaatcagtaatcatgcacaagaacaacgataccatcatgccatcacaactcatcgcccaaaatgaccatgcatatgtcctcacctttctgatgtcaatagcc

SEQ ID NO: 6071 - DNA, 2000 bp, Oryza sativa
gatgctcctcaaactcttctcccggcaggtaaagacagagaagggcggcgaggaatcggtcaactcagtagtatagccccgaatgagagatggttttgacctcagtgcggggtagaggtgagattgaagttgccgagtgctcgctttatttagctttcgcagcgcccctgtaagttccaaaaaagctgcctcaacatagtcagcaagatgcttaggcggtggggcttataattttagtaaaaacggtggcgacaccgatcagctgtatgacccactatagtgcaaatctggcacacatggttctcagtagacttatcagtatcagtgaagtcataagtattggtacgcccccctgtctaacttagcagctgacacaacattgttccaagatgcaagaaattattttctttacacttcagtattcaagcgtaaatatattttgacgtttcttacccttcttctaccttgatctctagtaaagcttcgtccttaataatgtactcactctggttccataattcttgacgttttcgataatgatacggtcaacaaaatatatcttttactttgtttttattataatatataatgcatgtttacttttcttatattactttgaaggacaaatctatatatgctattctagttcctttaaagaaaatacttttaaagttattaataatcaaagttacaattgtttgacctcaatcttatccaaaacgtcaagaaatataaaacccgatggagtattatacaacccctacagcctcgctacagagtagtctgacgacgttgtataatctaatagtaaagtggagacactgagatttagggtgagactctctttcttataccaatccttggaatcggtccatgtatgcaaacactacgtgttggattttaaaatggtttcacaacccattttcccacatcgacaaacaaatttggtgtgagtgggaccattggtactacgcccgaaagcgacaaagggttggggtcatcaatatcctacagtagtaatgcaattattgggtacatctgtcgatttgtcacacgaacaaaggccagtcaaattaacatacgcgctagcaatgcaatttcgcaaacaaaccattttggaaagtagaagcaatatgatgaaatgttaacttaattacctctgtcctcatcttaaaatcttcaaaaatcctcatccaaaataaattccgtcggtgtcaactatgcgcaaaacagagaaaaccaaataaactcctaaaaagaaaatattattattattattataactactagtgccatttggtggatctcaatttagaaataaagacttgaacggagtagatcagagtcacggataggaaattatgaatttttgaagttaaacaataatttatagatttgaaaaagaatttatttaaaactggaaaaagaacatgtgtcctcaccttagagagggttttttttttgctttaatgaagatagtcttgggcacgacgtcttcctcatgctgattgtgcagattggatgttgtgaaggttgtgatgtattactatcaacctatgtctagtttccatgttagaatattcaaatggaagaaaaaaaatgagccccacatgtggatatggattttaattacttggatggatgtacacccattttttacatatcaactaaatgattatgaaaacaattcaaaaaatcgacaaagtagattaatatgaaatatatcactccacaaacatacaagttcaaatccaacttctataaattgtaacaaaaataacaaattacaacctgtagaaatttaatttaaactcgcatgttggtagagtgacatatgacatatcttgtcacattagcaacgttctttaagaattccagctataaatttggccacctgatcagttatctagctatcgtctctgcactcacactgcacaaagatgtttcccagtagtgtaaatatgcgggagcaaaataatatcataataatatcaatagcc

SEQ ID NO: 6072 - DNA, 2000 bp, Oryza sativa
tacgctaccttcctcgtcgagccgccgcaccctctcttctcgatcgtcgcacgctatccaattgcctcgggcatggctggctgcggtttcggcgccgcacgtcccgctccccgcgcgtacgcgtacgtgtcagctggtcgcgttacggtttcgatacaggcgcggtgcatggtggcgtgaagacagcagccacgcgcgctaggccgctagctggcgtcgttctgagttcgtcacaagcaagaaccaagtctcgtatcgatcccgtgcgtaaatttgattggttttgcgcatgtttttgtaatgataaatcgactgagaaggttaaattagcgtggtgctagtttgagatttgcgcacgctgtagctgattagttggtgctttctgctcgtcgtggagacgcggagagtatctgatccgtgaaagcaatggcacgtgggtggggcctgaaaaggtccgtcgtttaggttcgctgtgtgcctgtgtctgacaaatcctgttttatgagtagtactccgggtgcacgtagcagtcaggtgcagcaagcctgcaaagcgacgtggatgaattctaccctatgaccaggaagcatcaagcatggtgcaacgaagagccaagggcatggaaaatggttgctccacgtaagctgaatgcgtggaaccaaacaagaagattttaattaatttcgagtaggtgatttttttttctgtttcgtattttcaatgacgagcacaatacaagattttttttcctcaccccaaaaacgagtggacgaataaaatatgctactgggatatactttttttataaatatcatttgagtttaccttttaaacactatgtggaaaaatgctcttgaataaaggagaaaatattggggagggtttctctgtatgcgtgatgagagagagaagagcattatgtgcagttctttttcttattacgctcaccgcatctatgtatcatctttaatccagtttagttatgcgatttacaataaaaccattatagcagctacaacaaccaagtattgaaattcatttgttgacgtcggtaattgtagttgtcgattgcaactgcattgcggacatggtaaaacataaccgagcaaactctttatgagattactatttgatgagagtttcctcatcaacaaaaatttttgatcaatggagaaagagaggagatttctctcgttctccgcgcacacgcttcccaaatgttaaaatatcatattaatttatttttaaatttaaataattaatacttaattgattatacaacaatgactcatctcgttttaggtatcttttcaatattctcctttctccttctctcaaataatctcttagttatcgacttgtaaatgaattgttttttcttaacaatgtcatactactcttccataagaaaataatgaaaatacttctaaaaagttatatatatttgtcacatgtttatcatataaaagtagtagaagagtagacaaataaagcaaccaataggcatgctccaattccacaagaaaccaaacgaggagctacaacaaggtaggaattgtgggtgaccccaagcaatactccacctccatccagatattgcaactacccttcctatcccagtcaaaagccttcaaaaatttattatctccaccacatcatcacaagccgcagcagtcagaaaacaaggggaagaagagcagattggattagcgccgagccgaggcggcctcgacgataagcttcgcctcgccggccgccgccatgcggaacccgcccgggaggcacctcctccgcgtcgccacccgcgccgtgcgctcctcgtcggcgctcggcagcggcggcggcggagggggcgcctcgacctccgccacgtcccccgtcgccgcctcctcctcatccggtggccgsccggcacccgctccggcggccgcctcctgcgcgccacctcgccgcccccgccctccgccatcgccgcggccgcgtgctgggagtcccgcacg

SEQ ID NO: 6073 - DNA, 2000 bp, Oryza sativa
attcaatagtagtatgtttttttattgtgcgctactttactcattttacctggatatgtgtttcttgtttttaatatccctccatcctataatgtccaaattatttttgataattggcttaggaagtactattactacttttttcaaatgagaaaacatgtacaaactcgctattgagttgagggtgttattatctagatttaaaaaaaaatcgtttcagtaaaccagtgaataagttgagaatgaataaatattatttattccatggtttgaaaaaaaaaatgttttctcaaaattctttcttttgctactgctttgctaagaccaattgttttaaatcatttgttaaatttatttattaacatatttaatttatccttataactaaattaataatctttgtaataatctaaattaattaactggtgctttattgatggatgaaaacttagggcctgttcactttgatgccattttcaaccttaccaaattttggtaaagttgccaaaaaaagtggctacatttagtttgctgccaaattttggtaactatataagaaatcctaccaaaattttggcaagttgccaaaatttgataagttttttttggcatcaaattaaacatgcccttacactcctagtaaagatatagcagtaaagcatgcatattgcatatttttttcatctttactcctagtaatcaacattatattatttttgtctgttgaaagattgtctctttcttcggttaaaagcgtcggctataggacatcccctcgagagtttaaaattcactctcgatgtgcctttcatacctcacgatgagtgatcttgattaaccgctccaaatatctcctctcgaacgatgatttctatcatctcaatgcaagttgaggtcacgcgtcacagaataagagcaggtacaatagtagactattagtcagctataaacatattttaataatataaacgataagagagaagagcaacgggctacagatctatagccacctgcagcacaaactccaagacgcaatgtgtgtatgataggtgggaccacatattaatagtatagtaagcaactattatatgaattggctattaaattagttataaatgaattgaagttagtagctggctatactattaaacttaaacttgatctaattctagtcacggtgtagtatctccgtattattctttttgaactgcagaacagtgtaagatgcattgaccggccaatagggatggctggcacggcttccctctcgtttctctgtaacggaaaaaagaaatcggatttgagatgcttccaaaactgtagcagggcttgtccggcagggacctttcctgaattgcacgaggagccggggcgtggaccggtaaagatcgatccccttcacttcaccgtttctcacgctgttactacgagtccgtaaaaacgttccgggtgaaaagaggagaaagtggcgaagaaaaggttaaaagaggccgcaaaagatcgccgagaaagtccagaaaacaaccggacagtgcaggtagaggagaggagagaagagcgggtgctgctgggctggtggatcactggatgaatcggatggttttttgtttgcggaggcgacgctgcatgctggcgcaagcgtcacgggtctaccttgaaagttgaatctcaaaacttccaatccctctctccaaaacacccagacagacagagcgacacatattccctcccaccacccccaccgcccacacgctcccccgaggcgggcacatccatcccacaaggccacaccccacacaccacgcccccgattccaccgtattcaccacccacccggccacgctctcctctcggttaaaataggagtcactctcactcactccaccccggccactcgtaaaccccaagaaaccttggcggcttggccgactcctcgtctctccggttgatactgtagtggagtagtgtagtggtagcgagctcgtagatcttcttggtag

SEQ ID NO: 6074 - DNA, 80 bp, Oryza sativa
ggcccccscggggktcccsgaaaagaagctgctcgaagtgaaggagtccggaaagcggcgccggcggcgccgtcgacgtc

SEQ ID NO: 6075 - DNA, 1716 bp, Oryza sativa
ttttaaaacgaaggtaggatagaatggagttkaagagcmtagctcgatgatgccttgaaggcgatagagtggggggttttgtcattttcaagatgttctaactaagtatttgtcactgacatgtggaccctaatgtgtctatgatatatataggtacagtgataaattcttaagtgtcactggtaagagtagcaaatactatatgtttagtttacactaaaattgaaaatttggttgaaattgaaacgatgtgacgaaaaagttgaaagtttgtgtgtgtaggaaagttttgatatgatgaaaaaattggtattttgagaaaaaaaacttggaaactaatcaagggcttaattattcgagagagtgtgcggcgtgcgactccgattccacgcgtcccattcctagcgcgcgtaaaccggtgcgtgggtcccaactccggccgtcttccgccgttggatcccatcctacggcccagccacccaccttaggtgcaagtactagcacccgcgctgcctctgcctccctcctatataaaggggagagaagccgccgacgaccctgcggcgaacaaaccgggccggatctctcctcactcctccgccacctcaaagctctccgttcaaaccgtcccgcgccgccgcggccgctgcaacccgcgcgcgcggactcctgcctctcggtttgttcctctttgcttcttcggttagatcgatagatccagctatagtagtagttcagctccggtagatttagattggagttttttttaatgttttttttaattgttattattatctgcaaagttcttgggttgcgcgcgtgccctgcggccgttcttgttgctatcgatcttactatgaactaagggggaaggattagcgtttattttccccgtcctagataagtgtggtagctaggtgagtatgcggtttgcaacaattaattggggggagtgattttacgaaaactgtcgcttgaggaggtgtgtcatatttttagttagtgttaatttgtggtatttttctctctagtatggaggtgacataagatgctggaacacaaatttctttttttttaaggaaaaatgtggcagtacatcatcaggaatagtaaaaattctctgaactgggtcagtaacagctcaactgtagcttttggtgcgaataatttagcgaatcgaattttttttcttcgaatcttgtgctgtactcctgttaagaacaaagctgctgcgtgtcgatctatatgcttttgcgatgtggggatgctgagttcgcatgttgcaacagttgggggttgagtgcggtggtcattcttttgttcctggaacctttggcaatcggcatcttgcccgacatggactcatgtttttcaggccaagtccaggacttcagcaggatttgtctgatgcccagttgcctacttcccacttgggcactgtctatgtcatggaaatatatacttccattgctgctacctgacactaatgagcaattcactagattaccaactgttattacttattagtagaatttaagaaactcattactacttgttaaaacgaagttttcagctgtattttaaggttgtgtagttggaatcatttgggatgttcttttcttaagttgaacttatgggatctgaacaattttgcttgatgcaaatttaagttctgagatatgcaaaccatgtgctgctttgtgcaggtcgaaggag

SEQ ID NO: 6076 - DNA, 2000 bp, Oryza sativa
caataaaaatatcttcaatttttataatagcagagattcgtatatatagttcctatgataggctatttggttggtgtttatagattcttcttttataatcctaccaatctagcctagaagtaaaatttactactccttccgtttcatattatgaggtgtttgactttttttagtcaaacttctttaagttgtctaagtttgtagaaaaatatactgatattttcaatacaaaacaaacatattttcaaaatgtattcaatattaaatttaataaaactagtttggtattgtagatgttgctattttttttctataatcttggtcaaatttaaagaactttgtataaaaaaaagtcaaacagcttataatattaatcggagggaatagttaagattgtttatgaagtaaacatgccatctttgggcaatgcacaacacgaactaagtgaatcctaaccatctagaagtaaaattgattaaattcaaaattgctcaagtaaatatgtcatctttggacgaagcacaatacaaactgaatcgtacccttctagaagtaaaagaatttactaatccagattgcttaccaagcaaacatgtcatcctcagatgatgcacaaagtacaaactaaatggatcggataaactgtaccttttgaatccgtccataattaacgtatcacctgtcgctgccatcgtctctccttgtcgctgcaattgactttcagcatccttcctaacgaataaccatgcatggttacaagaaattgccgcgtgtatgtcattacctttagctaattaagtcccttcataagctttggtaaattatggtgaaaaggtccagcactctgaaaaattccatcaagaacatcagtaaacagcatttgaatacttaaaactgaaatatgggctacattcacactcgatttaactatgttgacggagattaagtcagctgataagttttgccagtcaaagcgcaaatatttcgagacgaaaatgactcatgactataaataatcactccacaagcagagtagtagtagtagtaacattatttgaccaaaccgaccgacctatatgctgattcagattgcttgtgtttgtcattttcctcgttgctctgaacttctacgtgtaaaatccatcggcattgccatttcactttcagtgcattgtagaggaaaaacaaaatcaatccaactttaaaacaggtcctgcctgaaaacgtcaagaatttgcaaagaatgtgtaagcagtaactgtacagaggcaaatattcagacattccaagcagaggctcttttgctgtacaagcaataaccgtataccagatcagtagaaattcagacattccaaacaagctagtatttgcagtaactaagaattttcagaagaaagaaatagtagtaaaaaacacgagcagatccatggctagagaagaggagmcaggagagaagaggacaccacctacccaaacagcgtcgtcgcgtggtttgatacacgctctcacctcatctcatctcgtcgccattgacagactagcgccggcctgtccagtgccgatgccgagtgacacacctgcctgacaacacgtacgtacsgtggaaatcataaaccytttttttaatttaattagtttcttctcgcmaccgctcgccttcgccgagctccctatatatcgccgtcgtctcgcactgcctccatcggatatccagctcctgcagccaagaaacactcacacgcacgcacaaagcgatcaggcaccttttgttttgttgctttagaggttaattacaaacaggaggagaagatcctagttgtctagttgaaagtgaggtgagttcttgtcgttttgagtttttgatccaatcttgttagtgaagtcgtgagcttgttgtttgtttggtggtgtttgttgctattcttgttcttgaaatctgaaggtgttgtgtttggttggattaggtggtagagaaagagagagatccgggctgcaagcaa

SEQ ID NO: 6077 - DNA, 1040 bp, Oryza sativa
gttggttggyccaamatttgcccggttggattggttggattttaragkgatgaagtagactgaactggttggkgaactgkgawaatggaratgggtgggttggatttggattggatttctgcccattagcaggctgtgacaagtcgattgactggacgaggaatagtaaccctgcacattgtgaagttcagatgatgttgcgagggtccattttcagcttataggtttatgttagcagaccagaccatgtcgcactgaattgccatttggcttacaaaaagtgggcaatgattaattatctattagtaatgtgttaaccaggatagaatctcattatggtgttggctttatatctttggtcgaaaaaaaaggggatataatctcatatttttctttttcataccatattgagttttgcaagggttttgtgcaccgaggattagtttagattaccagaaatcaaattaatgagaggataatttagaactccatagaattcatctgaaaatcatgcaaatttcatgtaaaacttgtgttccaaattgaccttgagccccgctcacacacgccctgccgtgcacgtcgtgatacctgtttttacctgtcaaaccattcactttcctgtcatttcggcctatatcggcctctatggtttccaaattccaagtctcctgccataaccaaatagcccccgattggccaatcatttagtgatcgtctatgttggttgacttgactcggtacaaggtaagctggaaacacatgaacagtagtgcaaggtaggagcacgaaacacccagcctcgcggttgcggtctccggcgagtctagtattcgggagtctagttttggggtgaattcaattgaggttgctacagtttaatttgtttattttatcaattgacgtgttcatgcaatccacaattgataaaacaaacaattgacatgtagggattgcatgaacacgccattgccggcttccgccatcaccagacaccagcttgcagcctggcactcgcacgcacacctttcttcttctac

SEQ ID NO: 6078 - DNA, 799 bp, Oryza sativa
aaacatatatatgcatggttcagcaacagggccatgttaaaaaaaatgggtcagctcgatcttcatccggttggtaaggctcagccggccacgtggctgagccatctttagtcccggttggtgttaccaaccgggactaaagatcgatctttagtcccggttatttcactcgggactaaagatagcgatctttagtcccggattggtagtcccggtttggaaaccgggactaaaggggggttacaaaccgggactacaaagggtttctccaccagtgaaatgcgagcacccgtgtcaaatctacgacttgaacccaggtaagcaagttccaccacaaggaagctaatgatcagttcagctacgttcacttcgtcattaaaggtaggttgtagaactgatgatctgtacaatggtcgaaatatatgattcttccaaaaaaatgatctatgctaaatggatggatttcatttgttgctaccttgggtttcttcgagcatgtgttagtgacacactcccgcacggacgtgcttatgatgcgttatgcttgtatatgtggctttcaccctaatgatgataaacaagcgcaatgataagctgaagcagtacataattatgccccctaccccgctaatggcatatatgtgctttccttcataactcagttaggtatcaagttcttcattctctactctgtcgtggcatgacttttgttgctttaatttctagcttgctataaattcctgcacctcagtcctgtcccaaccatcaaattcgtcttgatcaaactatcagagcacat

SEQ ID NO: 6079 - DNA, 2000 bp, Oryza sativa
ctctccttgttgccgcgaagaggatagataacccatagtcccgtacgcttctctttctctctctctctctctctctttcctctccactttgaatcaatcaaaacggagaagaagaagaagaagaagaagaagaagaagaagaagacatcaagaacacgtggagcagaagcttctctgccggcttctatcgtagctctcaaggttaccaccctccctgctgacacctctgcatgttttgctttgctctgaatattccggatttgctttagttcttttctagagtccgtcttgtgcttctgcgtggctgatttagtctgtttttgggtgaatttaatcatattctgtttttgtacccgagagaagttttggtatgtttgtcttggctttttcttcacccccctcttttgttttgaaatttgtattagttatttttgttgaacggatgaaagttattagttaggtaactaggtaagggaggaagaattcttagattgtttactatgagggctgcagatttgtttatggtactctgagttgaggaagggagatgaaatttcagttcctataaaaccgtccaaagttcaaccaaggaggcacaaaaatgtgaaaacagatcctattttctctgttgagatctccaatttaatttcatttggtccttgctccatctatttaatgaagtgcctgaacttcctagagaatagagactatcacatgaataaacatgattttgatatctgatgtatgtatggatggatgcaacatcatggagcacttcacttaactccaatggtgacaccctcccccatctcttagccatcacctgccaaccttttccaataaaggtgcaagaaatggtccatgctccatggtgtccatccatcaaagtttctcttacttttttttctccattctgagctcatgcccatttgtgcttttaattgaacaattcaaatgctacctttcagacctgagaatcctgtttcttcatttatgtcatctgaccacatatcactgttaatcaaagcgttttccaggaagctaattaggctgtagtaatagtaaacaggcatcgtattcataccggcttatgcttcttattttcttgttttaataaaaattgatgtttctgttatgttataataatatttttgatcaattgtttatgtggttacaatggatgtcccaatcagaaaagagggtggccggtggcctctcactttccctacccctcacatctggtctaccaaatgctgctgagggtttacttgtaacttattatttcagcacattttatacgcatgcatgcagctatctgtggattgaatttaatatgtgtttagagtctaaatgttgattgatgactatgtgtgcatcaacatgtcatcatctgggtataattgaattttttaaagatacttctattgtagtaaagatacttgtaggatgtaattaatagagatttcaagcgtacacgtatgtagcaaccctccaaagatttgaaattgaggcagaatactcctatcatgatagatagcttccatctgtaaagatgtaaattccagacagggagttaaaaactgatatccagctgatgtgaatacaaagatctgcagaaaggagacatactttttcttctttatcctttcatgttgttgtcaacacttttcttgttgaacattctgtgcgggatatgcttcaaacaacctgatgattcctactaccaatcttatgattccttgggaaaaagtaaatcttgtgggcattcgatatcccaacaaaactttcccaaccaactttagctggcacaactttcttctgcaataaccttcttwtgttttttcatctcttgttgcaaccaagaacatttgtcaaagtggtagttacgctgccagctacctctctggtttcagcaatggcaggtttctaaatacatgttcttgttctaatttcaggataaagaaaatctgctgcagaggtacaagatctagtggcagaac

SEQ ID NO: 6080 - DNA, 1292 bp, Oryza sativa
ccggaaccagaggtctggatggctcggtttgctgtaaagaccgcccctgcatttgaaccggaataaaccgcttgaaccggatggttttcatgtgaaccggtgaaccagagagaaccgagccggccggtttgtcatgccaagagaggatgggccagtcaatgccttgtgcgcgcaaagatctcaaggcccacggtgaatgtgtactattgaaaatagcaagaaaaatgtggggaatggggttcgaaccctggttggctggctgttttcaacggaggatatgcaacaatataacacttccggttcaacattcgaaccgtgtgaaccggcggttgaaccgctggaccggtgacccagggactttgagcggttcgatcaccgattcggttttttcaactatgcatatatactccctctatcctaaaatgtttgacgccgttgacttttttaaacatgtttaaccgttcgtcttattaaaaaacttttgtgaaatgtgtaaaactatatgtatacataaaagtatatttaacaataaattaaatgataaaaaaagaattaataattacttaaattttttgaataagacgaacggtcaaacatttttaaaaaagtcaacggtcaaatatttagagaacgagggagtactatgcattatgcatatatatgtaggcatgcatgatgatgctttagctttacttaagcgtgtataactgttggacgcggtccaagtgttctcacgtaccaaatcctagctaaaagtacgtgtacattcttttctcytttttttctgaaactgcaaaaaagraaagagaagaagaaaagaaaagaatggtgcactagtatacgtggctactccacagtgcctgacaatataaggaaaaaggcacagcaaaaaggaccgacacggcaagaaagatggtatagacagtgcagctagttgaaggtgcaggcctcgcatagtgggaagcgtctgattctctgacggccatcagcatattcagcatggacggtttgattgatgatcaactcaaagtccaacagagtaggtgaacattaagacacagagatgaccatgacgcaatctaatcatgcagacaccatatattaattcatactcttcttagttaattaattaattagctacgtactcttgtgcctctgtgaagctctagctttctcgccgggcagctataaatacatgcacaccacagctctcctagctatctccaggcactagtgctgcatattttggcacgcattacggcactaccttgctagctagctgcttgagcaat

SEQ ID NO: 6081 - DNA, 1752 bp, Oryza sativa
gccgccgccagcccgcgccggcctccattccgccgccgrtcggctgcctctgcaagaggaagagggggaagggaggaggagarggggttagagaagagccaggggaaaagattgaaaggaaaaggatggagaggatggagataaggaaggagaagaaaaagagataaggatgggagatagagagagaggggctacgcatgcgcttgtgcgtgggctggtgcgtatgctttattcccggttgatgttatcaaccgggattaaagatctctgggatctttagtcccggttggtgttatcaaccgggactaaagatctcggggggcctgacaaggcctgacagatttagaactaggactaaagatcatttttagtcctggttggtaacaccagtcgggactaaagatcaaatatgcccgctgtagccaccaaccgggactaaagatcatctttagtcccggtttttagtggaaccgagactattgtggatttcagacgaccgaccaaagatggtttctccaccagtgtaagcaactgagtatcatcaagagtaatattctaatcttcttcaggtgtattggggcctgatctctcaaattcgtcagcaaaacagcatggagatcctgcctaagctagcacccatgcttaagcttaacagcttggactcctgcctaagcctgcacccatgctctggcaggtagaaaagcatcatgtcggaagtaaactaattgcattgcgcatatactattttaagttatccgagttagtaaaagctaaagaatttttgctgactgcatatactagtagtaacttgaaaggtgagtaatctttagtttattaaccaacgaccaacatgatcttctttgactagcatatactaaacgactgaattgtcgaccctcgtagacatattttgaccatgaacgtctatgtagctactttcgagttgaaatggcgatgagaattaatggtggttccaaggccatgtactttgattaccatgatacgatcatttgataatgagcagcttgttaattaactgcatgtgttagcctagctcccttaggaaaaagggggaaaaagagaaaggaacaactacaaaagacacacatatatactatgcattatgcatatatatgtaggcatgcatgatgatgctttagctttacttaagcgtgtataactgttggacgtggtccaagtgttctcacgtaccaaatcctatagctaaaagtacgcgtacattctcttattctttttttttctgaaactgcaaaaaaaaaaaagaatggtgcactagtatacgtggctactccacagtgcctgacaatataaggaaaaaggcacagcaaaaaggaccgacacggcaagaaagatggtatagacagtgcagctagttgaaggtgcaggcctcgcatagtgggaagcgtctgattctctgacggccatcagcatattcagcatggacggtttgattgatgatcaactcaaagtccaacagagtaggtgaacattaagacacagagatgaccatgacgcaatctaatcatgcagacaccatatattaattcatactcttcttagttaattaattaattagctacgtactcttgtgcctctgtgaagctctagctttctcgccgggcagctataaatacatgcacaccacagctctcctagctatctccaggcactagtgctgcatattttggcacgcattacggcactaccttgctagctagctgcttgagcaat

SEQ ID NO: 6082 - DNA, 2000 bp, Oryza sativa
taattggcaaaaccgctagagagcgattttctgtgggcaaatgttttttttgtaaaaaaaaatccggattccatgtaggagaatataaaagatctgttgcttcaggtttcatcaaactttcaatagaagaaagtactccctccgtttcagggtcacagtcaaactgttttaagtttaatcaagtttatagaaaaacgtagttaacattttcaacataagataaatttattatgaaaacatattcaattattgatttgatgaaattataaatattacaatatttttctataaaatcagtcaaacttaaaactgtttgatattgatcaaagtcaaaacgtcaacttgaaacggagggagtacgaagtttacaactcgttcatcgtccctgaatgactctaaatgaaagcccacatgggcccatagtctgtacgggaaacaaagagaaactggaaccgaagaccatgatgggccggtccgtacgaggagcgccgaaatacctcgggccgccgcaaacatgcattgctgccacaaactgctatcatgtcccgaacagaggatttttacactttcgtttttcagatttggttttcacctcaaaacgaaattatactgatagtatagttttgcccagccctgcgttccgaaaagtgaaacacgttggcccagcaacaaagaagagtttgaggagcctttgcaccaaagagagattgggatgatgctcgtgctgcgtcatgtacactcatattgcctggttggtccaggtagggaagcctagataaaatcataaaaaggaaggatgacgacggcccgggccggccgggactgcagccagctagccagccaaccgtagctagctcggtcccattcccatctccctctccctctcgatcggcacggttcacctaaccgtcctgattcttcaagggaatttctcccggtcatcgattattgcgctcgagattccctagtgctactaaatccgtctcaaaataataaatacagttgtggtatttttgtcaaacatttaaccgtccatcttatttgaaaaatttatgaaaatatttaaaaaattagtcacaaataaagtattattcatgttttattatctaacaacaataaaaatattaattataatttttttttaaataagacgaataatcaaacgttgaatataaaaaatgtaaaactacatttatttttggatggagagagtaatagactcaaccacaccctctccctgatttggccaatagtgtaccggcgatttataccagtggccagccggtcgcgttcccagcggcttcgacgccaccaccagccaacatggaaaccacggcccgttcgtggtcgcggcggatgagacatctgctcggtttggtttttttcatcgacccacacggccgcaccgctagctaataactcgattttccccgttgctgttctgcatytgcagtgacacacaattwggtgaactaacaacgtcgcacttgaaaaaaaaaaaggtagggaaacaaaaccacttggcaaaatctagcgaaaaagaggagaggaggaaggaacaggatagcacaagtacgggcacatgtcataaaccgtacacgattcgttcaaaaaaaaagaagaaaaaaccgtacacaatccgaaatcgcatttctagttgggtttctagaagcgccacctcccacatccccagctctccgggcccgacacgtgtcccgcacaacctacgaaatcaggcgtactcgccactgacaggtggtcccagggccgtgatggacccaccagtcagtgacacgggaggcggcccttatctactacgcgcgcgcgcgagacccggccataataccgccttctgttgttaatcggttagcttcgcgcgccgccgccaccggctcaacccgagccacgcgaaaattcgaaggaatccgcgaataaatccgaggaggagaccccaacccgagtaggcgaggcgaggcgaggagcgggagacgtcgttggcc

SEQ ID NO: 6083 - DNA, 2000 bp, Oryza sativa
attcaccaatcgtaaaatctttctaattattaacacgaggtcagcttctttagttagtagacttgtaggtacataaatgtttacaagttgctaaaactaaaaaagaaatcatacatgtaatgtagagttgttctctcagttaaagtgaaatcttagtaatttggcggtgccgtaataatgtagtgcagttttcaacaaccaaaaaaatcgtctaaccaaatacatgtcatcctcttgtcttctaaagggctatatatattcttggtctttgatgctttcatacgaaaggagcatgattttataagtagtagtgctacactcttaaattcataggaattctaagggccctttaaatcgtaagaatgaaaaaacagaggaataggaaaaacacaagattctgacaggaatacaattgtaaaatagaggattgcaaaacacaggaaaaacacaggaatgactgtttgattggaacacaggaaaaacgcaggaatcagatgagagagagagagactcagaggaaatgttccaagaggttagacctcttgctaacttttctccaaaatgtgcataggattacacattctatatgaattttaaaggattggataggattcaatcctttgtttcaaaggccttcattggatttttttccataggattgaaatcctccaaaattcctacatttttcctacaaatcaaaggggccgttaaaatcagtagctagagatgttatattctacttttgaatggtgtagttcatatagacattaattagttacatactagttcatatagatgtttgtatttgatacggagtactttagttggatatggttaagagggagatagagacttgtcctgtaaccgtgagtctttctctgtttaaatttcaaaacttatcggttgcttgcctattggtagatgttttactattatactccctccgtactttaatatatatatgacgccgttgactttttgacaaacgtttgacctttcgtcttatttaaaaaaaaatttatgtaattataatttattttattgtgatttgatttatcatcaaatgatctttaagcatgacataagtatttttatatttgcataaaaaatttgaataagacgagtggtcaaacgttggttaaaaaatcaacgacgtcatacattaaaatacggagggtagcatttattaacatttttttaaaaaaaaataaaatcgtaatgtactgaatatgtaacttcatctgcttagaatattcatcagaatggaagtagacagaataagagaaaaggcccataaacaaaaggccggccctatcacctatgcgccgagaggtggagctcgccgcaggcggtggctgtcgcgtcgcctgccgccaccgccggacctccctgtgaccccgtgagccgtggcgcctggaggctggagagaggaggggagagagatggagagaggggagatggaaagggaggaggaagaagataagggggggtatgacatgtggggcccacgtggtcccacttttatttttattatttgatgtgtgaaaatgacatgtgggtcccacgtgctttattatttttccggatcgaattgccgcgtaagcgctacgtcagatgaataccgagttaaattagccacgtaggtgccacgtcagccaaaaccgctgagggaccttgtttgcccggttttcgtaagttgggggacgggtcgtatccggttttacggtcaagggacgaaaatcggactgtgcgacaaatagagggacccaaagtgaacttattgctaggctaaaattgggtggcccatgatcgaatagtactagtactaagtagatggagggagggaggcgcgcacgggcaccacaagctcgtcacctgctttctcttccactcaatccaatccwmtctctctctyttcywwtccaatywcwaytamtmcwmtcctctcctctcctctcctctcctctccttcctttgtcgcgagtcacaggcacacagac

SEQ ID NO: 6084 - DNA, 2000 bp, Oryza sativa
ctccaccactgtataacacctaaaaagatttatcaacaaatttaaatgctatttatttataactaaatgtgtactcgataacgcatcaattctctttattcttgaattcattcaaaactgagctgtttactcttgaattatatataattaacatttttttgcgatcgaacaatttgaactaattaaggatcttggtaatgtatccatttttaaatactccaatcactatacatttttgtactttgaccactcgatcgtctttccaataacatatttgcgaatgctaaaaaatatgccatattatcgaagggtataatatcctaaatataagcataaaactttcattaatcatataataactatattcaggagtaattagtggtcaaagatgaaacaacgaaagtcaatattattaattatatttgaaactagagggagtattactaatttatatatgaagatcaacatgaataaatataccgatatatatcctgaggttgcacaagtcattaatttcatcattttttttcttaactgatttgtttgtgaataaaatacattttttattaagcaatcccttcatttgtttccatgcactattgaaaacaaatgtgctatatataactgctgggtgcattatttgatcacagaacatgtgagatcatgcatattttggatttttgaacaaagacatacgtgacgctttttatttttttgcaaatgatcaatgggttatatttatgctcttatagttatatctgtgtacttatgcagttaatttgcttcctatttgaaacgtgatcttcatcattttacatgatggtattgatttcatcagctgtaatatgttaggagattatatatgcatgcgtctctgttattacacatttcaccaaactgactgataattttcaatcgccagcttgcagaggacaatcgatcgctacctgaaccacacaaaaaactcatctgcacatgaagaaggagaggaatcatgcgtccaggttcaaattttattcgtcctatttaagtactaaaatatcacgcatgcacatatactccctccgtttcgaaatgtttgacaccgttgactttttagcacatgtttgaccgttcgtcttattcaaaaacttttgtgaaatatgtaaaattatatgcctacatgaaaatatatttaataatgaatcaaatgataggaaaagaattaacaattacttaaattttttaaataaaacgaacggttaaacatgtgctaaaaagttaacggcgtcaaacatttcgaaacggagagagtattaattaggagggataccatatgatgggatcgaactgtttttgactgaagatcatgcatgaaacatcatgcttattctatatatgcatgatcgattagcacaagatgcatgactgagtatgttaatgcacgaaatgtatatattacatatataatatatatagttttcacttggaattacttattaattgtgtttgggtatgcgcgttattttcacagaagtggagatcggaggctacaaccctgggaaagaagatagaagcaattgagggctacaagaggtgactaaatatatatagtacaaatgattaattatattagatatttatcaaatctaaactatatattgggggtagtttgagaattaatgcacatacataaacgcatacagtaagctgttgggggaaggcctggggtcgtgttcagtgcaggagctacaagagcttgaagtgcagctggagaagagcttatgtagcatcaggcaaaagaaggtataaatatatatgttggatctcatctcgatcgattgcttatttgcttacatatagtttgccttttttggctcgtgtgtgtatcgattcaagctatatataattataaggacatgatctatctccgagcctatatttcatcaagaaaaaaaaatctctgaaatctcttatccattttgttttgatgtgggaacaattattgtgagcagcaaaag

SEQ ID NO: 6085 - DNA, 2000 bp, Oryza sativa
gaactaaatagaacctatatgtgtttgcagaagtttcttatgtactccactatacacactgtgttgccggtttttgttggttaggagtacataagaaaaagtgaaacttgtccttggattcttggaacaagccgactgtcatacactcaaaatttaacaaacacagcagtacactctactcgtgatccactctcggtaaaaatgctactagtaccaatcgagaccgaatttcccataagaaaaagaaaaagaaaattgaacctcgaagatgcaaatatgtagtagtacgtaggtccgttcgaactaggtactatattcagattttatgatagattttgaagggcgtaaataaatagttcaaattttaaaaattttaaaaattaaattctagcgatataagacaattatatatagaaagtttttcaaataagcacacggattagaaatactccatccttttaaaataagtttatttttcacccatcccacacatataccaataaaaaaaagactagaatattccaacttaatttattaaatccaatataattattcctcactttatctattcctattacatttatctttgccttttataaacttctatataataattacgaacaacaaatttattttagcataaataaaagaagctctaaaaataaactcctcaggacaaatacagtggaagcgtgtcggcgatatatacatagtgcagcagtatttttcttccccagttattattattattattattattaaaacaaaaaaaaagagcgaaagacacggaatattttgaacctcctcgtagtgctcccagacgtgttccgaccgatgaggttgtggggcccagcaaatacgcgacgacgtcaccccctctcgcatacgctacgtgtccccttcctccgcgtgggccccactcccccctcgaccggacagagcagcagcagcagccagcgccgcctcctcccttcaaagcctcttcttcttctcacttcatcaacaacctcacctcgcctcgcctcttctcgcggccaacgagagagggagagggagagctaggaccaccgccactgcctcgggaagtaggtggctcccctgctttccctcctctcctccgccgtcgccgaggcagccagccaagtcgtcccagcaggtggtaggctactagtccgggtaagtgttaaagctcacctttcttttcctctgatctgcttcgccgccattgctatcctgaacgagttctggtaagctaggtgcgaagctaccttcctcttcttcttgctgtttcttttctttctttttcttttcttttccctttttcttggcggcttaatttacgcgtgttcgctgcaatttcatcgctccatccatccatccatgccagcgccgatgctgctttcttttcgctggtgaattagctgtaattaaatcagattgaagttgcgtgtgtgtggttgttggatctgctgctcctgcgacccgtggccgcgtcgtgtgtgctgtcctctcgctgattctgacgagattttcttcctcgatgccgctgtaggtggccggcagtgagcaggaggaatcatctctggcgttcttgtctccgaggaactttgattctttctgggaggggatttggtgtgctgctgctgctccagatgcttcccaccaacaggaacaggccccagcagaggcctgccagatcttggtatttcatctcaggtctgtctgcttccttccatctcaccctatcttactgataaccttgtctctttctctcttttttctgaattagttgataattgttggttcatgtaattggatagctctaaaattatctgcaagtgccttttgattgtctcatagttgggtccagttgttgcttgtgcaacaggaattttggtttttttatggtttgagctctgtaattttagtcctttgctagaaatattttttccccttgttgtacatgcctctgaatttgagctcatcatgttgtgccagac

SEQ ID NO: 6086 - DNA, 2000 bp, Oryza sativa
cacaagtcactgagacggcaggatggatggcgactcgagctttcgaagatctccttaatctccttgccgccgcgtacgaaggacacatagagctttgaacgtgtaaaataatttacatgcatagcttttaattttttatcaattgagatttaaaagccgatgtaaaataagcagaatatgacaaaaaaaactcaaaattagccctaaattaagtttaaaaatttacactctctatttggttgtggttaatgataagctgttgcaagcgaacgatcgatgagaggggtttctctgtcttaggcccactcttcttccgacgctgcaactaaaatatacaaaataaagtaatataaaatataacaatataataacggttgtgatactataaatattgacagagagccttaatatcgaagcagacatgattagaattttgggttttgttggagacaaaacttagactagttgtgttactgccgtgtaagacaggttggggtaaagaataattgtttaagatcaatttgcaaaaagggccatatttcataggatcaatcttgaataagtactgttgtttgggacaactagtttagcgcggctaggtgtggttattatttattaataatgttgtgatcgatatagacggagtatattgaactaaacgtgctgtaacctggagttgggctaacagagtcatggtaattttagatattatatgatgtttttatgaaattcacataaggattactaggcctacctcggtccctggggtggataaatgtatgccaaacaattagatatataaaaaaaggggatagttgcacatggttgctgataaaaaagaatatatcataatatggagtaaacactaagagtaacgttcaaaacatatacaggaaataagttcaataaactctaacatgtatgaggaaaaaatggtgttctccaatacattaccgagtgacatagtaaaaaatataaaaaggcaaaagtaagtaagatatcgtttcgttttgtataatgatcacactcttaacgaccaaaatttctctttttgaattcttctacatgttttccttcgcgccaatttacttatatcatatgttgtgatgaaaaccacgtcgcaaccctatgtcacaatgttgaatggggacatatccggtgaaaaccatcaaataagtgaaaacccgtgaaaaccatatctaaaagttttataaattcatgaaaagcactattcaccccaaatttgtctttttttttctctcaaatgaattttagtttggacttaagatttgatatgaatgtacttcatacctatacttatctctagtaattttttcatgaatttacaaaacttttagttatggttttcacttatttgatggttttcactggatattccccatgttagatacactaactatttcatcggttatcaccatcttgatctctaatgttacttgacacatgtaacattaatttcttgctactttagcaactacccatcaaatattccgcagctagtttggttagtgaatttagctatcctctccttgacttcctacgaagattaatctatccttcagtatctttatatataccgacaattataacatattgaacaacaaaagttacatatacatgtgaaaccctgatcaacaaaaaaaaaactattacccatctacactcaacctaaagttccaaaagagcaaaaatggaacatggaataaagattaccaaaaaccaaagcaattaaaaaagaaaaaaaaagacaaaaggtacaaaaaaaagaaaargaaaaaaaaaggcaaaagagaaccggatacataaccccgtcatctcggcgaccctctctcgtggtcgctgcctataaaggcccagccacagccatctcttctccacccccccctcgccactcgttccccttcccttcctctcctcctctcgcggaacctttctcgaagcttccacacccccaacctcgcctccaccaccaacccccc

SEQ ID NO: 6087 - DNA, 2000 bp, Oryza sativa
tgcgtcgatcgtgatccttgttttccagtacttgtgggcaaggaagatgaataccaccagtgaccccaacactaacctgaataaaacttctcaaacaaaccaacatgcatgtatataagttagaatatatatgttcagacgcgcataatatcacggatgggatgattaaaagcaagtaattcgtacgtaccgaaatgaaatttgatgatatcaatagccgatactatggttcccaaaaaaatcctatctttttggggggcaacttcatatccgcagtctacttcggagtttgtttcgctccagaaaatagcacgggttaaattcagaatgcttggatgagatatacgctccttgaagtacctgcaaatcacaccgttgtacaagacggggtaataagtgagaagggaacacgtcttttttatatagacagaatcatgaggaaaaaaaacctgtttgaatccttcaggcattccctggcgctcatacgaggactctggtactggtcaggacgatatggaaaccgaacactaaatcctttccttatgaatcctatgatatctgtgtaacttgcattctgtagctgtgaggagttgtccggtagattccatctgtcaacgggaatcatggccaaatatcgacaggaaggttgaagctctccaacggcacagtcatcaaacgagacaaaaacaaatgaattgttgggaagtagacatgtaactggcctgtaccagggcatagtatctgttcttgctcgggaacaattcacaaagcatgcccaagtgtctgaagcagtggccaaatagacaaaaccataagaatcggttgaactttcccccaaatacggaggccagtaatcgatgtaaggaaggtgatcagagcgaggaagagggcagctggtgccgtttgtatcatcatcctgcaaggtggcatccacaaccgagaagatctcaccagtatagttgatgctggtgacatagtacgtccgtgtgttgatctgaatggtagccctgccactgctacatgagaggttgtaccatgggcgaagagtaccaacgcacgggcgtgaatcgcttgcaagacggaaagggtaggatatgttgccaagatcaccacaggaggaaggaaaacactgctggtttggccctgctccaacaacatctgctgcaacaaccgcaagcaaagaagagacaagcagagatttctgcaagaagtagaactttctacgagtggcagaagcacgagatgcattggatttcgccatggctcccagtctggcaggatttgccttgccgagtagtataatttggtgggggttggggtgggtgctttcactggggagattttttccggaagactgaagaggaacagtattgctccgtactgtcataaattttgataatttgatcctttgtaaaactatttttataaataaaccgtcgtcaaaacttatttcaaaactgactcttttgttcagcgtcaaattgtgtggcgctgaatttagatacctcagcgtcaaatagcatgacgctgaatgtacattggcacgctgacttagcctcccatccgcggtgacacagcatttagcgtcagttgacgtggtgcggaagtatctaaattcagcgccatatgatttagcgctgaaaaaaagattatatttttaaataagttttggtgacgaattatttgtaaaattagttttttcaaatggtcaaattgtccaaatttgtaccgtactatagtagtagtagttggagactttttccggaagcaccccaatttccacagtcgcgatccaatcaagtaaatgctgcaatttctcgttgactagacttcacatgcagctttccggtgctactgtatagtactactactgtagtacacggattggaacagtagttgtctatctttttaactcgacgcaattgccctgcctgctttcttcctggatcgtctccatgctctgtctgtttgccacagacacagtgcatacagacaatagg

SEQ ID NO: 6088 - DNA, 285 bp, Oryza sativa
attattcctgtgttttcctattcctatgtttttcctatcctgtgatccgaacaagcccttagcaggcacaaatcatggaagcactagccttttcttaacataatgcatagtatttatgtcctcccaatatggttatagctgaatttaatcgtgcatggtggatcgatagtgcattatatacaattaaccgagcattatgtataaaacatgaccataaattaatcgcaaataattgtaatatcgaaaaacgacacagcggacaaactgtatataaaaaagaaagaa

SEQ ID NO: 6089 - DNA, 2000 bp, Oryza sativa
ttagatcacgaaatcgcatcattggattgtcatcaaaatagtttgatagtttcataattttttttcacgtgtaagttgtagctgtgaacttcacgtcataattttgtatgaaccaaaaaatatataaatgtaaaaaaatgaggaataacaacttaaggcggccgcattaattttttatttaaattaggaattgaaagttcaattttgtagcggatactccctccgtcccataatataagggattttgaatttttacttgtactgtttgaccactcgtcttattaaaaaaatttgcgcaaatataaaaaacgaaaagttgtgcttaaagcactttggataataaagtaagtcaaaaaaaataattccaaaattttttgaataagatgagtggtcaaacagtataagtaacaactcaaaatcccttatattatagaactgagggagtacttaacatggttaaatctatctaataatttcttaactcccctacgaagcttaggtgtagtgataagaaaaatcgagaaggattggtacaagttaacaacttaatcaatagattgtgcatatagcaaacaagtctatataataacacaaagagaaagaaagaagacccattttagttgatagtggtattattacccaaaaattaaaaatacgttcaatttagacctacttttataagcatcatgccagctacagctacagtcacagcctctttcatccctttttctttcttccaaaaaacgctcacctgtagtgatggatctatgtgaaagttgtgaggtcgaatgtcgaatgaccctacagcttcttcacattcattcttgagtactaaatttttcatggaaatccattcaaatctacacaaataatcccactgaaatatttaataataataatcgatctcacaaagtaactttatctaataatttattgactccgccactgaatttaagtgtagtgataaaaaatcgagaagaaggtttggtgcaaattaacaacttaaacatgaaattaaattgtacatgtagcaaacaacctttataataacacaaaaaaaaccattttagttgaaagtggtattgctaaaagagttaaaagtatttcaatttagagcaacatgccagctacggctacagtcacaacccctttatccctttttctttcttccaaaatacaaacgcttaccttacagtgatggttctatgtcaaagctgtggggtccgttgaccccatagtttcttaccatcatcgtttagagtttcttaaattttctatatttatccgttgaaatttacacaaataatcccactaaaatatatagtaatgataatcgatgtcacagagtaaatttgctggctctgccactactcacctgtaaccccccaactatgccaccaaacacacataactcatcgcctcatcatcgtcatctatctccgcatgagaccgcatccttatcccaccacgtccccctcgcgctcacgcgcacagcaacaaaggaaaaaaaaaaaacccgtcccttttccctggccgccccacsgctcccccaccccacgtgtcgccggcccatcggcggcggcgcctgcgtgggccgtgtggcccaccctgcggccccttcccgaaaacggaaggccccccccttctcccctttycacgtcactgcgcggtgggccccgcgcgtgcgtccaagaagcgtgacgtaagcagtgwcagaatccgcgccgcctctcggggcgcccacgtgtcgcggtcaaacggtcagcgcggggccgggggctcgcatcgcatctgctccacgtgtgcgctatcgcggctgcggccgcacgggccacacgtgtcgcttgcccccggctctataaatgcccggctcctcacccggaacaagtttcaagccctcctctcctcttcccaacactagtaggataaagccacagagagagcagtagtagtagcgagctcgccggagaacggacgatcaccggagaagggggagagag

SEQ ID NO: 6090 - DNA, 2000 bp, Oryza sativa
atacatttgtgagggtagatgtggttgtcagacacatcaagttgaacaatggtggcaggccattatatatggggaacctcaacctcttgcataggcccttgagaatgggtaaatggacagttacaacagaggtaataccctctgtctctgttgtttttcctcaaattagtcaattcaactttgaagttcactcatttgatagcgtttcatattctgtttatatttgatccctcccttttttactaaccaaggaaactatctactcctttgcaactgtgtttattctgttcatgaacaccctcatgactttcgatgcaggagtggcctgaagacatctatccaccttatgcaaatggacccggttatgtgatttctggtgacatagcgaaattcgtcgtgtctcagcatgccaaccagagcttaagggtgagcttccgatgacgcctatcacgtataacttttatggcgatgtattgatcggtttccctttttgggtcatgcactgcagctattcaagatggaggacgtaagcatggggctgtgggttgagaagttcaactccacgtctcctgtcaagtattcccacagctggaagttctgccagtacggctgcctggagaactattacacggcgcattaccagtcaccgaggcaaatgctgtgcctctgggacaagctggtccagggccgagcatcctgctgcaactacagatagcgagacgacaaatggattaaatcagtcactcgactttagcattcctcctccacctgccggttattttggttggtggggtggctggctggtgttctcttttttgacacgaagaatcacctgacaatagcttagctgctgcaatgttgactcgatcgagctcatcgcttcacatggctgtgatgttggggcttgaagattaggcagctccggtccatggttccatgcatttgcctgatttccattcgccatctcgtggcgtctatgtccttattcctgtaattgatcccaattttgatgtagtagatgatcagatcagcatattattagatatatatgcctgttcttgtagcctagaatcctagaaacttggacagaatcctgatgatgctaaaaatcatctctgttcttctctttcttgtaaaagatagcctctttttttctccactcatgagttccatcgatgatgtattttctctgtcattgctattcttggatagcacccactcaactgttgaagaaactaaactagatttgttgtcatttgtgttatctctcttttttcccccccattttgacgctttatgctacaaaatgactactgagatcagtgccatttcttattactccctccagtcatatatattgaacgtttaggtaaaatttggttatttcaaactctgatcgtcaagaacttcctaaatgtttagttttaaaacaaaaaagaacatagtatgagtagatttaatagaatcatatgatatcataaacttactagattaaattcattctaaatataggcagtgtctagttcctttcaaacttctaaaaatttcgtcacatcaaatgttttgacacacgcatggagcattaaatgtggacgaaaaaaatcaattacacattttgcatgtaaattgcgagacaaatcttttgagcctaattacgccataatttgataatgtgatgctacaataaatatttggtaatgacggattaattaggcttaataaattcgtctcgcagcttacaggtggaatctgtaatttgttttgttattagtctacgtttaatacttcaaatgtgtgtccgtataattaaaaaaaaattaaaaattttggcacacgaactaaacacggccatagcattagtagctaaagttttaaaattttgaccaaatctcgctttaaacttcaaatatatttatagcgagacgtcggatgaaaatgaacggtggatacggcgggtacactctgcaagctgtgaacccagtagtccagcagtactcacc

SEQ ID NO: 6091 - DNA, 2000 bp, Oryza sativa
agttacctgaatagtcggataggtgttggcagcagcgttatccccaatcagcaaagaatcacactgtgaagaattataagcattttctgcgcctgagtttatctggaccaacccacggtagcaattccgtgacttcccagctgagatacctttggatataatccgactccgcgaattctttcccttgtggatcatttttgtccctgtgtctgcctgctggtaatccttcgtcagtgcaactgagtagaactctccaacagtatcatccccaagaagctccacacttgggtacttccatgtaattgctgaacctgtctcaacctgtgtccatgagatcttagagccccgccctttgcaccgtcctctcttagtaacaaagttgtaaatgccccccttcccctcctcatcaccagagtaccaattctgcaccgtagagtacttgatctctgcctgctcctcacacacaagctccacaaccgccgcatggagctggttggagtcataagctggagcagtacacccttccagatagctaaccgtgctcctctcatcagccacaattagagtcctctcaaattgcccggtctccttgtcgttgatcctaaagtatgtcgatatctccattgggcaaaccgtatccttgggcacatagcagaacgacccatcgctgaacacggccgaattgagggcagcatagtagttaatctgccggcggcacgacgctgccaaggtagcgcttgacaaggtccgggtactcgcggatggcctcggaaatggagcaaaagatgacgcccttcttcatgagctcctcccggtgggtggtggcgatggaggtggagtcgatgacggcatcgacggcgacgttggcgaggcgcttctgctcgctgagcgggatcccgaggcgatcgaaggtgttgagaagctccgggtcgacctcgtcgaggctgttgagcttgggcttggtcttgggcgcggagttagtagcagatggactggagatccaccggctcgttacacgttgtcgctccaggtgggctgcaccatggtcaggaaccggcggtaggcggcgaggcggaagtcgagcatccacgccggctccgccttgagctccgagatgcggcggaccgtggcctcggagagccccttggggatggagaaggactcgaaatcagacacgaacccatacttgtactccctcttcagcaggttctgcagcgtctccgattccgtccccgcctgggacgacgacgacggcgatggcttctgcgggcccgtctgcacggccaccaccgagaggcgtccacggcgcgtgcacggcctccgccgggatccgtacgacgacgggcacgccgccccgagcttggcggtcgcggcggcgcagcagggcgagaagaggggcgtggacgacgcggcggctgcggccatggtgcggcggcgtggcgaggccgaggcgaaattagggatgcggatgggatggagagcgcaggaggggtgggttgttgttcggtggtgtggacccgtgctacgtgagcctcagccgcgcgtgaggccggcgcgggtgggcgcggtccacgggaagcccggcgcgatgggggcacggtcgtgtggcggccgagaggcktggcgcggcagtggatgtggttcgcgccgcgtggcgggccatgcggaaaacgccgtggttttgtgcgatttctccccgtttcttggcctcgccaatccgccaccgcaaaaaattccaccgcacacgcgacgacgaaaccgcctctggctgggggctttagaccttcaacggtgcccgttcacccgcgatccgacggtgggggagcccctcgccgtccagatctcagcctctcggatcggacggagcgtgaggtcgtcgggtcacccaacattttctccacacgcggcgactttctagcaaaaacgcagttcgtttaacgagagtcgctcacttctcgttcaggttcagcaatcgcaatctcgtctcatcgtcgccggcc

SEQ ID NO: 6092 - DNA, 2000 bp, Oryza sativa
ttagcgagacgtctagaaagttaaaaatgaacccaaatgataattatattcagtttttaaaatcccaatgacaataaagagaaaaggtagtggatgggccgtagatgagcataatgaccgtgtttgacgagacttctagaaattataaaaagaaacccaatgagataataaaatctaagattcaatttttaaaggtttcaaggagaataaataaaaatagtggtagatcgagcaagcaaataaagaagaatatgacttaggtaagtagtagcagctggtgtactttwaaaactatattagaaatacgggatgataaggtttgattttttaaagtcttttgacaacgagatatctacttaataatttttaagtaaaatcatactgaaaaatatataattttgtttgggtgctcgccgcgcaattgcgcgggtcatccagctagttttgttatactacttcgttttttaatcctttgcaattgtttcggttttgtaactcaacttagcaattgcgtgatacgggtaagataatactagtcgtcagatagttgagaaaaatcaatacttagagtaaattgcatccatggtgcatcaacttggtatgtgggtgtaatttggtacaataacttaaaaaatgagcgttctagtgcaacaacttggtaggtaggtgcaatttagtttaagaactttgtaagtgatagtataaatgcaacaacttgcaaggtagatatgattttgatacaataaattaaaaagttatacggcaacttaattatttggagtattttttatataaattcaatttttaagtacttattttgacaatatagtagcgcggatttgtataagtatatttatatttttatcctaataaataataattgaaagtcaattaaagtggatgtaaaaattattatatttcggttgatatttgagaaggtgaagaaaaaaaaaatcttaaaggtaattggatataaattgtactagaacgcacccatttgtcaagttattgtactcagacgttcaattcccaagttcttgcactataccgcacccacctgtcaagttgttgtactgtaggtgcaatttacactaatacttaatattggagtcgtagatgttgtttaagtcgtggaaaaagaaaattcagaaaaatatcatggaaaggaaaatctgtgggagggaagggaagggacgagggacagagaccaaaccaaagcaccatgggctgcccccgtcgccgtcatcaattcatcatattcttctttctaactggagtacactagtgctaacactcttaagactaggggataggagtaataaagtacaagtagtagttgctgttgctaattataatccatactaataatcaaacgacctcccctcccttctccttctccttcttcttcttcttcttgttgcaggtcacatgggatagatagatactccttcctccttccccctctcttccaatcctaatcctaatcctaaagaaagaagttggagaaatctcacggcggaatcaatcccacgcgattcgtcgtcgatctggccacggcactccgcttctctcttctcctctactccagcacagcagtatgagtatgaattaggataggagggagggagggagaggaatagcatagcagcagcctgcaggcggaggaattccgcccgatttgatttggatttgggattcttctctttcgttttcgtgtgtttttttttyctttgttactacccttcaattcctccctttatttggggccaagccaaagccaaagcaatcaaccccgatttcacgccgcaagattctcttccttctcatgcaccgcctcttaatttcttcttctttcttggggccagaccccaacccccaatcccttgaccaccaagctcctgcttcttgcaatcttgatcgatagtctcctccatcttcttcgtcaagcctctcctccttggatctttcttactacctaggtttcctggtgcaagtgcaac

SEQ ID NO: 6093 - DNA, 2000 bp, Oryza sativa
gtaagacacacacacatatatacaactcaggcatggatgttccaatatagtaagttagtaatcatatttcatgattattacagtgtttgggagattaattcaccaattaaaaatttgaatacatactatactaaaaaaatagggacacaaattgaaattatcatgaaagacttgagtgaagcaaaacttcaattaaacagtaaaattgaataatctaatttaatttctatattgcagcaacttgaaattgttgatggccctgcctctaggagcatgcatccattcagaaaagaaatggccaaagatctacttgtcggcgagctccgagttttggaaagtgctcatgcatgggttgcaaattattgtgaaacaataaagattccacaataatctcatcgaggcaatgccgctttgacaggagcaggaaagggagtttaacatcagagtcactgttccatgcatggaagacacttgtctctctggcgtatgtcaacttattcaaagagaaaaaataaatcccctgccaacatataggctggtatcttaagcctgttcgaaatgtatgaattttgcaggaatttcagaggcttgatatttttttcattaaattcatgaattctaaatggcctttacctatttatctcatgtgagaagattgataattaatcagattgcctttggaacaatatgaaatgtcgctcttctttctgaaagaatatagcaagtaatttagaagtagaaccctattccattccatcgtggggcacagctaggtagcagtattgtgtgcctgttgtctcatttgatctgccatttcagcgcagttattatttttcctatctgcatttaagcaattctattatgtacatgtttgtgcatctgctgtgtgttctcctttcctttaacctctcaccatcttaactatatttagccattgaatggacttggctatgagcctctcaatggcatctcctccctcctcctttcttgctcttttcatttgccacttctctgttctcgtgtgttagttttcatgcacaggaaagactaatgctttggattttggagaaggtgaaggaggaagagacagaggaggcaggatgctgcagcgggcggcgagcaatgcgtattcatggtggtgggcgagccacatccgcaccaagcagtccaaatggcttgatagccatctccaaggtgaccgtccaatatataatcttgatcttttttatcatatatttgatttctgtgagttatgtatgtacttatatgggagatttgttggtttgttcaatcctagaagttcttcaatggggagaataacgaaattattctaagccttccatccatgtgattcttgatatgaggctacagatattcttatttggagtagcacgagatctcacatctctaaattaatacacataacctcttcacttttctgggtaaatctgcacaatcataatcagcttaggcttgttgatctgaagattaaacatgtattgcttatgggaatgggactgaggatcaatttggaccaaatcgaatgtgtaaattcctgaacctccagaactgaggtgaatgcatatgcgtacaattgatatgatgcaacctgataaaggggacaaagaaacattatacatctagatggaaaacaatcgccttaaaaatatattaaatttactttagaatattgtcatatcaggaaactgtttctcctgtttgggagctttattcctgtgttttcagcagtttctgttgcagttatacttgctagcaaaacaaaataatgttgatacccgtgacataattagggcctttttgaagctatgaaaccaataatgtatgtgaaatcttatctgctgtaaaatcatcatagaaatttgtgtttctgatcccatgaaatggtcttgtggatatatatgcagatatggaacacagagtgaagtgcatgctcttactccttggagaggaagctgaattccttttcaaaaagggcagag

SEQ ID NO: 6094 - DNA, 2000 bp, Oryza sativa
acattagggcttgtggaggagacaccgaagtgacttttacgtgtcccaacccaacccaatgcccagcgaactgcggcggcgaccacatcggcggtgcaagcaggcgcacctccggccattcctctgtcctcgcctcgtgcaggtgctccgcttctggccctgttcagttgcaaaatttttcaccaaacatccgacttttccgttccattaaaacttttttttacacatataaacttctaactttcctatcatatcgttccaatttcaatcaaactttcaattttgatgtgaagaaaaaaaaaacaggtctgaaaaaccggtccggttaattcggctttttcttacagaactgatattttctgaaaaccgaggcttcacgtaacagattaaataaaccgaaagtcagaaaaacatttttaatctgtcgaaaatttccactccacatctcccgttcatcccttcactcacttccctcctccttatccacgaaatcaggaggcscggcgarggcggcgctcacagccggcggcgggcggcgggcggccgcgtcgtccctcctccttccacgcaccgcaacctcgggcaggtgaggatcgagtcttcatggagcgatgttgtttattagtgatgatttttcatgctcgtgaatttgtacatgatctattkggtatttgygcccttacataaatctgaactgcttattaatttacttgtgaagttgtcgttcgttcctggaatggaaatgcgaagatattaataactggttaattaactaattaaacaaactaaaaaatattaggatttgacaggaaaacgatattgaattattgatagatttgtcgtgaaaaaacacgttcatatggttatacttttaatatttcctttaaatatgtagtttgaaaaaaaataaggatgaaacatgtgcattggagacggtgtcgatggcccgctatgttgtatgacactgtagtgtgttcttgtttgcctcgctatgttatagatggacaagaggaccaagcttttttgtattatagggctgcagggcatatgcgtctagaaaaaggaaaaggatgcgatgaggcaagccattagaaataggtcaatgaatgaaagggataggatgggaattatctaaacactaaaatatgtaagaatgattgaacttgtgtaaacatgcttggacttaatagtaggggtgaaaacggtacggaaacggacggaaacaacctttatcgttttcgttttcatatttttttcggaatcggaaaccccggaaacgaaaacggaaacgaatattatcgaaaccgaaaacggagcaaaaacgaaccggcgcggatacggtaacgaaaatttatcggaatacaacaacccctcaaactgagcttcaaacttttgtcaagtccaattctcaagtctcaacagtcaacaattcatcataaaacacaattatatgaaatcgtctcaacagcaaaatatattcttctataacttcatataatttgcataacaaatatttaaaaaaaattacagcaaaacacccttgtataagatatatagtatacactattattcagtgctatagtgctaatctgctatgagctactgctaatctgctatgagctatcactccatcatcagtacatagttcatcaatgtttcggtcatcacacaacagcagcacacatcaatccatcagtacagtacttggatcaatcacaaaacagctacttgcatttgatgatccatcataaatctacagcacaaaagaaatcaaatcaatggtttaggctcgtcggctcgtmgctgggctgctggctgctgccgctgggctgttggctactgccgctgggctgctggctgctgcgactgcgaggcgaggcgtcgtcggctccttgggtgtggctgtggcgtcgtcgtcagtggtggtagcggcggtgaaacggcgggacggcgccgcggccgcgagacggcgctgcgaaacggcgggacagcgtcgcgag

SEQ ID NO: 6095 - DNA, 2000 bp, Oryza sativa
cttgatcatttattaagataaggaacctcaattaagcaggaacatcagatcgatcaccagttgctagctaccaccagctaccattattcagctgtcatttctgcagcagtcagattaactttagtccaaaatttttctctgcctcctctagctcccaacaaaagcctgtcaactctctgtttgaagaaaaaacgcatgtatacactgttttagatcagctgaaaattaacttctctacagaaatgaaatcatatatctgtgtaccaaaaggtgtgtttagttcacgctaaaattgaaagtttaattgaaattggaacgatgtgacggaaaagttggaagtatatgtagaaattttttttttgatgtgatggaaaagttggaagtttgaagaaaaagttgggaactaaaccaaaccaaaatggtcaaatgcctcctccacgatatgagcccgatcggttgaccaatgatggattatatgctagaatggctttagtagcgatacaaaataatttatgagtaaaacttttatatgtgtctctagcgacttaaagatcaatgctgaaaagaaaacaaagtccaaaataccttaaaatcaactccacaatcaagctttaaattttaaattttggccgcgactgattcgttgtaagataaacgatgatgcttgagacaaatggcctccctgaactggagagagagaaaaaaaacttttgcagctttcaagaggcgaaatgagaagtttgatcagcggaaggaaggaagggaggaaagaaggacgggtccccctggctcgagcgagtcaagtgagagtgagtgacagacacctgcgaatccaccgcgagatcctggcgttgaakcgckgggcgctctgccgatcacgtcgccaacagtgtgacagttcagcaaagatggcgatctttcttttgctctcgagtggccctcggtactctgaactcttctgaagtctgaagtctgaactccttcaagtggcgatctgcatatagatactagaggttgtctcattatttatttgctcccgattactgtgaatagtaacaagaagtagtattatagtagtatgaatatatttttctgaagaattgtgacatctagtatagaaaagaacgcagtaaaagttgagaaaccagaagtttgcaggcattattttttatccagaggcaaatgcatataaggaagtgagggagaaggtttggtctgtacagttaaactgattccgctccctttgtcgtgaaaatacaatctcaaagacatgtttatgttcttacattaaaaaaaacctcaaaaacttgtttatgttcttaagacaaaaattactcgtccctacacaaaagtcaatccacgaattactcctttaaatattccttatggtggttttctaaatgtatagttgtagcggtagagtcacgagtgcatgattctactcaccagagtttaattccttgtgtccataaatatggttatgttcatcctcgttgatgtagagatgggagttatacatttttcccctttttttttgggatatacagttcccctcgcaaaattcaggtcgttaattggaaaaacatttatgctaaacaggccgtcattacggtgatagcaatacgaaagcccatcacagcagtctcccctttgacgggccggcccaattactcccacaaaccaggctgggcctttgggccaatatgtaattacagtaattattccttatactaataataaatgcgcattaagctggggggctttcctgcaaaagagcgcggaaaataaaaatctcgcacagaggcgtatccacgctttccttctcccctcccaccaactaatcgatctcctctctctctctctctctccctctctatcccattcgcgaggcggcgtctcctcctcctccccgtctctctcgcttcccccccaaatccggcggcgaatccagggccccgcgccgcgccgacgaccaccgccgatcgcgaccaggagggagg

SEQ ID NO: 6096 - DNA, 2000 bp, Oryza sativa
aaggttgtggttgttgtaatgtgagaaaggtcgagatttagacgctttgtcgaattgtcaaagaaagcaaagccagagagaaatttgtaacactaactcatggacattaatgtgatgtgtgtcgatagagaagtatatactactttgacattgttgttgctttctagcagttgaactctgaaccatatgctacggagtacaagttaaacttgctacaggatcattgcaaaatcaagcattttcctgtacaccaccggtggagacaagagttgctatttgcgctgagttaaacattatgatagaaaccattgcaggtaaatagataggagcgactgctttcaacatctcattgttgataagagtttgtagtcagatcggcttactttacggaatgagatcatcagcatggccgcaattaggttcatggtctagaacatatcttaccacagcatacatactcctgtgtaaatatcctctgcatagaccacccaagctggagcacaaagaaatccaccaggtccatctcatgcggcagacacagcgaaatccccctgtgatcaggactgaatcggggcagcaggcggtccatcaccttcccccgttgaaaatgttattatatttttctataatcttagctaaatttaaataagtttgattagaaaaaaaatcaaaataacttataaaataaatgaagggagtatattttggcacaaaggaagtaggtcagtttctgcatgcacctacagtagtgctttaggtagtgggaaataaaattttaagtctcaaatacactgctaaaatgggccttaaaatcagtaagactgtcatccttgtttgtcggtggtttttccgatgcaggctggggtggtttttccgatgcaggctgggttggttgcctagatgatcgtcatcagctagaaatttttctatatttctgggtactaattttgtctattggatagccagaaaacatgcatcagtatcaaggtcaagtccaagagcagagtataatgcttaagctaatgctacgcaaaaattatatggattcaaaccttgttgcaataacttggcagagtgttcgtatttttggttatttattcttttagtggtagacgacgtacccattaacagtgaggtgtttgtgttaactatgttaatattaaaatataatggtctagtctctcagagatacctataggggtaggttgtgcattgataagggtgagtgtgcacgtgaacggtgtcacaatttttaaaatgtttcatttgctgattttttttcatcatttataacttaatgttttacccgatgatctaacaaccgcttgttttttagagacacataagttttttccagctaattaccatatttttacggtattttttctagcagtaaagacagtaaactttcagtaccgtagcaatttttcttttttaaaaaaaaataaacttgattgtgatgtgggctgggccggaagtagaaaaaaaaaacttgattgccattcccccaagttggcacggggcgggggccttttgccctcctcggctacacacccatgacccatcccaccaccacctgtcgcgtcctccccccatccctctttttccattctcacctccgcacttgggcatttggcaataatcacattcttctcttctcatcgacccctccgcctcctctcctctcctttccattttttccccatcgcgccctacttaaccacgcgacgccaaaaaaagaaaaagaggagagagcaaaacaaagcgaaggctccattcattcactccatctcctcgcgtcccctccccgctccccccgccgcaatccgcattcgctagggttcgcgtcctcctccccaatcccccccgtaccgacgagcatcacgagctaatcggttcggtggtgctcgtttgctcgcgattgcattgcgtggtygcgtttttttttttgatctgatttggggttgggggttttgggtgtggtagggttgggttgggag

SEQ ID NO: 6097 - DNA, 399 bp, Oryza sativa
attttattatctaataataataaaaattaataaaaatattaaataagacaacggtcaaacaatatacattgaaatttataattgcgtgtaatataggatggagggagtaaccagcaatgcaccaatgcatactgcataggcaggtcttcaaatctgagtggcgttcgtgctccctcctctttgtgtttgattattcgttccggtgtgcgcgaaagcggggaaggagcggggtacgcatctgtacctgtacgggatcccggcgagattcaaccttgcaacctcatgtccttgtgttcatgtgctcgtacgatacgaaaatagaattctgatacgtctgtataatataggggtgagagggtgccactgccaactggtcacctagcccagaaacccggcaag

SEQ ID NO: 6098 - DNA, 2000 bp, Oryza sativa
tgatggagcaatgatgagctctgggccgggtttgtcatgtgatgggccgtgcagtctgttgtctgggcctgccactgcacagtgaacccattttactacttcatcgtttgacaagtcacacggatgaatggatgatcgcattgccggactagtcctgccaatgccctaccttttttcaagcccctgagcgaatgcaattcgtgctcatgagtcatgagtgccacttttactactagtagtaggataggttaacatacaaattctgatacatggcctaggcaggattaccattgatctattaactttcaactgaaatcataagctactaagagcaagttcaaatagtatagcaaactaccagctctaatttatctatagtcaatctaatagcttatttatataatagttacatactacactattaatacctggtcccacatatcatacacacacggcgtcttggagtccgtgctacggctggctacaaatctatagcccactgctcttctctctccttatttatcttcttaaaatatgtttacagctgacttatagcctactattatacctactctaatagcgtagtgatgattaattcctgagctacacatgccacttagttatataactagagatatgcaaccaataccaatcaaagaagtacaaggtagctatttacacccgttaatcaaattcagtcatatataaatcgaacggttagattgtatgcataacaatctattatattgttaaaggaacagaaaaagaagtctccacgttcgctctcatggcctagaaattctcacattaatcggagaaaaagaaaaggcagaatccatatagaaatacaatttaaaaatagctgaaattcagaattaaaaaataaggaatattagaagaggagactagagtctatatagaaatacaatttagaaatagttgaaattcggaattaaaaaataaggaatattagaagaggagactagagtccatatagaaatacaattaggaaataactgaaattcggaattaaaaataaggaatattagaagtagagtatagagtccatatagaaatacaattaggaaataatagaaattcggaattaaaaataagaaatattagaagtagagtatagagtctgtatagaaatacaattaagaaaaaaaaatagaaattcagaatttaaaaaaataaggaatattagaagtagagtatagaatccatataggaatttaaaactaactaaaattcagaataaaccataataaaattaaaagtagagtttagagttcgtataaaaatataatttacaaataactaaatttcaaaattaagaaaaatatgggacgaagagtttaaagtcaatataggaatacaatttagaagtaactgaaatttgaaattaaaaattaaaaaatattgaaagatgagtttagagtccaaatagaaatacaattataaataataaaaattcagaattcaaaaaaaataaatattaaaagacgagtctagagtccatataggaatatatataatttataaataactaaaatttgatattaaaaataattaataactaacatgtatataaaatacaatatgaatattacacattagtagtttcgtaaagttatagcaaaatttaaaattatgttgtcattttaatatatttgaataatataatgagagaatatatatgctattatatgagagaaaatataatgatgctagccgcgcaatattgcgtgggccaccatgctagttttattaattccttccaggtagctgtcaaaggagtagtgtgtagtgtcgtgtggaattcgcgaggatgtgcatgaacttgccaaggcagggatgcagttgcgtgacaaggacacacgtgaaatgtagcgagagaagagtcgtagtagcgggcgcgaccgcgggagtgtatacggagagatgaagcgagctctctccaccaagcaaatcgcgagccaaaccaagaagacatccac

SEQ ID NO: 6099 - DNA, 1137 bp, Oryza sativa
  misc_feature (1)...(1137): n = A,T,C or G
ckngcgcaaaaaaaaccccggagccgcanccagggagccaaaagarggctcggntcggcgcgggcgggttacgcacgcgcgggcagagcggagggagccgaggaggggcgtttygcgcgagcggttaagcgcangcgcgcgcggcgcgcgggcggagcggagcggagggggagagagagagagagagagagagatagccggggagggagggggagatgggccgagagagattcggcccatcgaacccagggggaggcaaaatagacttttgcggaggaatttgagatctgagatggcacggacactagacaacaagcaaagaaacaaatttcscaattagggtttttaagagataattttcccgctaggcgccacgacggaacgggcgcctacagctttggaaatggcaatggttgggtgggagctggtgctgtgggcgaaatcctagctcgatgttttcgggttgacaacgatgacgcctcggtgttgtacttgctcttgagaatgttgctgagttgtcagctctctccacccgatatgacttttcgggtgaaaacctagtccaaggtggatagcctccatggaggcaccgcctcgaaggtcatgttccctcgcattcattgccttcttcctagtttggccttctgcgttcggttagtttcgtctctaggttggtgtaagaatgagcagatctttccccctctctctctctctcatcctcatcctcaaacctcctgtgagggtggccgggagtctgtcgtcgacattcttggtgaaattggtttgaagcgagagcgtctgcgacctccttgtagggctagcaattatcggtcacgtacaacgggtgtgtgtttggagcctgtagcatgtggtggagtagtcttttttttttccctaattatgaccttcttctgttgtaattctatacataatttttttcatgctatatcaatatgaatcttcttgtgttgtcttgtgcgggtcattcagaaaaaaacactattagtaagtgggaaactagaggccgaccggaggtttctttctatcgttgggagcctctctgccttccgacctccatcgaattgggtgcagaccagcagcagccaataattaaggtcgtcggccgtatatatgatg

SEQ ID NO: 6100 - DNA, 2000 bp, Oryza sativa
attataattttacaatgtaaaattgctgtaaaagtagcccaatcatgatatgaaattaatctgcttcgaaacaattatcccgctaacgtgattcaggaccagccagccatcatcatcaaccaccatcatgaactaaaacgcatgaaccagccggtaaaaagaagagcttcacttctgaattttcacagcaccgagggtaaaaaacaagagagagcatatgttttcaatgttccaaaaaaaaaaggcatatgtttttcaaaaccatgtagcaagccatcgttaatcgtctcgtttccaactgagtatatattctgatgggaaaaaaargcatatcagatcaaagctctgtttttatgtataactggctgtccttttcccttgcagcaggcatcactctcacagtctcactcatttcactgttgtcacacggaccaacatcagtgaagtccattttgacaaagtcttgcttattgttcctagttaggccgtgacaccatgctgacactgacgtctctgtgtatctctatatcgtagttctgttttatatcataactcacttttgggattttttttctagtcaaacttttcwagttttgactaagtttatagaaaatctagcaaaatctaccacactaaattagttttattaaatgtagcgtgtgttgaaaatgttactatatttttctataaattttatcaaacctagaaatatttgacttaaaaaaaattacgaattactatgttatgaaatggaagggatagtagttttcttgcatcaaatcagcatcatcgaacatgtattgcctgcaacaatcggttcttcacttctccctgaaactaaggatgcgttcgttgtgatgagttctggaggattgggtgagaaaaggacatcgtattaaacgcgcacgcttcccaaactactaaacgatgtattttttacaaaaattttctatagaaaagttgctttaaaaaatcatattaatcaatttttaaaatttaaaatagttaatactcaattaatcatgtactaatggctcacctcgttttgcgtatcttcccaatccccctcccaaactcaccctaagcctacaaaacatcctaacaacattccttctgtcaatctgtccacacttttttctcccagtgcatgccaaagtcccagcacttgatcatggacataattttgtttaatccccaccaaattgtccacccgtcgacgtaccttagatcacacccctcatcatcactaagctccccatcatcacctttaagaaccctctatggaacaaaccatttcttcctctcttttttttctttagacaccgggaaccaccagtccaccaccaaaattagcatggaagcagcttctccgacgtgaatttctccgtgacatgatcactaatatatggatccgataggatcatgtatcagtaaccacgtcctctaactttacgtcagatgatctcaatctggctagcactagcaccacgtctacgtacgtcgctgccacggtacagggaatctgagtgaggacttgccgtggaacgagggatatgttgatgagacgagggcgcccgcgcgagcgtcttcttcctcctttttttgacccctcgcgcggtggcttccgcggacaccgcgcgcgcgagctcaccacgacaccacccaggcggccgggccaggagcttgcattgctttcaagccaagtcgtcgtcgtcgtctttctctctcacacacacaccacactctgttccactgtgtgtatctctaacctccaagcttatcatgtcatgttggcttcttgaatgcacatcccatcatgaggcgcatcatgctgatgcggttgtggtgctggtagttgccttgcgcgttctttgtctctgtctctctctcccgagctatagctacagctatagccttttcctgagtggccggggcgacctaaaaccgcacctctggtagcagcagcagctcgcacgcagctcatcgtgtcgtctgcatgc

SEQ ID NO: 6101 - DNA, 2000 bp, Oryza sativa
ttgttatagggatatattaataaatattataaattattaacctaacactattataacaagtggtctaaacaatgcagtacaagttctttctctagaaatcgtatttttagaagcgtggaaaaaaaataattagtggtgcaataagattgtttgacgacttgcagttgcagggcagtatacttgccagggaagtcttaagagctcaaatagcatatagtttatgtgcacttaaactctaatttgtaggttttgtatagtaaactattactgatttataaggtgttctagtgagattggtgagtatccacgtctttatgctactgtgcttcaagtagtatagtgtgctttaattgtttcatttgagtgaatctaaatttaactgaattggctatgaggccaaagtccttttttctatctcttttgattcattaattgcagagtctaattgttttgctttccagaaatattgacgacgttgacaagacaatggatgaaattaatgacaatatggagaatatgaggcagatccaggatctactatctgctcctattggagctgcagctgattttgatgaagtatttctcattctctcaccatgcaccactgtaaaggagaaaaagaaaaactaatatgtgctgtttttggtaggatgagctggaagctgaattagcagatctggagggggaggaattggaggcagagcttctagcacctacaacgactgcccctactgctccagtgcgtgtacagcaaccaactcggccttctgcccagagcagcaaaactgaagatgacgagttggcagctttgcaggcagagatggctatgtaattaggtatttccctgtattttactagcttaatcagtattgagcgaaacacacaaatcaaacaacttccaagtagatctacttacatgtttactagcaataggttgaaatagtttttttttattagctgcttgccttggatcagttatttatttactagagttcatactttgcagttttgcaggctttgatagggtcatgccaaaagatcagatacttcaaatactcctatattggactctggtgtactcatgaagatcttcctaggaagatgtcagagacacagaagcaagctgcatgccagcctaacccgttatgtatggtatcatgtcatgttactgccttgtaaatcaaacagagctatttgagcacattatgagctaataaaatgtactacccgtgatggcgtcattatgatgtgtttcagtctgtaccatatcgttttgacgtttttagtgtaggtcaatttatagtttctcttgattcgaatctgaagtactacattgatggtcgaatatagacagttctctaaataatgtgaatgatgattgtatagggtgctgtacattccttcagttgttggtactgtcgacctgtaataaattattaacctaggctttgtagctgtctaaacagtgatgtatattagtcgtgataattggacacatttaaacaattctatcacttaaaaagctgaaaaaaaattgggcctgttactggtgatctgttgtaataatctgaaaaatttaatgcacatgacagccattcatctgagtatatttttacgaacgaatttcacaggaaaaaataggcgagtatatgcgacagtgcgttcatctttggagttccggatgagtctcaagctctcaaccagatttcgaagttccctacgaatttcgtcgctcccctaaaccgtttagtggttgtcaaattttggatgaaatttgttatcagaatttgcgaaattttcatcatatcttgctggcctcggattttgaccccaaaacaaaaaaactttgccattttgaccatcgttgagcttttggcatgccccacctctgaccctcacctcaatctctctctctccgactcaacgacgccgcaagtgcaaaagcagcagcagcagattcgtccgcgtcgctctgtctgacagtgtgggccctccccgag

SEQ ID NO: 6102 - DNA, 2000 bp, Oryza sativa
cttctgttgaagaaagatgttcttctattctttgaaggtttgtgaaatctttgtacaagtacaaagctcatggcatctttcatgctagttgcactaacaaaacttcaactcatccccttgcagataattggagagcaactaactgaatgtctctctttatctggcacattataccgtgaaatgcaacatggggaaaccattaatcagattgagaaactctggctcaagatcatcatgtgcctaaagatgagcaagctcatcaatgattgttccttccttcaaaagcagcaaatgctacttcaagcggcagtcagtcacccacatcgtcccatttcggttgcaactacaccagcctggagagcatcaagatatgatatctcaaccttgcagcactcatcattctccctttctaaactggataaattgccaatggagagaagaaaagatcttactgacccttgcactcctcacaatgccatcgcgctcgaagaaatcgacattttgaggaagttcaaacacccaatttctgagttggagaagaatgatgaatctattaagatctctgtgggtctagggagaaagaggttgaagatcatgaagtactcaatgaagccaagggaacctggaaaaagtacagttcctcctggtaattttagctctaaaaaggatactgatgctgatgccttctcatcgcattacatggaaagcaaagcgtgtaggaaaccggaattaatacttgaaatgcttaaaagaaaaagatagatatgccacgaacatatttgcttgtatgatcgtctaaaaaaagttgtattcccgaaaaaagtttataagactgctgtacatttgtatacagttatactaaattggttgttggaatagatacactttgactttgtcaaatatcctgaaccgtaatactggttatcttcactcctcaactattcctcggttgttttgtaaagcctatcgggccctatttgttgttcctgtggattaccagcttatcttgaagtttaaattttgattttaggattaactttagccttttttttttcmagggtgctaacttcaaatataattcactctaataattggctctgggtagcagattttttgagacaagtctgattgaaagattgattaggcttttcgtggaaaaggattttccttcccaaaaccatcaaaataaggatctatctctatctctactattatagatgaatatgattcttgttctattgggaaataaaataaacaactacttcatccgttttataatgtaagtcattctagcatttcccatattcatatttatgaatgtgggaaatgctaaaataacttacattgtgaaacggagggagtagttgtattattatcaaaattgatatactagaaatattgagtagaaataataataagctacatctcttcgttgattcgagaagttcagtttgagaggttttatattccgataaatatctgttactgttttcgcatttgtattctataatattcaattccatttttkgtatttgtgcttcctgttctaattccgggcctcatcggttgccctatagttttttttaaatgtttttaaaacttgagttcgaatttgattttaatgttttttcaacatagttttttttcaactttggcttttcaatcactaagaccatacatataaaagttttactcacatatcatttttttaattgctaataagccgttatggcttataataagaagtggtcaactgatggggacctccgattcaggaaaaaaaaaatggaaaccaccgtagcccgttttctccctagtccgtaggagtacgttacggtatacaccctatataaagtacacgtgtccttccctccccggcaactagctcagtcgctcgcctccgctgctggtgtcgagccgcttccgatccccccccctcccgacgcgaggccgaaaccctaccgccgatgacgtcatccggcgctcccccgccggcggcg

SEQ ID NO: 6103 - DNA, 76 bp, Oryza sativa
ccatcaacttgcctcacttgaagctacaatcaagaaatccacatttctcctcggaaagtcaaaggcmagaaacacc

SEQ ID NO: 6104 - DNA, 2000 bp, Oryza sativa
  misc_feature (1)...(2000): n = A,T,C or G
gaaaacgaacggtctattagtgcatgattaattaattatttgctatttttttttaaagaagtggatcaatatgattttttaagcaactttcgtataaaaactttttataaaaacacaccatttaatagtttgcaaagcgtgcgtatggaaaatgagaggggagtgttgggaactcgctctcgcaaactcagcctaaactgttgattgtatgggccaagtgggcctcagagaaagtccaataagcaacgtcgtcactgggctgactttaattgggcccaccgtgtgctgttgtttctaatcacctgtcaggacggcactaataagcagcagcgagccagtgattctttctttttctttctagtactactactactactagtatactactacactactagtagagtacttcctcggtcgttaagtgtagttttagctagtaagtcactgttaagctaaaattaaacttatttagtataaatagagagagtagtttctactgatgcatgcatcgagaattctactagccagtcaagttgtactcctacataacgtaacttgttgtagtagcaatacgggaaggaaaagaaactgctgagaatttagtactaacacgcacgcacgccacggtcgacacgaatgacacacggctctcgttctcaaacactccttggccctggctctcccctcgtcgtcattatccagcagtcagagagtgctactacactagcaagcggttgagtgcacgcataaagaattcctcagcttacatacggccagacaaatcacctgtacgttcaactgttccaccagtaatgaccacacctcctacgcgtcaacactcgacacgcgggggccactgacccgtccgggtcagctcagttgcgtgtgcgtgccaagcattccgtgcacgcagcagcaagcacgatcgctcgcatcgcgcgcacgggaggcattcgcacggctgatttacctgaaacacacgtactccactcctctgcgatttggctgccgcgcgcgcccgccttgagagatcgatttccagcgagttagtagttaccgtcgacgacgacgacgaggttgatcgagttactacctgttgttaccgtgcggagatatttccggacggtgacaacgaaaatatcctcggttttgctcacgctccatctgggacagcgaggggttggtttgggggaggcagagagaggagggcgaccccaaaaagctaaagcaaagcgacgacgaggaggacgccgacgaggcggcccgctgcggccacgtggcgcgtggcgccggcggggatgaggttgcttcaacgtgtggccacctcgtctttgtgcttgcgccttccccgcaacctagatctttttttgtcctcacccagtcactcgtccgaacacttgtctaatcctcttgccaaactaaaattaaaacgtgcagcatgattagtaaaattaacgctgtcgtgccaataatttcttgacgacaacgacatactacctccattttttaaatagataacaccgttagactttttctcacatgtttgaccattcgtcttattcaaaacatttacgtaattataaattaatttgttatgagttgttttatcactcatagtactttaagtgtgatttatatcttatacatttgcataaaatttttaaataagacgaatggtcaaatatgtgagaaaaaaatcaacggcttcatnyattaaaaaatggagggagtataatgttgaaattagaggtagataaattttgggaaccaaattaggaatgacttatatctcaaatcataattwagggttcagtttaacccgatggatttggacctgaacgtaatttcgaaacttcccaagggtatttcaccaagccgtacgcattatttaaccgatggtgagtggtgagcacacgccctttcctaaaaccaaggaaccaaccccacaaaaaagcgtaggacgccggagtgcgaaatccttatccgctcgcggcgacgcc

SEQ ID NO: 6105 - DNA, 2000 bp, Oryza sativa
attagacatcgataggagatctacatcacagacatcttagtttattctccctctccattctttactaacccaatttcacaaccctccaaatgctctaacccaagcacaccacctcaccagcagaaaacatggcagcaaaacagagcaggcaggacggagtccccatgcttccgtcgacaagattttcaaactgttaaacaacgtatttttataaaaaaaacctttatatacagaatctattttataatatcaaataaattatttttattatttaaatttaggataattaaaactcaactaatcacgtaagattggatttcttgttacatgcctaaacctaatattaaaacaagttaaaaaacgagccgaaactgagaaaaacaggatgtgacaataaaaaatttgccactcacatcatgtggctataatatgtgggtccagtgataaattcttatggagctggagctcagccaaatagtttcagctccatcaaaactgagagcggagttgggtggagctctctcacaaaatgaactagagttatgaagctgagtttaggcagcttcacaactccactccagatccaactcctgaagctgaatttagaagttggagctgtaccaaacaggcccttaatagtatagtccactactagctccaaatcatctatagccaatgtaataaccaattcatacaatagttacttactatactattaatactaggtctcacctgtcatacacatattacgtcttggagtccgtgttacagctggctgcaaatctgtagtccgctgctcttctctcttttcctttatctttttaaaatatatttatagctggcttatagtctgctattgtacctactctaattaccacttgtaagagtgacaaatactagttaattattccgggaaaaacaatcaccactaatccactactataccaccagggcaaccaacaaccaaaacccaaccggccagacaaggcaggaggaggccaacgagccaacccgccccacacgtcgtcgactcggcatcgcgacctcaccccgtcgcctactccattccaattccattcaccccccctctcaaagcttcgaawttttcccttcccaaaaatcatcaccaccaccaccatcaccaccttcctcctcctcctcctctttcttcttgttcgcgcgtagctgcacmasgcgtcccccgcgattcgccccacgctgcgcctcgcacggaacctcctctctctctgctcgccgcgcattgccgccgccgccgccgccgccgcaaccagattccatccgtgcgctgcgctgcgctgcgcgcgctttttgttwyggtycttkccttcccgsgccgsgcccaaattaagtttttggaaggaagaaggaggaggagagacgacgacgagtcgccccgggcgccgcatggatcagggtctccggtgcttcagccacsgccgccgccgccgcctcgagctgcgcttcttggggttctgggaccgtgcgccgccgccgccgccttggtgggatctccgaggcggtttctctaggatttctccctctctctctctcccttccttcctcttcttagctgcgagttcacttgcagctcccagcttgttgcgcagctgtgcgtgcgtgcgtgcggtttcctttgggtaggtgggtgtgggtgagagtggagttgggtggcaggaggggctcgcaatttattgcgaggtgtctcctcctggcccaaaggaggggggatttcttttctccctgaatctgagctgttcttgctcggaggaagaacagcccagtgccagtttgaggactgattaatcagctgctgatttcgttgggttcttgttttgctcccaacaaattcaataatcttggagcgatttgaggtctcagtggtggtggtggccaaaggccctgtttctgttcctgttgccctctttgtcctcctgggttgtggagagctgctcactgatttggctgtcagttttggggca

SEQ ID NO: 6106 - DNA, 2000 bp, Oryza sativa
atctaataaattcgggaaaaattaaacacaaacaatggaaaaggtgaataggtcttttcgtttaagattaccgaacagcaagacacaacactagtagattgcaaggacattaggtccttaattaatgaaaaagttaggatctgaaaagtaaaatctctatagcatgtcgaggtttttcatgacctacaccgaaaagccattgattaaggcatggcagaaatctaaaatgtagtaacatgaaaacacgtgattaatttgagtttgaacctttagaaattttagagactaataattggttaactgctgctttgtgaaaaaaaaagtcttgaagaacctttcttgaagagtaatcttggacaggatttcatccttgattccttctgcttgaggcttgagctatatataatgtttggtgatttagcatgaatcttagtgaataaattatcccccctcataaaaaaaaacttgtgtgcatgtatccataaattctttcagtcctataaatgtatccataaattctttcactcctataaagaaatagtctatcctgtaggagtacatgtacaacatagagtcgaatcaaatgttcagaagagctaacagttgtacaccgtatcaccattcaaccaagcaagagtgatatcattatacttctattcatatatacttaggtccgttcttttctgattaacatgcatattttatctcgatgtataatttaaatgaaaactttttatataaaagttgttttaaaaatatcaaataaatttatttttttattttaaaataatcaaaactcaactaattatgcattaatgatttttttgttttatatactcgtccttaatcttcatctaacatgaacttgaatggcgttaataagtactagtacttaattggagtatacaactcaattcatgtagaaaaaaatgaagtagtaatttttttaagatggaggtagtatttcaaggtggatatatgctttctcgtggcaacctactgtacatgtttgagtaaaagagacacggacatataataatgtctgccaataaaatgaaaaaaaaagaaaaatgttacttaaataccacagatgcagaaattcctatgtgaataaccaggaatattgtttgacaagagaagaggcagatgttttttatccatataagtagtataggagtatacaaagacccattttttttattaatcctttaatcaaatactaaaaaactaaaaaatattttttttcccagcaatggcaggagcaaagatcacacaggagaggagaggcagaaactgtcaaaagaagacagattccaccactgccaagtgccagcgcagtcctcctcctcctcctctacactgctttccttccttcaaaaagtggaaaggaagagggaaaaaaaaagccttcaaaagaaagggrgaaaaacacacacaaagagaagaggaggaagaagagaagagagagagagagagagagagagagagagagagcaacggaaaagctacccaagggagaagcgagcgagagagcgaagcagcctcctcctcctcctctctctctccttcctccgattcacacacactcctcgccgtcttgtttcttcttcgtctgggtggttgatccatccatccagagattgcctgtgcgaggaagggagcgggcgagtggcggatttgtttttggtttgtttttgagtttgtttttattggtggtatcctctcctcctcctgtgcgaggagcagctggtggattgttcgttccagctccgtttcttgtcttgatttggaatccgggaaatttttccgcctcccgtttcttgatttccggtccccccccttccttggtggaagtgggaaggggagggggaaggattttttggtggggaattcgagggggcgaggtgatgaactcttgcctctttgaccagccttgattttcctggtgattttgcttggaatttctcggattttgtggggggttctttgatccgggctcc

SEQ ID NO: 6107 - DNA, 2000 bp, Oryza sativa
tcagaaattctattcccgactccaatggtaaagagaaacgctttcctttagtaattattatcatgcaagaaacacttgtctgttatgagagaagggaaccattactttgtatacttaaatactctctccccattttatgggaaggaatcatatcataatttatcactgttctagacacaagtagtttaagacaaaacatatttggcatttgagttttgcatgcacctcatatttagcaaaatgtatatgaattgaaaaatgggaactcaggtgttcccccatttatgcaattagtataaaataatatgttattgtttttatggcattgcatagtcaagtgtagtcttcaaggctccaattgcacaataaatttaagttattaactagcatgtttttttaatatgacctgtgttaatctgttattgactagcacatatccttcagagatggaaaggcattacaacaaattatcaattttttgtagcttggtatgaactgttagaaattcccaagccaataaagtaagcttcaaatgtaatgggacgaataattacttggctgagggataccaaaaaaaaaaggaacatcaatgtcaggacaaaaaggaaacaacaccataagtagaatggatatggtaaacaggctttggaaaagtgagtgaatgcatttaaggtgcaaagataagcaaaccattatatcttgcagttgcatatgtgtatagtgttagcaatcttataaggtgtttgaagaaaataaaggtataccttctctgcttgagaggccctcttctgggaagatagtctgccaccgtgtctactgtaagaatgccagctatggaggccttactgagaccgtgtttttcttggaagtcagcatctcttaaatctccacattcaatgctgatacttctactaagcgaattactgttaacggcgacaaggcaagttctcatgcagccaggtggaaccgaaaaaccggataggagggcaatgtaacgatcaatacgtagaacaaggtccagtggaaaagtgtaatctggaaagaacgagctgcaatgagtatcagctacttcccagcaatcctctagccgcgcatctcgaaccaggatgtctgggctcaaagatggcaacaattcaaccgccgggctggcacagcaaactcctgaaaacaaagtagacattctcatgggcacatgccaaccatgtgaaataaacccagataaatttacagttagctcatacaagaccaacatataaaacactgaatgtttagtgtagtaagttcaaattatcgcgatatattcattttgaggtagcatggtaccctttctaatgacaacactctaagccaaatgccccagttggagcaaggtattcaccaaatactaattcagtcgatttgctaaacgacactcccatcctttggggagaaccaaaccgattgcgtgctgtcaattaatcttccccggataatccaatactacccaattgtaaagaggattacgattataacctcaattacttatcaatgccaagaaaattggagcggtagataagacctgcagcgggtttggtggcgaaggacgggcagcggtggtgccggacggcgactgcggcggatcggcggacggggtagagaggagaagcggaggcggacgacgtcggagagcgagccaagcttatcgccggcggcatcatggcctccctccccccgcctcggctcctccgctccttcgctgtctctctcctccgatttttaatctactactgtttgcccccacactttccgccttccaaactcgtttacgtaaaataaaattacgccttattagggtgtagcccacggcccacctttccgtcttcgaaaagagtttacgtaaaattaaagtgcgccttgtgaactgtgcagcaactaacaaggcagtggattccggaggcgagcgagagagggagagaggaggggtgggagcgggggcggcgcggcggcggcggtggatggcg

SEQ ID NO: 6108 - DNA, 2000 bp, Oryza sativa
cgcgcgttcgggtgaagccccgcaccgtgggaatccatctcaatctggaaagctttctttgcaacacttctcatttctagtgcgcacgttattccttatttttccgtgcacatgttttttaaattttgaaataatatattttttttaaaaaatatttcttaaaaagatatattaaatttaccttaaatatatcttttactaatatttaattaattatggattagtgatcatttcgttttacgtacaaaatatccgtctcatctataaagaacacagtctttttcactttcatttcttttcttttctttcgccttgctgagttgctatcgcccattagtagtactagtactatgtcccacacgagcatgacatgatttgccgccactcaactgatatttttgtcatggttactggttgattctcttccaactgtatagtacttctgatgccttaaataacgcggtagcttaacaaagaagattaaaacaattcttctgcaataccaaaccaaacaagatgaggtatagtaactagtcatactaaaagccaaaccagattaggtatagtagttcgttacactaaaatacaattaaaattgacaacctcataaatatgcatggaatatcattaagtagccatcaatccatgtgttgcacgagtttgtaactttatatcatcactagagaattatccagtctttttttttctttttttgggatgtttgcacggagtacaagcaaaatttgatgatttaacactctattcgttgccactcgagacgatgactgaatatgttagttgttgtacatattggttacatcatgcaagtctttaatttgaaattaaaataaaaagttaaaactaaattgagagcataggatgtatagacttcgtattcataattctaacattaaaattattaaaataataaaatacaattaataagtccatagtttttataaattgcattattattgacacacaaactttaaactactatttacggtaggtcatatcaacctgatgtatgaacatttttctggtgaatgtaagagttaattagggcagatacaaagacaattaataaacagacttttaagttgctgacatataagagaaatgaaaaaaaaagagagaaatatacttgttaaatgtgacaatggtcgtcgactctaggcgtttatagaggaaaactttagtatatatggatagagaaaaaaaaagaaagacatgtggtagaaaaaaaattgtgcattaattagtatagtcatttgtcctctcaaatgttgtaagagaatagcattttaatggaagtctatatcaggccatacctcagaaggtatccgttttagtacaagtatgatccaccaaattaatgattatatctttttaattaatgtgagagtattctccaaatgttcaattacacagatatatagactttctattctccagtcaataccaactcgccccgaatcgattcattttcaaaatatatagacaatgtagcaaacaacgtttataccgtattactcccttcttttcattcatattatttattatttagttgtttgactttttttcatagttaaaccttttaaagtataattaaatttatataaaaatatagtagtattttcaacacaaaacaaacaaattatcaaaatatattcaatgttagattcaataaaactattttaatatgttagtaatatttttctataaacttgatcaatcaaaacaaagtttgaatgaaaaaaagttaaacggcttaaaatatgaaacggaaggactagcacttaggaagtacttatctttttttagaaggctggaccagatttcagctatctgggccaattttactcaaccaggcccaaggcccatctcaatatccagtcgacgagtcagcagcagagacgcagagtgtcagcgcgtgcgtggactcatcgagaggagcaaagcaaagcgagcagctgagccccgacgaggtagggggagag

SEQ ID NO: 6109 - DNA, 2000 bp, Oryza sativa
tcaatctacagtattaactttacatgacctgaacatgtactaccgccgactgctgctttcactattgggccctgaccgatcttctgggttacagcgccaaacatgtcgtgtcatcctccggaccacatacacaaacctagcagatacaatagtagactataagccagctgcaaacatattttaaagaataaatgaggagagagaaaaatagggggctacagatttgtagccagctatagtgcagacttcaaaacgcagtgtgtatgacatgtgagattagatattaatagtatagtatataacaattgtatgaatgaactgttatattggctatagataatttaaagccagtagttagctatattattaaacttgctctcaaatattgccgcttaattacttttctactcctacctaatccctccgtccaaaaaaaaaagacaaaccctgggttttcgtgtccaacgtttgatcgtccgtcttatttaaaaaaattatgaaaaaaattaaaaagacaagtcacgcataaagtattaatcatattttatcatttaacaacaatgaaaatactaattataaaacaattataagatggacagtcaaacgttggacacgaaaattcagggtttgtcttttttttttcggagggaggaccagtgaaccatccatccagcttgtgggcatagaaacccaggccaatcgagaatagagcttgaccgcgacatggctgggttttagtgcctcgccgcggccggcgacgctgtcgaccacgctgtaactttgagagtttcagacaccgcgaatgatgagctaaacttgatttgccacggcgatgagtcactcgacttgctgtgaacatgtgaggacggtttagagcagctacaatagcaggctataagttagctataaatatattttaagaagataaataaggagagagaagagcagcgggctacatatttgtagccagctgcagcacgaattttaagacgcagtgtatgtatgacaggtgcgatcatgtattaataatgtagtactctctccgtcctaaaataaatgcagttttacactattcatgtccaacgtttgaccgttcgtcttatttagaaattttatatgattggtatttttattgttagtggatgataaaatatgaataatagtttatgtgtgactaattttttaaaatattttcatattttttttaaataagacggacggtcaaacgttggacacggattcctacggctgcacttattttggtacggaggtaatactccctccgtactagtaaaggaagtcgtttaggacagcgacacggtctccaaaacataactttgacttcttatttctataaaaatatttattaaaaagtgatgtatgtatacttttatgaaaggatttttcaagacaaatctattcatataatttttacattttcaaactcaacaacttgagagttattcatgatttatattcttaaggtttgacttaaacattgtcctaaacgacttcttttatgagtaaggaaagagtatataactattgtatgaataagctagtagattgattatagataaattagagctaatagttgactatactattaaacttcttattacgtgccgtgttcacctgcccaatgacgaactatcacccacccggccggccacggaccccatggtcccatggccgtggggtcgctttctccggttgcatgcggtcacggtgtctgcactcccacgtaaccacgtgcatccacacacgtatcgacgtaccgtacgccttctctctccaccgagagcgcttcgatcctttttcccgttcgtgcgacacgaggcgagacgagaacttgggcgaattgagtgtggtgggcgcgggcgctccgtgctcgtggtagtagtataaattaaggcagcgcagagagtagcgagagcagtgctcgagctaaacgagtgagagaacgagtagtacgtgctgtagtgggtggatcggtcgag

SEQ ID NO: 6110 - DNA, 2000 bp, Oryza sativa
cgatatactccttaaatataaatatgcttactagttataatccagattcctaaatgaaatatgcgcacatatcgtgattagaaaatactataaaattctcatgagaaccaaacaaaacatgaatatacatgaataactcgtttgacatttttcctggtcaaattttgttaagtttgaaaaagtttaaagaaaaatttattaacttttaaaatatcaaatcaattttattaaatatagcattgaatatattttgataatatatttgttttatgttaaaaatactactatatttttctataagcttggtcaaacttaaagaaatctaactagggaaaaatcaaatgacttataatatgaaacgatgggagtaaatataaccgactaagtcactgtttgtttcagcttaagactattgtaatctagattatagaactagattacttaagttggattataataaacctatatagaataagctgctagctgtttgtttctctgaattattatctgttagccacccaacaattaaaaaaagcacctttagagtggcttaccagattataataatctagcttatgattataataatctatcataataagctatctgtttatttcagcttactcctaataatccatattataataatcctaagctgaatcaaacagggcctaaaacttacaacctactccctccgtttcagcttataagacgttttgattttggtcaaagttaaattatatcaagtttgactaagtttatagaaaaatatatatagtaatatttactaaattagttttatcaaatcaataattgaatatattttcataataaatttgtcttgggttgaaaatgtatacttttttcaacaaacttgatcaaaattaaagcagtttgactttgactaaactcaaaacgtcttataacctaaaacgaggggagtagcgtatttagattcagatacatttcattacaaggaattatttgagactttagaatgggctcatgagcgagcacatttggtatggaattatctaacattcatatctctcatccacctcatcatgtgaggattatagatacactggttttgtatattaaggaactcggcgtcaagtgagggaccaatagtgaacttaatccaaaaaatctaggctcgtttgaggctctaggcccaaggcccaaggccaaaggcccagctccttatggcccaaggccccagcagctgatgacccagcaatccttttccgacgagaatacgagatcgatcgatagatcgtcgtctccatcgattccgattcccccttccgcttttctaccaccaccgctgctgctgctgctgctaaccccgccgccgaagcaatccccccgcggcggcctccccgactccgattccggcggcctcctcctcctcttcctccgccgaccccgagtccctcccggcctccgattccgtacgccgccgctcccgcccccgtcctggtaagctacacggcttccgcccaatcgcccgcgcccctacctgcttccctttacttataagcgacgccacgtccctagccctagccctagccctagcctccgccgcttcttcgctcgctcgctcgctcgagtcgccgctgcaggggacgttcgcgcgctcggctccagcgcacgggaatcgtgctgctgggctgagctatccgacgcgtggttggtgtctattcttcttgtttagttactcggttctagttctattactactatatgcgctctagggtttaagacgattagcgatacggacccaaatattagatctgcatatgattaatttataatgccgttatatgaattattattagccatagaaggccatcttagcttttgagtgagccttcctttttagaggagtaatgttagtttttttataataataaaaatatgattttgcccttgaaggttgtgtgctgtggcatgggagataagcctgaagctcttttcactcgccgttttcttaaatg

SEQ ID NO: 6111 - DNA, 2000 bp, Oryza sativa
aatgagtttctaaattcaaatttgaattgataaaaaaagaaaaaatcaaataaaatcttataaatagtataatatttatagaacctattaggatataaatttctgaaaaaattgatgtattccgtatatttactgaaatttatagtaggacagaaaagaataacaaattaaaaaggaaaaaaatcagtttacctctttttatagttaccgattgaaattccgatgatttcgctcagaatttcgccaaagccgaccggttttcacgaggttattagtaaactcaagtaatttgtatacaaattttggtttatgaaatttgttcggaatctatcggctttccactggatttcacgaaaaccatcattccgctagagcccgaaacgaaaggccatcttagaatatcatcgccgccacccatgttgtgtacttgtccacgccatcactaccatcagccattgccactgcgcaacgcaacgtactttgtgctacgtggcgactggagagtttggagagtgagccgcttataaaaagcatgggattgtgtcaggttgggtggaggacttggactcgcacttgaactcatgctgatggtagctgatggcctcatccttgatggcttggcttggcgatacggagaggaagacataggagggagagaagagagatgttgaattggaccactggaggtagaataggcccgagagaaacaattcgtaaagataaatggtccaaagtgaaaaggtatgttgttgctagtctaactttacaaccatggtaaaaatatgtggtacaacgtacaagttactatggatagatatatagatacacatactctcttcgtctttaaatactattcatcttcaaacttaattaggttcacccatatttttgaagaatatattttaaaagttaaaggtataccatattaatctttgcatcctgaatgaaattctaaaatatgcaaacaatcaaaacctaatcatttaaaatttttgatgatcaaaatttaaaattacgatactagtcgaggggcaataacatggtagtaatatgtgtagttatgtaagaattgaacgtaatatcacatgaaatgtctactgattcatgttacaaatctctattggttttaaagaaatcgggtagtaataaagaggattaattacctgctaattttctataccaaatttaattataaagtcaatgagtctataaagtcaatgatacacatgtgcacggcttgacccgtttgcatcattatcatcctttttcactgtaatactgctccaagaagaaacgtgagtacatcttaaccatacgccgccacctcacgtaccccaggtatgcccctactccgtgctcccgcatgctcggcacgacgacctcaacgaccgaacccatcgctttccgcggccacacccacccctcatcaccaagcgcaccaacatcgtcacagtcatccagctgatgtagcacgcacaacgagtcccgatcctcaccgccaccacgacggtaggtgcaccgcagcgtcctcgttggcgggggcgggccgtcggggttctctggcgcgtagtcgctgttgttccggcagaatatcgtcgccgccacccacgccgcgtagtcttccatgcccccaccctcgccgtcagccatcactgccgtcaccgccgtgttgcaggtacaacgtataatagtgccgtactttaggctacgcccacgtggcgagtgagccgctgcttataaagagcggggtcgcgtggtcgcgtggagtggagttgctactcgactcggactcgtgctgacgtggtggagtcgcgtgcggggggaagagaccgcgagagacacgggaagggggcaaaaaaaacctttaaaaaaaggggaaaaaaaggccgaggcgaccgggccgcggcccgamtccggcgargtcgtcgaccaaggccgccgagattcgtcgggatttctcgccaaaaatagcaaaggcggcggcggcggcggcggcgggg

SEQ ID NO: 6112 - DNA, 2000 bp, Oryza sativa
gttttgggattaagcgaattttaatttctctttgctctctagttcgtcactttaccataatatcccatccggatctgatacctcactagtatcaactgatatttgttgatataagatttgatattttattgatatttgttgatataagatatgatatttgttgatataagatctgatactatatcgatagcaactgatgtacctattgataaccaatcaataccaggttgatatcctctcttccccctcgatatcttatctggtgacgatgacttgcacctcaacgacgcctctctcctctttggcgaaggcggcatgctccccgtcggcgtggaacccttctccggtaaagacccctcccttcccccacccctctctctctggagacgagctccctaatgacacgacgagctccctaatgacacaacaagctggagaagtgccaaatcaccttgccgtgcaacatgattcggtggcacagcaaggcgatttggcacttctccaacgagctccccctttgcaacaacgcttgtcatgcaactaggcaatgcatcgaggtggacatgtctcttcttcggtgatgtgctccccgacatagcggcgaggcaaggcggaggaggccttctccaaccaacttgccactgctaggccttggtacaccgtcttactttcacatctctcttcaccaacatcgattgtgttggtcccccttcactcttgatggcgaactataggtgcgacatgctcttcctccttgcacgacggttctccccaacaataagcaacaagctagagtttgatggcttttatcagtgcttgtaagaagacaattttgtctggtacatttatgaattatgtgccgaagcgaggaaggactccaaaagagggagagtgccatcggtggttggaggaactgtatcgggaaggggggctcctgatccctagcagcggcggcagcaaccagcttcttgctcaagcgacgagaaaaggtaaggagagaacgatgcgagatttgataaacagaagggcgatcgatccattatgtattcaaggggcacaagcacaatggtatttttttggcttgctaatctttgtagaaaataataaaagaaattaaagttgggttaatccgttcaaagtggtaatcatcttatcatagtctatttatctatttattagagtgcaaatcgttgatttacatcttctaccaaatgaggcactgaatagcaatggatctatcaagattggttagggccggccggctgttccgttttcaacatttagcaatcctacctgactctgatttgggtccacctagggtgctatagggctactcatatctcgcccaatttagcacgaactaatcagctaccttgatttgggcacgttgggttgggccgaattggcctagacaacgttccccttacctggctcggcacagactcatctggtcaggtactcaggtcgtccacatatgctcctctcccagaaacattcccccgaaacagtagtgtagctagccaggacaagctgcaacaacaacaacaacaccaccactcacgcggtcgatttcgagttggcaacgcacgcacggaagggccgagacggtgaaacgccacgggttttacacgccaaatctaccccgtttttttcgcccgtctccccgtcaggtttccgcccgtgacgagcagcagcagcagctagtagcacaccgagcgcacaagcgtacgtatacgtgcgtacacggactgacgaacacatgggaacaagcggttaatccaaggtccaaacacacgctctggcccactacgcctcggcccatccaccccaacccccatatccgtccccctgccaccggccaccgccacggccacggccacgccgcatctccccctccccctccaccaccaccccaccccgtgtccagctttgtgctttcccctcctcctcctcccccatctccactgatctcctcacctctccggatccggcattccgcc

SEQ ID NO: 6113 - DNA, 2000 bp, Oryza sativa
aaggacagttaagcgaatcatttggattgttccttgtgtgttcaaaagctgatctcttttttttctctctctgtaaatgcaggtaattttcttcctcttcttctctctctcactgatcttttttttttcatgagtgtcagcagcagtggccaccaaaatgtccattcttttgctgcttgcggcacatgtcacacacagcaagcaaacaacacggcagcatcgcaggcttgcagtgatcttttgccaaagttactttcttccattgcccaagatgcagctgcagtgcagtggagggcaccttttttaatcctacccccaaaggtagaataatacgtaccaatgtgctaatataccagcttaatacaagtacacttttgatcaggcttcagaggcgtcactaacaagccatgtctaagtaattcttgtaagtaaatgcatggaggtttattaatctatggttattttttttgtcattttttctttttcctataccgactttgaatttttcttcttcttaatacaaagtttggccggcaaaaccggcccggcgaattttttttcgcgatttatatgaaaacgaacacgcacacacactatatgtagattacgtctccttacacctacttaaagagatggagacctgtgattatggcttgttggggggagtttctaactgcagcagcttctcctagaattagaaattctcctaaacagttcagcttttggtctagattctaagaaactgtagttgtagaatctagaaaataaaatagaagccataagttgggaaatctaacttttccagattctcagaagctggctaccaaccatctgcttctcataatcttacactccccaaacaggcccttaattagcataagaagattgctttgcttttttttccagaggaacaaaattggttacataggcgaaaggccctgcagcctagaggttataagagcctcagtagcacctgaggtcctgggtttgactccttatgggagcaaattttccaagatttaacggtgttgctttcggtggtaggcgacgtacccgtcgacagcgaggcccaatcttcgaatatgctcataggggtagggtttgcgtgcgtgtgtttataagggtgagtgcaaatgcgttgtgagtgtttgcgttgtactgtgtaattctaaataaagtaattacataaaagcagagttcacaatctcaacgaattccgagcggctggaattttcgaaattaatcgagattgtagaaatggttcaaaatgtgttgatggggctcaaaattcgctaactaatcgagattgtaaccctgcctaggagaagtagtatgatgactacttgtttggtttagttcatgggccacacgtatattttcctgggctgatttggtggctgatgcatgggcccaccttgaacctaaaacaggccgtagtgacacacagatggaccgaaactaaatgggccgagccaacaatcaaggcccgcccatccgtctcctcacactctggcacaccttcttccttttcttcacttgcggtttctttctttctttttaaaccaaccaagcagagagcaaagcgaaagggtgaaataaaaataaaaaaaaggaaaaaaaataccaataaatcgcggatttcccaacgccgccgctcctctcgcggattccccaaccctaaaccgccggcggtttctgcggcggcggcggcggcggcgcgtcgagtcggcggagtctccggtcagcttcccttccgcgattctcccgcagccgcgccgcgtggtttgacccctgtctctggtttcccccatcgcattgacgaggttacggtttcgcaggatcggatcgggttcgtcgctgatcgaggagagatcgcgtcgccgtcgtctcgggggtaatccgtcgggtccttgttcttcctggcacggattattttggaggggattcgcgtgatttgtgctgtgttttgttctgcgtgttgttggcaggagaggagcagg

SEQ ID NO: 6114 - DNA, 2000 bp, Oryza sativa
gtgaatggcagctgcgtgtgttgcagcacaactagcaactaaacaggttaggtgaataacaagattagcggcaagttagttaggagcatgcaggattagtggagcacgttgtggcgtggctcgcggtcagcccggaggagcgaatcttggcgtaagatgcgcagatcgttgtatgagtgagtggctcgtagtcgtgcgtgcgacccggccgggctgttagctatgtgcatgtacgggaggctatataagccgtgtaatcatcagttagttttagcagatcagcaatatcagagaagccagcaaagacgtgcgtcgccgacggaatctgttgtgtgtgtgtccacccaatttgctgctcgtgtgtgttctcccgtgagtttgttgcttacgtgagtttgtgattttcttgggccaaagctaacagagcccacgacagcgcctggggcgagggacgacagcacgcggaaggcctcctgtagcccgttgacctcgcgcctcctggtcatcgacgccgcccaaggcaccatgcccactggatttgtgcgtgacgaggccaagggaggcaaatctggtggcgtcgcgccccttcgccgcccggcggcacatgtcccgtgctccttcaccgctaggagtgcttcgagcaagaataggggtggaggagtgctcgcgacaagaagtctacgaaaaggcaccgacaccggcgagaggtggcaagaagtgctgtaacgcatgtctttcaggctctcatcactcacctctcgtctcgctagcaatgtcacaccaaatcctcaacacctcagcacacattcaccaccgcgccctgcatcggcgacttgccagtcacggccaagccttccaggatgttagcagggaaaatcaccattggcctcttcggcgacgaggtccccgccggtgcgtcccggctcctgtcgcttggtgtcggctagttaagatagtgtggggctacatgcaagcaggacggtgtggtgtcacacccggccatcccggcgctgaccgaccggctagcggcgaagatggacgccgcacgcgcgcgcaatgcgatggggacaggagtggcgtccacccaactcccacggcatatggtgacggccggcgaggcagcggcggctgaacaactgagcttctagcttccgtcgaggaagaagcgaccgaacgggagagggagagagagaggaggaagagagaagcgaggaaaaagaaaaaaaaacaaataagtgccacgtaggacatgtggggttattgttttttcttttcactgacatgcgggtcccctaagtgccacataggatgaaaccgctatcaaacagccgagggactcaatctgctctggttttcaaagatggaggagacgttatacccggtattgcgattgagggaggttatttaatcaggggcaagagttgagggaggcaatttatacttattccttacaaggcagggtccgacatttccagcccaaaagaatcggacccatttattcggcccaatctggcccatgctcggggcctagtttttccaggtaaagttgaccaaaagtcttcacctagtcgtcgtcttccctcggccggcctgaccatgaaaataaacgctacccaacgactccgcagtcacctcaccacacgtcgatggacacggcgcaccagtgaaccccctcggccccaccaaccaccaccaccatcaacatcctaccttacctctctctggcaaccgggtcccacctaaggtccacgctacacccggtccaccaacacccgtgggccccaccgctctctcgtcgtcgcaccgaccccaaccgaagcggtaacaaagccaacgtcccaccaccaccacacgcgcgcgctcgcacagacacacacacagcacagcggagaaagagagagagagagagagaaaggaaaaatcggcaccaccgcgaaagggggaaaaggggggaaggaagcgaggcgaggctagggtttcgattcgatcccgccgctgcc

SEQ ID NO: 6115 - DNA, 2000 bp, Oryza sativa
taccactaatattgtattgtactacactctgttttcctcaatctgatcagaaatwaagtggatttgtttacgaggatatcttctttccaaagttgtatgactgcacttgtactgttgttcaacctctttatgtcctcatttcagatacacagaagacatggagcttgatgatgccatccatactgccattttgactctgaaagaagggtatgtcttgtaggtgcttctgtttctatttccggaacatccttactgagttactgactgattcgggggttgcagatatgagggtcaaatctcagccaacaatattgaaattggagttattcgatctgaccgtgaattcaagtatgtcatacagacttgatcaagctgttttttactgccacgtatatgcaatgcaacttctgtcttgtgaacatgccataacaagttactgacaagttactttctgtacaaaatgcagagttctaaccccggcagagatcaaggatttcttggaagaggtggagtaaattgtctgttgacatttgatagtttactgttctaagtgacactcttgagccgtagtcatgaggcttcttgtctcttaccatttgtcacttaaacctattgtaaactgatttgcttcagtgatatgcatgagatgaagtggtggacctacttttgaatccccatcgtaaacaagatattgttgggtgaatgttgtatttggttctcttctaaggaggtatttggcgcatatattgtgtctcctcccgacatatcatttgccctgacagtacttgtgaaacagtcaaaacagatcacgaaggaatatcttggttgagtttgcatccgtaaaacatgtgcatgtctgcgttactgcgtagatgcaaaataatatgagctgttaaaacatatacaggaaatagctcaggccccatcgtagtttcctctgtacagcatttcaaatttcaaattttaaaatttgattttaaagtttttcatagaggtttatttttttacattagcatttatgccactaagaacacgtatccataaattattattattttgttaatatgtcgtattatctgaatttagctaaacgatgggtagaatttctttaacgtgtactctagtatttctttaaaaaattcggtgtaagggtataaaggctgatgtgtgagtgtgcatgtatacatgtgcaaacttctcccctggcccctactccctccgtcccaaaaaaaaggcaaactgtgggtttccgtgccaacgtttgaccgtccgtcttatttgaaaaaattataaaaaaaattaaaaagataagtcacgcataaagcattaatcatgttttatcatctaacaacaatgaaaatactaattataaaaatttttcatataagatagacagttaaacgttggcacggaaacccacggtttatcttttttttgggatggagggaatatactataagcaaatggttatcactccactgaaaaaatacagataaaaatctcctgtaaagtatggaaaatatacagagttaaaatctcctatatgctaataattataaagtatacaaaattaaaagaaattgttagtcaagaaacatacgtaggtggaggatcgaaagagcagccggtactcgggtcgtccactcgtcctcttccaatcagtcgcggctgccgccgccgccgccgtcgccgtcgcattcaccttttacaatccggtccccccaccaaaaacactcctcgcggatggggttgtgctccccgtccactcctcgtcagctcctctccaccgtcgctctcttcgccttcggcgcaggcctcctcgcctacggcgtccacctctcctacgcccacgtcgagccccagcgggcgcgcacgctcgcccgcgaccagttcgtccgcgattacctcaaaaggaagtacgacaagtagcacacggcctccccccttacccccaacgagatccccttcccgctcaatttcttgggaggggttggggarcg

SEQ ID NO: 6116 - DNA, 2000 bp, Oryza sativa
ctcccgccgtctgccccgccgctctctccatctcgctcgccgtcgagtgaggagacgagtaactgacacgtgtgcccaaaatttctttttatttttatttaggtttgttttttactgccacgtaagcgccacgtcgatgtcacatgggatgaagaccagataaacccgccacgtaagtgccacgtgggaaaaaccgcctccgaaaccatcgagggagtcgatttgcaacggtttttgaagttaagggacaagttatatccggttttgcggttgaggggtgtgattcacccagacgcatgagtggagggaggtgaagtagacttattcctttccgctttttaatctctgtatctatctgggcctaattcttcaaatcttcatgatgatgggccaaaaatctatataggcccttcttttcggggccttttctccgtttcttttggacatccataattatcctgacgtacaaaatggtcctgtgttgactgacgattgggctagcaagagtcagtcacagtagcgtgtaacccgttacagaggtaactgttcaggactggtcatcggctcttttaaggtgatggtgccacctacagcaatgtatggtggttgatttattggtactcaaatctagtttctcttggacattgattccgcgaaccaaattcagtccacgttcgcacaatcgcactatagttaattactccctccattctaaaatataaccactctaacctaaacgctaagaaatactccctccatctatttttgatagacatatttccaaatctgaaaaaattatttttgataggcatagtttaatccaacaacatatcatcttaatgaccttctcggatttaatgcatgactcttcattcttacacacaagattggctacatagacattgagaaatgtaaatattaatgaatcgcttgtttacgaggaatgactagtagcatatttaaatggatgataaatataattacttatctttggtctgtgtgccaagatgaaatatgactatcaaaagtagatggagggagtaattattatcaccttatagtttgaattatcttaataaatactccatccgtcccacaatataagggattttgaatttctgtttgcaacgtttgaccactcgtcttatttaatttttttttgcaaatataaaaaatgaaaagttgtgcttaaagtactgtagataataaagtaaatcacaaataaaataaataataatttaaaaaaatttaaattargacgagtggtttaaacgttgtaaaacagaaactcaaaatcccttgatattatgggacagagggagtagaatacatgcaccytacaattatagatcttgatggtccaaggatttgaataataatattttagtgaaaaatatgtgctaggtaatgacatgcatgcatgtccgtcttatattattaaataacttaaaaaatagttactccctccggtttcattttaattgacgttttgaacaatgacacggtctacaaaatatacctttgaccttattttttattataatatacacaataaataaatgcatgtttacttttattatagtgttttgaaagacaaatatatatatgttgttatagtttctttaaactaaatatttttgaagttattgatggtcaaagttattaaagtttgacctcaaatttgtccaaaacgtcaattattatagaaccggaggagtatacgttattaaataactttaaaaaatattatggaatggaggaagcaacattgattacgagatgctttctaatggaaaattatgtaagagctgagttacaatcgtgaaacccatctaacacgttacacctagtcttccgtcacaagagctatccttggtttttctgatccactgcatgcgctagttttgcagctgctctcctttatatattcgtgtcatttagataccataccacatcctgctactcataatccatcttgttaagtgcttgtgttcagatca

SEQ ID NO: 6117 - DNA, 853 bp, Oryza sativa
  misc_feature (1)...(853): n = A,T,C or G
tgtaaaaaaaaaaaaaaaattttrkkgkscccccttttttttttttttaacaaaaaaaaaaaaawttttttggggcmaaamaaaaattttcmyctcattwtaawmtttttttttyctcanccyctctttattttttntntattttttttttmcamwttgtgkksaaaawawtttkkgactctctckwnwtwaaattcctaaktattttttawaaaamactscctaattwwakgkgggsntttttttccamattcatttttgtcaaaaaatatmtctngsgcttatanwaaaaattwkctmnttttataagatttttaaawawaatttttgkrgatwtscyttaawstkthwayarcckgtrwawcttgkcaawamtggtghaaattttakkkgkkvaawmntksnrarrgttkwkwtratyttttwwrgccyttttggggttttccccccsskttaaagggttntwagggcccmcngggattwtangggttaaagggraaaaaargggggktggyctawacannraaaggkgggagncggaaaaagcaggggggctcaagtaaagcatctccggcttcggctccgaccagttcgatgagtccgacgacgacgagagcaagaaaatgatgcgattcttcaactggttctacttcttcgtcagcctcgtcgcgctgctcacaatcaccgtgctagtgtacgtgcaggacaatgtcggccgccagtgggggtacgacatctgcgccgtgggcatccttgccggcctcgtcgtgttcctctcggggaccaggaagtacaggttcaagaagctggtctggagaccgctcacccaggtggccgccgtcaccgccgccgc

SEQ ID NO: 6118 - DNA, 1480 bp, Oryza sativa
gcgtgttcattgttctacgacacatgaaacagacatatagtatatgtcctgtccctccatacacatataagtatattgccataaggttcatatcaccaatattttagtctagttgttatatatatatactgtattttttatgtgatcaaacatcacaatgcacctgaatgaaaatgttatctcgattatatacattttgaggtctcgtttgatttagattattgaatgaattagttacttgattatatggataaattattttttaaaaaaaaatcatatgactcggtttttttaatagaaaaacatcatggcaggttctgttggggttaacaaggttagggggtgtaaagacgccttggtcataccagaccagaaggcgcccacgcgggagcacaactcaacgataacagatcaactatagcatggacaaagaacagagaaactagctaacctatatacttcactgataagttgagcaaaacaacatcccgaaactagctagatcaccctgctcctgtcctggaagatctcagggttgccaccacagtttgcaatttgactgtcaaggctttcagctcagacgttttgttatgctgaaacaaaggctgtgtttagttcgtgtaccaaaatttattttaagtatatggacacatatttaaagtattaaacgtagactaataacmaaataaattacagattccgcctataaactgtgagacgaatctattaagcctaattaacccsgtcattagtaaatgtttactgtagcaccacattgtgaaatcatggcgtaattaggctcaaaagattcgtctcgcgatttacagtcggactgtgcaattggtttttttcggtccacatttgatgctccatacatgtgtctaaatatttgatgtgatggaaaagttgaaagtttgaagaaaaaagttagaatctaaacacggccagagatttgcaccgcatcargcaagaaaaagttgacttggaaaattaccttgtgtgtgcgtccatctctatattagtaacaaacaaactactaagacttcgtttgacaatacactttctcaacttctactatcttattttccgcatgtatgtttctcaaaatttaaacattatatttttctaaaaagaattatataagaaagtggctttaaaaattatattaatttatttttaaaatttttaactaatataattaatcatcgtacgggagtagagtctaaaagttgggaatggacctggacacgatagtgaaacggaaaaaggggaaaatgtagggagtggggagggaaagtgcaagaagaagagtttccaaggaagaaaggagtagcgagtgggattccgaaaatgcccccgtcctttcttatagcccaagccatcctcatctccttccttgctgcgtttcgtttcttccccaaaaaccaagggggaaggcaaactttccccaaatctcaaccccaatcccaatctagggcac

SEQ ID NO: 6119 - DNA, 2000 bp, Oryza sativa
ccaagccgccgctgcaacctaccaccctcgcctcttgcctcgccgccgctcgagcgaggtgccggcaaagccagcgtctcgccaggacggcggcggggttcgcagctctcgctcctccggttttcgacgcgggcagacctaagggcggaggttggcggcaccgtttcctgcagcgggcggaggccatggcagctcgtggcgttgggcggaggaggcgtcgccggcggggcagagggagtggcgcacgggagagggagcagcggcggttggtagagatggtggcggtggaagtgccgccagatccacgcctggatctggcggggaggcgaccggcggtggggcctgctggtggcggcggctacggcgacgcccggtggagcaaaggtgggcgaggtccgactccgtaacggccggatccggctggacgacgacagacggcggtgggtgcatccttagatscscggccggcgtcggggccarcgggcaacggaggcagcggctggcggcgatggtgcgacggcttgaaggccggcggcggcgtcgtcggggcggttgctggctgcttagtggcggatggcgacggcacagcggtggtctgtggaggcggtggctgccgtcggtggcagcggcgacgacgaccgtgactatggaggcagtggtgacgtcggcggtggggaaggagtcgggtgcgaggtgaggatggcgacggcgaggtggctgggcgttcggcagcagcggctgcggtggtggtgatcgtgactgcggtcaccggaggcatgacggcctcagacggctagccgagggcgtgggagacgactgcatctggctggcgcggcatcgtttggtggaggggttggagaccggcttggcgcagagaggcgcagccgatggcagcggaggccggctcggcgcgagagacgcgggcggcggagatggaggccggctgggcgcgagaggcgcggccgatggagggaggccggattggcgcgagaggcgcgtccggtggaggaggccggcttggcgcgagaggcgcggccggcagtggaggagacgacctaggtgtgtggaggagctgccggtggktgtggcgcggtctttggcgcacaaagattggccggcaagggacgccggtgcagggtcccacatgtcggcagagcttgtgtggaggtggagcattagtgcgttagccgtggatttgcaggtggtgagcagcaggtgaaaacctagtccggccttggtcggaccgacaacgatggttcattccccctcctgagggcgttgtcgtgctgtatcacccctcaagggtgattgccgggcgaaagcccattcttggctcttttgagccccgacggacggcggtggcggtttttcgtcgcttctcttcttgaagacgtcgttttggcatcccctagggggcgatctcgtctgtgtccttttgttggtttaagtggcggtcggtcacgcttagcggcggccggtccggtgttagtcttctcctgggtttgtgtgttggcgatgtcgatgtgtggatgatggtattttttttcctttttcctagttacgaccatccagggttgtaatcttataatttttttcctgctctattaatagaactcgcaccgtctcgtgcgaggcgttaaaaaaaaacatggtcagcatatgcagtttgaagcatgctaaaaggttgctactatatacaggtgaggtcagtcgttgataaatgaaaacaaagagcagtttctttggttattcttggatggtcatcctccaattgctccaggcctgtcgttaatatatacctgaataacagcaacaaactcaagctctaaaattggcctgactaattatgcaagcaagcatgcaagcagctggtcgatctcacgtactagtatttaagcgcatcatgtgaagcacaatgtttcggaaatctaatcccccgcagctactaattactactaaccgttaaaagtagccgccggttaatattcgatcgatcgatc

SEQ ID NO: 6120 - DNA, 2000 bp, Oryza sativa
gatcctgaattttgggcgcatttccatgttcaaggccatcacaatgtgaaactgtgaacggtatagtggattagggcatccacaatggttatctataagctctctacaagagattcatgtcagcatattttcctacttggaagagattaaatggagagagagagcaaaactatctactaaatggagatagtctatagagaaaaacgaggcaatggattacagagctatagatacccatgtagacataccattgaagtggtttactattaatctagtctattgctgaggtgtacatattttataaatagcaccttactttaccattgcgggtgctcttacggaggaacgagagagacagagagcgaggcaataagtacattctacctttgcttttgatttatattagggccgagtttcgttctaaagtttttcttcaaacttccaatttttccatcacatcaaaacttttctacacacacaaacttccgacttttctgtcacaccgtttcaatttcaatcaaactttcaattttagcgtgaactaaacataccctagacaaaaaaagraaaaagttgtaaaagcatttcgctacattttgttttggcactagccagggaaggaataaaagcagagctaaaaatttaaattacagctgtaactgatcatactctctttataaaaaaaagttaaacttatttcattttatgttttttttttctaaataagtccaaggtttaaatgaaaagatacatcaggtagtttaccaaaacccgaataatcattttaatacttattagttgcttatatgtatacactctttggactcattacatatagaatgagtaactttctattgatcttgataacaaaagtaatggttctaacatttttatagagggagtacttacttgaaaactcagacaacataaagggccgaattatattggcacatgcaaaacatagaaaacaccaaggcactactcgtataatacaatttctaggacaacagtgggggtccactggagggaatattggatgtggagatttgtcaaggagatttatgctaaaacaagtagtactagccaacataaccatagtttaggaccaggtctttgtctgatggtgtattaataatccatcaggtttttgacttttgagtgtaaacttacttgagaaagctggatgagactgctaaagtgaactcctcttccagattttaagtttttgcttgcactgtttgaccattcgtcttatttaaaaaatttgtacaaatataaaacataaaaattatgcttaaagtactttggataataaagtaagtaaaaaaaataaataataattctaaaattttttaaataagacgaggggtcaaacagtacaaacaaaaaaaactcaaaatcccttatattatgggacgtaaggagtaccaacataccaattgccaagttcgctgacctttcacgaacatggtttgaaattttggataattccaaatttccggtaattttggtcccatcggtaagcacaaatctccccgaattttgttttgtcaaatatttgtaaatttagttaaaatgtattcaaattcagtctaaatatgttaaattaaaaaatcagccaaaaataccgaaatttcacaaatttcgtttctttcagccaccaccgtaaaaactcatgtttcgaaatttcaaacccccggtcacgaaccattttgtataaaaaaaagtgaaaagacccaaaggaaatacttctacataattactgtctttgttgaggggtaaactacaaaaataacccgacagatagtctgttcccgcatcaagttccaagcctaaagcaagccataagtgacataaatgaagtgaaccacccaaccttcttgctcgccaccgacgcgcgcacgatggcatcgccggcggcggagacctcgccgccgtccaccccctccaccgcatcttgccccaccccgcggccggatgcggcggcwrcggcgccgagc

SEQ ID NO: 6121 - DNA, 2000 bp, Oryza sativa
caaaccaggactttaggccgttccgtaatatacaaggaaacgtaacacccaagtcatgatctgttacatattacatagatataagttatcccctatgactagtcggataaccatgccgtatgggtatggggtacccataatatccacagactggtaatcaacgttgatgggaccgctttaccggccgatagccattgttgtcatgttgcaccacaagaaaacaaatgacaaattaaaccctttgttttagagtcgttgtgcttgtgcagttcaatctcactgtgcttatcctgacaatatagttttgttttttacgataaattctcttctactttattaaagtattccatttaattaacatcttaaactatttttcggtttatttttttgtcatttttagtttagttacttaaaaaggttcacttttttctataatagaatagtatttaatttggttttgtttccttgtatataagtactttttaactaagtgagaattttgatgcattgcaacttgtgcctcaacttttttttctctggatttcgtattcagtttctgcatactaaactttcatgaaagatatatcttggaactattgtatagcacaggttatattctcattaatggctctacaaaatgaccaaaaatattttagaatgctaagtgaagcaaggaatagttgaagggagtaaaaatatgtttccctattttttaatttagggtgtgtttgagaaaagagaaatgagaagattaaacaactttcttatagaaatgtaaaaaaaaaacacacatgtttagtactcggatgtttagttcgtgaagcatccgagtgaaagatggatttcttctccctttatcctcctaacgaacgcatccacactactgtataatcatctgaattagtctttttttaattttctcctttcatctgaacagcatgataacaataattaatggagataccgtagttatatatatggaaatttaggaaataatttagcagtgatcgactgcatgaataaatactctgaaacgacatacttatatctgcaagttgcggaaaataattaaattaagctagctactctggataagtcctgcacgaaattcattcagcagaacagtcaataccgtttgtttcctcaattcttatactagtgtgaaaccatgccgctgaaagaccaggatggttgcataaggaagtcctggccatattgaaagaagagcaatgcattatgcatatatgtctgaaataatgaaaaagataggttgaaaacagtaagttgattgttagtgcatatttatatatatattcaggatttttaaactaattaatgaaaaaaaaatgaggagtaccaaagaagatattctcctatgcatatccatccccttgggttcctacctagtacggccggacaggcaacattgtaacatgcatcaagtacattgcatcacacccccaataaagcatccacatcaccatccagcaacttgcatgaaacaaaaaaaattaattaataaaaaaatctactagcacctcccaaccacctgtaatatggtgctttgatagggaccaaaataacaaacaaaaaaaagaattccaaaaagacatggtcgatcacttttcataaaaaaaagcacagatatactaccattaaattattgtaattaactaggctcaagatagatagacgtcgtctctactactcctactagaaaacatatctttgtccaagcaaattaacaaaatcaaatatagcaagaacacgtttaattttgtacacatgctgcgtttgggttggtccaaataaaatacaaagaccagtgtctatatatacagagcacacgcccacagcaactatcactcttcatcatcatcttctttggcttctccctcttcactgccctaattacaacccatttgctaatctctctcctctctctctctctctcgctgcagccatagcttagctagagctagagctttcttggtgccgag

SEQ ID NO: 6122 - DNA, 2000 bp, Oryza sativa
atcctttattgctctatctttttcccttggaataacaaacagcccaattaaaatctgggatgaaactatggctagctgttcgcggtgtcagttctcgggacgctaccgttgttttgtttgaaccggaatgttcagggcggttcacaccatagacttggagccaagtggttccatccacaaaattttctcatcttgaatattctgttatctgcctcgacagacgcaccatatcctgtgttcaggaatgaatgtgctacagccaacgtgctgcatgaaatttgctgaaatcgtgctaaaatgtgcatggcaacaggaacctgatgccctggtcctgtggaactgccacgggaaagtattttttatagctaggtgcaatcgtatctaggtgtatacatgtcacctacatagctactccctttatcttaaaatataataatttttaactctcagtatttgtcctaaaatataacaaattctccatcaacattatcttcccaaccaatcacaacccttcatcattaattttttccccctacctccactactcatctaatcacaaccctccaacactcacttctatctactttcttaataactgtgttcaaccctaaaacttcttatattttaggacggagggagtatgtaaatatttcataaaaaaaatgttaagatagataaagaagatataaaccactatgcaaacatgcacatcaaaatttaatttacagtaaagaaacagaaataacatattctatttgtgctggagatgtactgttcacaatattgtttttttattttttatttatctgattatatatctgtttcagccttgcatggttgtgtatgtttgtgtatagacttatgccattgtgattgatgctaccaattattttcaaactatttttttatagaggaattttatagttcttgagaaaataccttgaagtatctaaattttacactaaaattgktggtaccttgaggtataaagtacctagaggtaccaaattttactagaaaattgtggcacctttaggtaccttctcaaaaatagtacaattatgggccgttttggatttagtgccaaaacgtgctctacaaatattttgatagtttgaacagtgcataagacgggtttggtttgaagccaaatcattggcattgccaatgtccaatttgatattttctatattatgctaaaagcttggttctaaattggcctccaaccaaatacaactctactctaccaaaaaatttgtagtgccaaaacttgcctaggttttgtcactaccaacattttggtaagtattaaaccaaacaagccctacatttttttatgtacatttaagttgtatgtaaatgatgggtgcggttgcacctaggtgaaaaaaaatacatattcgccacaactcgcaacatgtaccaattcagcagcaagtgtaagagagaagatttctctcgttttacacgcgcaccgttcaattcctgaactactaaacggtatgattttttgcaaaaattttctataggaaagttacttaaaaattatattaatctatttttaaaatttaaaatagttaatactcaattaattatacgttaatggctcagctcgttttgcgtacattctcaatcgattcttttcctctgctctcaaatgctctgtgtgcgatcaggtattcatgttcagctcgcacaagcacaagcaagacagatggaattcctactgacctgcgccttttgagtgctccaactctcaaagtctcaaggccattaaattgcctatgggctcaccagccaataacaaactccggctgttatccatccaatccagtgtcccaaagcaacattcaagcccagccaggcctccaaaagttgcaagttgagcatggcaaaatccccggcaattctcgactataaatacctgaccagacacacccaggagcttcatcaatcatccatctccgaagtgtgtctgcagcatgcaggtgctgaacacc

SEQ ID NO: 6123 - DNA, 2000 bp, Oryza sativa
agttcacatgaaaaaattatgaattatttttaaatataaagtctttagaccattctatttaacctagatgatattcaaatccaagtttagggaccggggtgacacaactgaacaagttggaggagctaaacgagtgatctgcaagtttagggaacgggatgacacagtcgaacaagtttgagtacctaaacggtcgatttgcgagtttagagaccagatgacacagcgatataagtttagggaccggtgatgaactttcctcttccatttatacacgtcgattccttccgtttgctcttcagtcgatcaacggaagaggaaaaaaaaatctgatagcctcatcggctagcctaataagtcaaaaccaaaatttaaatttaaatttttcaatgtatattacgctactaactaatatataaaagttttatatataaagtaatttttattttctattaaggaatatgggtaagacactggcaaacattccctttcccgatttccaatctcccatccacgtcacgacatcaccacttcaccaggtgtcccatgtcaattcctcgagctacttcttccgtccaaaaaaaaaataaatcttgagtttccgtatctaacgtttaattgtccgtcttatatgaaattatttataattagtattttcattgttgttagatgataaaacatgattaatactttatgcgtgacttgtttttttaattttttttaaataagatggatggtcaacattggacacggaaatccaggtttgtcggacggagggagtagctagtactactagtacgcggctgcggtggcaggcacaggcagacaccaatccatcgcactgttcaccacgaagattttcacgcacagaatgacagaaagtacaggacacggagatatttgggatcgctgtggccggaatgcttcatttggttggcatgagctgagagcaggaacaatagcatgctataaaacagctacaaacatattttaagaagataaataagaagagagaagagtagcgggctatatatttatagccagctgtagcacggactccaagacatagtatgtgtatgacaggtggtgggaccagatattaatagtgtagtatataactattgtatgaataaattattagattagctatagattaattgaagctaatagttggctatactattaaacttgctctgatgcgcccacacggggccacggcgcgcggcggagtgaagtgcaacgaggaaacatgagggcgtgggcggcatatgggagatcgtgggacggcgacggcagtgccccgccggcggcaacacgtggaccctcgcgcgcttgggacttgcacggcagaactcgaccggagcatggcgagattgtactactacctttctcactacacgccattccgctcgcgtccaattgttcccgagacgtatctttgcacgacgggacagtggaaaggtctgagagtggacacgcttaaccggaaaagcgtgcataaattaaccaagtgtgacacgtgagccatgaacttacgatcgaaaaaactagacttgtactttctccgtctcataatataggaatatgttacatctcttaaatcatagtaggacagagggagtgtaagttaaatcataataggacagagggagtataaaacttacgtgaaatatgcgctctgcggtgtgacatgtgtgctgatcgaatttgcaccgcgccaggttactcaggtcggtgaagtttcgggccgtgtacagagccacatttttaccgtcacgatgggcaaaccacctggccgaggtggcacgcgctgacacgggcgacccacgccgcggggccacgcttcgttacgcccgctcatataacggggaccatgacgagcggagccaaggctcactcgccgcccgcgtcgtccccggctcgcgtctgtccactggtcaacaactcgcgattcgcacggccgcgcgcgcgcgcgcgcaccgcgcgttccgcattcgtac

SEQ ID NO: 6124 - DNA, 877 bp, Oryza sativa
gctgaccaasgaacmtaggccgtgttcttggmaatactattcmaacttcaawaactcatttgtcacacgcacatttctcaaactatcaaacgtaatttgtttctatgaagttttataaaaatatkgttttaaaaatcatattaatatgtatatatatatatatataagtttttaaattgawacttaattaatcgtgtcaataggttgtttggttttgcgtgttacgaggaaaggcttccaaccttaaccaaataacataaccctaaagataaagaccacaagtcttcattcgcttccagaaccttcttgcatctaatctgcgatgtgcagttgaaccttccaaaattcatcctgtaattaagttgaaccttcttgcatctaatttgcgattttttctattttgcaaagatgctattcgaatgacagttttagtgatatttttgtaatttttcagtggcagttttacaataacgatttaaagcagtggtaaatttataattgccccttacaagaattatagtattcactattcccatacagtactagaccatagagatgatggttttcttaatttaaaccgactccaagcctctccactcctccagaaccttccaaaatataaaaaccataaccaaccgactgacatgtgggcccgacgactcgtcaagtcgtccatctcccaactcccccgctggttcgagcccctggtagaacgttcgagaacccccatctcccccttatatatcgcccccttcttccccatctttctccaatcgaatcgcacacgccacgcgagctccctctcctaaagccctaaccctagcctccaagtcgtcgtcctccggaagcttccggcctccgccgccgccgcagcgcc

SEQ ID NO: 6125 - DNA, 2000 bp, Oryza sativa
ctttcatagttaggactgtctctctctctctctctctctctctctcttttaatgagaagtgtatatggtgctagtagctactggacaaatagagttacataatactactagggtgtaaaaaagagcttgaggctcacggcagcttgagctccaaacaagccagaatacatataaatttttatttaattaattagtggatgaaatatgtcatttatatgtatccacatgataaattaacatgtgtgacatcatcctttgttttagcatgttattcktgttcttctcttgtgtcaatgagattatccagtttktgcaagagatgtccttatccktgttcttgtgtcacactgattacaacttacaaggccagctcaataatcamgctcgagccgaacacgcgtgaaagctcagaggttacgcatgctccgtttgagattgctcgagtttttgttgagctcgagccaacagtgaagctcgcttgagatcggcttgttcaaagtatataattaatattttcaaaaacccttttactaaggtactatacaatcycagttttaaatatagttacattttctatgaatataaacacaactacatttagcgacagaagaagaacgaagagatttgttaaaactggggcggagctagaataaaataaaggagggttccactcgtttgttttactctggtttgaatcaaatttagcttgatacggatgcctaaatttatactgatggggtgtatatatggtgaaaatagataaattataggtaaaaaaatttttaatgggttcctgggcaccccctagctgtactagctcgcccagtgagtctgttgcgtaatagtaataattgattaatggtgacacgagaaggaccgaattgcaattcaattctcctttaaacaaaaaaaaaaagagaaagaaaagaagaggcgaaaagaaaagaaaactcgtgaaaggaaaattttagtcgtcagtcgtcacctcgccggaagggtacaaacgaaaccgcgcgaragcgagacaggaaaaccgaggcataggcataggcatggccagccagccgcgtcgacgtatacgcggaaggaagcatcgtctcgtcaagctcccctccgcgcgcgcgagcgacgaccggtcagtccgtctccttccttccccactcttgcctccccattttggacttgtgctctccctcgcccctgctcctacgctgatgcagtcagtcatcactggtagtcgccgcacaacaaccgagtgatccatccatccatccatccatccatccatccatctatccttcctcctcctatatatgggcgagccaaccacgctgcctcccaatcaccaactgcccagctccattcctcacccaacaagctcacsgccttctccttcatcatcttcctctattcatcgccgccgccgagctcagccggtatgcactagtacagcagtagctcgttgctcccttcttctttcttcttcttcttcttcttcttcttcttcttcttcttcttcaactctctgcatcaaggttcaaattaggcctgccgtttttacttcctctcgataattgtttcaaggaaaacaaaatgttttcttgggataggccaccaatggtctaccgtctacctgttgactccccatgaataaaaatcggtttttatatatatattgatatctagtcagttcaaccaaatggttgctatctgccagtacaaatctgattctgagatggatttcgttccaacttccaaagcttatcttatttttggtccatgattttgcagagcagttgggaagggaacaacaagtagacgtcgtcttcgtcttcttcaaggagaagccgatgactctgcggccactcaacacagagagaagcttcctcctctcctccccgaagccacacagccccagggatgcctgctcgccgccggtgaggtcgccctcctccaccaggctcctcgcctgcaggaagctcccctcctcctccaagccc

SEQ ID NO: 6126 - DNA, 2000 bp, Oryza sativa
  misc_feature (1)...(2000): n = A,T,C or G
aataaaccctgccaccctagtggagggcggcaaactgacgtggcagacagcggctcgacggcggcatctgccgccatctgcgaatttttcatttwnccccttgcggcaaggggctaaatgcaattttcgnagccctaaaaagtatttggatggtaccttttgcatctgggccctagagggcggcaagggacccatwtgcaaaaagtactagccaaaaagtattaggcccgggttggctttttttttgcatgggagcccggcaagggttttcgtgcaaaaaaaaccctccctctcccgtctgccgtcaccgttcgtccctcccccgtttgccacgtcagcttgtcgccctagtggagggtggcagcgtctatttttgtaattttttgcgccgatggattatttctgtaaatattaattggaaaaaaatttaaaaatgaaaaaaattccgcaggcatctcggtgctccaaacttttttccttttccccaggggaaaagtgagcaaccgttcgatgttcgtttagccgcatcgaatggctcacttcgatgcaatcctcgcctccacggtaaagtattgcgctggcacggcggcggcaccgttccacggaatccacgggtctcgcacggcggcacgatctccattcccatctcctaagcttgttagcttgggacagtcacggccggtacaggccaagcatggtcttccactcgaagcatgcacgacggtgtgcccaaactaatcggtagcgtcgacaagaccatagatagtcagacaacgactccatcctttttactccaaagtccaaacggggccagacatgacccgtgcctgctctggtacaacgccaatctgaatctggcggcgatggccgtgagacctcgttgatcgatcggtagcagcgacacatgctcggggtcgtccgctcccagctttctcgcttatctccgggcactgccggccgctgcttgtatctcggccccagccatgcctgtctgcatgtgtgcatcggactcaatgattactgtggggttactgcctactcagagtagctttgaattgttcctgacccaagaaagagtttcagatccaagcctgcagatgcgtagatgcgctgcttcactgaaggctgcacggcgcagcacacagtgtacgcatatatactgttctgcctgctgtggttgaaggtggtggtgacctggtggatgctcctcgcgaaccagcccaagtgctcaacccatgtgcgcgccgagcggcccgacccctcgtgcagtcgtgtactgtgtttccaacggtggataaaaccggaagatccctctgaaaaaatatatactataatcgctagattcgtaagtactactaacagagagagattagcacgaggtcccgtaattttgctactatactactacctcatatcagcgaatgtttccatgctggcgtcgcccttctacaactgatgcgtacctccttggctaggatactagagagtagagacaaatgccgattcacaaaaggttctcaaacttgcagggaatcacatgagcattgagatccagtgcttcacgggcttaacatgtctgcagtaaagaaaagctcaatctagtaacaagaagctatactagtattccggcgctgccaaaagctaaaaaacacaagtactcggaatactcccaccacaccacgcagccacgctaagcacaaggactctaggagtagtcaaaccgtcaagtaattttccccaacgtaatgaccttccctaagttccctatgcgcaaatcccaaagcagttcaacgtaagcacggtcggtccaccgttgatgaccaaaaaatcaaacacatcaattcacacaaccggtgtggtgtgggcagcgtgacagtgtgtcccccccgcctcgccacctaaaaccccacaccacagagcgcagtgcacgactgcacggcccgcgccatagacagcacacgctccggggagctgaagcggagctgaggctgtctgtcggc

SEQ ID NO: 6127 - DNA, 2000 bp, Oryza sativa
tggtgatgttttatttgctgaatggcctattgatagattggcaatctgagtatctaaacccactccagtgactatgcagatataggtgttttcctattacaatctcattagtattagtgtttcctatatctctaaagaaattcatcctaaactgctgcaagtatctagtagggtctgccgatttggaatttcaaaatgagattgtgtcattccctgcataagcagtgtgaatcagaagcaatgatgttattctaatttcacgtagagagtaatcatgtcttctgctccctttatctcgtagagagtgcctgtcgatttggatttggaaatcctaagtttaccattctaatttcactcccatttatgttcatgccttctgctccctttctctggtccgctgattcgaaatttcaaaatgaggtcaggcatcctagataagcagtgtgaatcagaagcaatgatgctattgtaatttcactcccatttatgtcaggcttctccctttatctcatagagagtacctgccaatttggaaatcctaacgtttactaagttacctttttataaatgtgctccaatattaatgggctgagttctgtagtaagttttgcattattctcaaatcctgttttcttgccaaaagattaaacaatatggcaggctgtgatgccatgttgcaactagtacctaagatgatgcccgctttccattccttatgccattgcatgcgtcaaactaagcatctaacagagattaccaagaacctgattgagaccttaattggaaaaaaaaactgttattttccttcattcaatattctgatcagcagtctctgtcatcaagataagggagaaatatcaaacattccacaatcagattggatgctgtaaactgaagtatgcttatttcgaattcttaatacataactgatttctatttctagaaaccataatttctctgttggcgggatcctgataccgtgtcctctgtccgcactccgcaccctagtttcttgacttctttctggtacagtggtactaatgccatttttttggtggaacatggagcactatgatggaaagaaactactgtcagaattgggcaaaaacaaaatctagctaacatattagatgacatatccacgcaatatcaagaagatcagccaccaacaggcgatcatcatagtcctaaatattgtcgtgtttccactttacgccaactttgaagttagctaactcatcatctgaacatatatgtatttttatattaactattgtcctggcgttgtttactcacataaaagggtaaactataatatattgtcgtctagcgctttatttttctagtgtgctgttcgctattatttcctttatcttccgtaaaaaggtattcccttgtgcatatgcaaattttgaaaagcaaactgttagggaacaaaaatgtcttttggatctggatggggcttcttttacagactggtttaaacttaatccaatttattattaaaagtgtgttgtggactggaatgtggctggttggacacctgaagtgtgtgtttgtaacaagtgattttacagtccttgagtaggtactgataggtaccccattttatagtgtaaaatttggtacctcttgatacctccagtactagaaggtatgaaaatttgcactaaaaattttagtgcctcttgcctcttggtacctctcaagggctgtcaaatttctcatgtaacaaatctttttacctttaactcaatataaaatttggtgggctatcctttgccagctccttgtcttttcaagtgctatggacccattctaagtagtaggtcaaactgagtccacaccattaagactagggaaacatttgattgttaggaattatagttgcggtattaatgtattcaaatttagtcatgatttttgtcttggagatgcatggaaggaataataagcaaatgcagagatcctaacaggttttcatcctcttatacagtcac

SEQ ID NO: 6128 - DNA, 2000 bp, Oryza sativa
atgaaggatgacaggctgcttaccagtgccaactacggttcggtaaagagggttgtgcctgatgggccatggaggatgacttgaaggaggtgcacccgttacatgattacgttgagcccgggcgtggaagtcgaagagattgccggggccgaccacgccgtcatgtgctccaggccgagggagctctctgatcttcttgctaagataggtagcaagtatgactaattgattggttagaaattgggcaagaaaaaaaatgatgaataaatcctgtccagagctaatgcaggctctgcttggaacaattgagtttcatatgaattttgcaaatatttcatgctcttgtaagccatttgatgcctcataatataggacctgccaagagtgagtgatcccgagcatccgagagagcagcacatctagcttaggccatctccagtgtatgcaaatgaccgaacctagaagagatggactcagtccacgggagcctgcataacaagatagatggtatgctcgttcaaaccagagttagtaaagaaatcgcccatgagaaaaattaaggagaaaagaacgataaaaatgtggacccagcaccaaaccagcccgctgcgacaaaagaatcaatgttgcggttgctgtagcagtatcatgctctatgtttgtgaacaacgcatggagatgcccttggtcatctttcatcatacaaaggaaagccacaatccagcaaccaatcatgtccaagccacaagaggaacaattaattagcaagttacatattttcagtgttagatatgaactactcctccgtcccataataaattaattttatagtttgaaaattgtcccaaaataaactagcttctaccttcttacctatcattgatccgcaaatcgagaaattttatcccttcaataccccaaacctacccacccaccaatataactttattattaattatgggtattttggtcttaaatccaccttgggaagatagggttggagttattttgggatagagggagtaagtatgaagtaagagaaggggacaaagggagcattgcagcaaacagtacccatgcactttccaaaatctcctccagaaagcagtaaagcacacagtaccattttttcacaccccagctactgtttaggtcacctgtccaccccaggcatccaagccagctaccattagggtccccggtccaaccagactccacgcctccaccaacctcacaaacagatgggcgtatacacatcagaaaattactgtcatgatttgaattttgcaatcatttcctgtaccttgtccagattctagctctaggttgattaatcatccaaggaggaactatcctttcaaaattatccaagggaaccaccttgtccaccattacttccaaattgggatttatcacacatcacagtagggtgatctaactgaacttggatagattcttaattagcatacagaagcagcagtagtcaagaggggtagagagctggggcagcgtgtggctgagtgacagattgagagggagctcagggaaccagtctcacaaaatgaaaggtagaaccagcacaatgaattagatggaatcatggaaaagagaagagatggttgaaaattgagggggaaattccagaaaaagatgaacatctacaaagtaaatttgaggctacctggagctcattatacatatataaacttgttgggtttagtcttagaacctgtaataagtacttaaccaaactagagcaattcatgatcactgtcaaatggatcatgatcaaagtccatacaatttagtgtatgaaggctgacagctagcacgtccaactcagtgaatagatcatcaacctaaatggtaactacagtgtttaggtaaatgctactaccatatatatatatttgataatggcaatcaatccgtagcaacttctgtataaatatatcagaaactcaaagagagacacactacaaccaagacacttacaggaa

SEQ ID NO: 6129 - DNA, 962 bp, Oryza sativa
tatatatatggctttaaaaaatttaaataaatactttttaaatttataattattaataattaattaattatatattaattatttttctcgttttacatgcgctgaaaatatctccaaaagaggagatcgaacggcagcaagttgtatccaaggttgtcagtatcccgattcgtatcccagtatcttacgatactacgatcctaccaagccgaaacgtacaatccctaggatactacaaaatattatttaaaataacatggtttgaaaataatgtaactaaatatgctcaaatttatatgaaaatcagttaaatatatcaaaaccaacatggtttctcttgataaatgtctctctatttgcatgacatatatcattactactttttttatatagaatggctatatatataattaatataaatgttaattaaacttaaaaaaagaaaatctcatagtatcccgatactacgatacgatattactttgagcaaaatgatacttcctatctcgatcctgagagacaaccttggttgtatccaccgccccccagcatcagcatggatggacaactgggcaaatatgccctccagtcaagaaacatcctattcctggagatctttttaccagcccccacccacacccggggtgggccccacctgtcagtcccccggcccacacctccccacagttttgaccgacattgtggaggcctttcccgttggacccaacccaacccaccgcaccgctgcatccgcatctccccacccatttggttccctttccaatttcacctcgcccaaccctatttatttatttatttaacccttcccccatctcgcctccattcttggagaccaagaagaagaaagaggaaaccacacccacctccatctccgcctccgccgccgccgccgccgaccaagtcgagggggagatccagcgagagcgaggaggaggaggagg

SEQ ID NO: 6130 - DNA, 1864 bp, Oryza sativa
tcgtcgagcacctagagtgcaatgaacagtgctagctctatttaaccctaatttaacccatattttatttttatatataactttcttgaatttaattagagttaattcttattccatcgcacttgaatttatttgatactaatatggtcgcgataatatttttatttattaccaacctcacctaatctttgttttaaattatattttaattatttattttgccagtttaatttttagggtttatacctaattaattattctttattcgcgatcaacaaactccgaaatcaaatccaaataaaataggcgaataaaaccgtcatgatgcaattcatttaaaaagtttttgagggtccgtaattttagagttctgattttgttggtcgaattttcagggtgttacagaagttggtgcttgcggcggtgcacggcgcctgcattggcggcggcggcgaggtcttggccgcctgcgccatccgagccgaaggagggggggatctatgtggggcccacggttggccagtgatttctggctggccaaatttggctagtggaggaggggttttggccagcaggatggcttagctatccagttggagaggctgttggagcacctttttaggctaaaatggctaaaatttggcttgaagagtggaatggagaggctgttaaagatgctctgaggctgttgaagatgctctaacttacagaagtagtacctccgtattgaaatataagtagtacagtatattttaagctataaatctgaacatataattatctaaattcataatatcttctcgtgatttgtatttatcttaatggttacgaaaaaggtttaaaaaagaaccacatatttttttctttcaaaattttgaagtatataaaatttatgttgggcttgtttggttctttaacctaccaatttattggtaatgccaaagtctaggtaaacttaggcactaccaaattattggtagagtaaaattatttagcaaacatttggattgctaccaatataaaaccaaattctcatagtacattgaagaaacttataaaatataataaataggaaagatgcactaccaaatatttggccacgatccaaactaacacaaaaactattacatttgccaataaattggtagggcatgtttgtttatcaaaccaaaacggcccattatctcagaggcttgaaagtatgcatgcaacccacaccttctaggcttccacatattttcggaagtggattctaaactcaaaaaatatatctacttattatttgcatggaatttaattgattgtaaaaaaaaatcaacataatagattaatacttttagaaacatagtacaaacgcacaaacgacgtcttgctatcgacaggtacatcgtctactactgaaataataattagcctaaacaattagtctaggacttagactcgggtgggctggttccaccacaagaacctaaccaattgaattatactcactttacaaatagatcattccacaaacatagaagttaaaaatccagttaccacaagttataaaagaaaacacgtaactagttaatgtatattcgtagttaaagttataaatgaagaagatgaaaatgtgacggcaatgatatgtttctaattttgtaaaaatttcagtgacacaattacgaataaacaaattataatgatatttatctgaaataacatacttgtaatggcatgaataaattaaccctgcccttaaaacattggttgttaggtatggcaagataaaagtgaaacactttttttgttttgaaagaatataaagtggttctcaaaaaaaaagtgaaagacagagaggtcggagaagggaaaagtggcg

SEQ ID NO: 6131 - DNA, 2000 bp, Oryza sativa
gacatgcaatatttaaaacatgcgcaatccacgagacacgaagcgatggagcaacttaaccgatgatgattaattgaatgatgaatattttagcttctttagtcttggkgccytttgtttaggggattaccaaactggatggaactctgctatacgtatgaccgagccatccgactcatgtccgactatgtcatatcaaccaatcactgagcttgtttcttatcatgtggacccaaacaagcagcatttatacctatatatacactagtcgaatgtaagttgwacatatgagtcggacgcatagcaatttccaactggatggagagagtatkgcacttttgcataacaatgcaattttagattagtggtgtgtagttttagataactgaaatctatcaaatcccaaactattaatattgtatcatttgaaaaatgtcaccattaatataaatatcaataaaaaatagattcatagttaaatagatttgtgaaaaaaatagtactccctccgtcccataatataagggattttgactttttacttgcactgtttgactattcgtcttattaaaaaatttaaaattattatttattttatttgtgacttactttattattcaaagtatttcaagcacaacttttctttttatatttgcacaattttttaataagacgagtggtcaaacagtacaagcaaaaagtaaaaaactcttgtattatgggatggagagagtactaatataagtaaaccgactctctggtttcccatcgtaattgatcgaaaactgacaacatgttagggttgtaaacgcaaagttgacagagcatgttagggcggggagatcacacgtgatgcatatagacggtttaattggaataataattgcaaaaaggtatcgtagaaagaaaataaaaaaggagaaacagatatacacacagtgcatgcaaaagagcatgattagcatcacatgccatacacgactattttagaattcccggatcaaaaccttatcgtcttatatatctcgccaccccgggcaagtgaaccaacaccccagatctaaccaccgataattgcgatatcttatcatgttacatcgcacggcgcacgaagcttcgtacccaagggcgatgcacgatgagagaaaaaaggaaaaaaaaaggcctgaaaacccgatcagcttggtcatatatatggccatgtgattcgcacacctaaagcaacggcgagaggataaaatagggagaaaaaggtcgcgaaaacagcgtcaaccctgctcgccggcgcaccgaccgaccagagccgaaaacttccaccaccacaccacagcgtcaaaaggcactccaaaatcccacccaaaaaaaccaatccccaaccccaaccccggtgcccgccacgccacgccgcgtttgcgcttgcaccgagtgcgcccgaaacccaccaaccaacccggcggcacagcaccgcagtttcacggttggtttcaccgtttcgtgcgtgtttttagcgtgatcctcccggacccggaggccggaagcgacaggacagacagggacgaggagctctcgctacaactactacaactgcaagagctcgttggttttttttaacccccaccgcgtccgcgaccccgaccgatttttgcagtggttcgctcgcgacgccaacacgaactcccgaaggcgaggcggctttgcacgcacgcacgcacgcacgcacgcgcggcctacctcctcggcgcgagttgctcagtcgcagggggggargtgggagcggggcsgggcsgggcgggcgtcccggtcggggattgcgctggttcgatccccccgcgcgtgtgggggtgtgggtgcgtgggatcgatctctccctctcgctcgctcgctcgctcgccctagcacctcgcgggcggggcgtcgcatgcggcggcgcggcgaggcgaggcaaatgcgggtggattcgtcgctggcggtggaggagaggtgagggggcggcggcggcg

SEQ ID NO: 6132 - DNA, 1503 bp, Oryza sativa
ccgccgcgcaggccgcctccgcgccgttccccgcgtcgccgcctccacgccgaccgcctgtacygtggtgaaggaaaaaaggaaggagaggaggggagttagagataaggaaagagataagaagttagagaggaaaaaaagagatagagggaggagtttgttgtgtggacgggaaaagaggatcggtactatggattatatagtgtgttttgatttttattcccggttagaaaaaccaaccgggactaaaaataggtttttagtccggttggtgttactaaccgggactaaagatcatagggccctgacacagcctgacatggaatcaaccgggactaaaaatgaactttagtcccggttggagttaccaaccgggagtaaagatgatttttagtcccggttggtaacaacaaccgggactaaagatctttctcttattaaccgggactaaaaaatcatttttagtcccggtttttaatggaaccgggactattgtggatatgggttgaccgaccaaaaatggtttctctaccagtgtacgtgtgcgtctgccaatgttatttttttaataactttttttaaaaaaaactagtcaaacaatacaaacttttcaactggaaagtggaaattccgctgaggcgctgactcactggataaatccttcaccccctcatgcttggaaaggggggagaggacaaatttgccaactgttgccacgcccccgtacacggccacgctgcagcttcatattgccgtccccgtcctcgtcgccgtcgcctccactccgcccagaaccaactcctgtccaggtccaggtccagcgacgccgccttcctctcccgtggcgtcgtcggcccggcgtcgccatcccacggccagtggcgccgccgcagccgacgtgtccaaatcgcgcagttcttcttcttccgccttcctattttactagtacctccttggaaactggaagctggagcgcatccgttcctcgaatccctccggctgcgcctccaatccgccgcctgctacgattccgtcgtcgtctccgttccgcggcaatccgaggtacgcgacgacgccatyaccaacctagccgagctttttttttyctttctttttttttctctgtgtgttttggggattcgcggcgcgggggagagaggggatttcccgagggtaggagacgatcgggacgacattcgcgaggattccgggtagctcggccggattgcggccgctgggggaggcggtggcgcggattcacgatcaggagcctctcgtgctccgcggcggtggcgtccatgcgcatttgcccgcggcgtgtgacacctgccaacgcttacgagttacgcgtcggtttcgcttagcgagagacgctgtgaacagaaggccagaaacaaagtgtgaggccagtaatagtatagcagcaaggagcctgtgaggaggtagcaatgcagcatatcatgatcaattattgatcatcatccctgccccaacgtacagggc

SEQ ID NO: 6133 - DNA, 2000 bp, Oryza sativa
tctagtcaatgtcaggactcaggaaggtctttagacggcctaatattgccatgtgtaatttgcagattggcctgaaatcaaatttcttcactcatgttcttatcttgtctcattaatttgaagacctatttatgttccacggcctcacactacaaargaaaaataatatggcagaactgttgcattctcttagtctttcagctaacagaatgaaagtggaattctaggcagcaaaattagtattgctaactcatagaactcttccaatgaccatatgctccccatcaatctgtttactgaacttctaagcatgaatcgggtatttgttatgctgcaatgaaaaaggacagacagtttgtgtttcctgagttacgttttttttttcttctgaatttgttatgcactcaactaatctgtttccatgtaactgctactttacggcctacgttctacagttaacctgatacacgcttcagcaataagcaatcttgttcaatgtcgacggtttctctgtacaatgattctggaacttggacgtatttgagtcctgagttgttgctgctactattctgtcttacttccatttggacttgcaggagatggacctaacatgaggacaagaacagcttgcccccctttgctgttattttaggagaggataagccatcaatcaatcaagatctttacaagcaatgattcaggcacaactgctggatgcatcatggacattagacgagtcgagaactgactaggtgagaccgtgagagctgagaagcaactcagatacgtttctttcttcccttatcttttgtttgcttcaaatataacttcagtgttactaaacaataagcaggacgaacttctgtatgaattcttttggctttctcctaaaagctgggccaatgaaaattaatcttttgtctaaaaagttaagcagaatgaatctgacaatgtagtaccacaacgtactaatgcatttgtcatatatgtagaaaagatgaatgtttaatttctcgattgtgttattcatgtcataatgtattcatgctcttggattgtgagacaacactagtgatactttaagacacttcttgctcttatggtggaaatcacgtgtctgattcttgattttgttaaagcactgtagtactaatacactacaactagaagcctagatcagtgtagcagcaatattattaatagatttcactgactaagggtctgtttaggagtttaatattctaagaagtagttagttgatagctagtttctatgaatctggtttctagtttatcttctgaaatctacaactacatatttttatattctagacgaaatgttaaattgcttgggcaaacttttgattctgaaaaaaaagttatagctatcttaaagtcagtatagacgttaacaggtgactgcttgaaactgggcagtcggcgagatctaacatggaatgttccagaacccagcagggagagatgccgatccaccggaacggcgaaggcatacacggctctcgccatccatccgatgtccccatccatatctcccccaaccaagagcagccgtccgttgcaacgccccctggcccactcactgacgcgccaggtttggccgtttgcaaccccgcggccccctcctttgggatttgtagccttttgctcctgtctccctgcgctcagggccccaccacctcggcaccctacaccgtccacacaaatcccgcacaaatcctccctctcgccgcagaaaatwaaaaagaaaaagatcgcgaaaatttcacgggaaagcacgggagcctttctttctccttcgatcgagcgtgcgcgcgtgtgtgtgtctgcggacagcacacagctgcgcatttcgatgcgagtttttggaaaccagaaaagaaaaagaagggaagggagtcagctctgaggagggagagggagagggagggaggaggaggggatcagggggagaggagggaggttttggcgctggcaatggag

SEQ ID NO: 6134 - DNA, 127 bp, Oryza sativa
aaaaartataaaattcacgcgagagctctcgatctagggatccctcgtgttgccgcagagtcgccgccttcgccgcacaaaaccctaggtctagcggcggagcccchtcctccaccccttcgctccc

SEQ ID NO: 6135 - DNA, 2000 bp, Oryza sativa
ccgtccgattttcgctgaaatgcgcggggaggtttcgtgccgcgggcggaagtttcgatcgcagcagccgcccggcgcgcgcgtcaccgtccgcaaccgccacccggaaagggcatcccagggccggggtgcacggaactgcttctgcgagctgagctggtagtagcgacatacacgtaagtacgttaccagatacagcccaggcacccgatggtcggtggcggcatccggcgcggcacgcatcggggcgagccgttgctactactatataagagcgggggagcacagcgcctctgcttccgtttcagtcactccccgatccatccaaattccaagacaagctcctcgtgctttcctgccttgccgctgcgtcgctctcgctctccacggcacgcgcacgcaacgcgcgacgcggtccggcgctagctgagctgtgactagccgagcaaacacccgcggctcgccaccccgacggttaccgccgcgcgccacccccmacccgcactgcataaaaacgccccacctccgccgaatcgccgatccgcgcgctgctaccaccacaaacattctaccgcgggacacacactcgtctttaccacacaacacgagcacgcgcgcgagagagaaagggggagataagagcagtttgacttcgagcttcaaccacagccgagtgatccatggckgcakgcggcagcaaccgggaactgggtcgccgccgcagccgtcgacccgcctcttcctcctcgtcctcgcagtcatcctcacaggtgagctctggtgcaatctgggaatcggattcctcattttcacatttcactcctccctgaactgcaagtctgaatttacatgttacagtatacagtttaccaatcaatttagcatctcggggtatttactgaggtgcgcctgaactgttgaataatagtatctattaaattacgacataagctgtcagcgtaggctcagaccgtgaaacttatattgctgacaggatatagaagaaatgatcaaactaaagaaactctaagcctgttgtgaaatggttttgaatataaaggaactctgagcttacagcatgtctgaactcagaatgaaggttaatgttactggttgaactagctgtacatacatatgatcctttgcatgaagctccctgaccgtttgagtttgaccttcgtagctaactggtgtctcagacaatctctgtgtctgtttaagcataaattatttgcacggaattattttttgttccattttccatttcttcacatcgcttattttttaatggaaattatgattgatactgcctttccattagttcagtgcatatttaattctgttctgacttctgaaagttcttttttttattaatggtaaatatatttatgtattttgcctcaataaggaatacttcattaggctatactgattattttcccaaaacaatatgggaccacctatacatttggcgacaaattttctcctaaaaatttgacagatgtaattgtaatacaatcgtagtgtaattacactgtaacttatatgtaattacactgtaacttgcatgtaactacagtgtaacttgtacgtaagtttcatgtaattttgaatcattatatctattacaagatttgttttgctggggaagaaaaaaaatcacggcacatacatatgtataagggatttgttcccacaacctccattttaccgaaataacatattacagagagatttttgaaagttacatacaagttacactatagttacagtgtaattacatgcaagttacagtgtaattacactacgactgtactgtaattacatctgtcaaatttttgggagaaaatttgtcgacaaatatatagcaaaatcgaacaatattgcaattcacattgcaagctattgtgaatggtggttattagatgtccttgctgatataatcttacctaaatttttaacgcatatccagtgagattacatggtcccccttgtgctcc

SEQ ID NO: 6136 - DNA, 2000 bp, Oryza sativa
ttatcttcaaggttactgctaactacctccatgttagccttcggctcaaatgatttcagttttcgaaatactcctaattaatgttgaaacggtgagaaaaaagaagtgaatgtctaatggtacagattaaggggctgtttggatgctatatataattttcattttcgaaacaaaactatactataaagttttaaacaataagctttggcacatgtgagctaatgcacattttctgtttcccactgtgtgttaaaagagtgtgaggtctagatatttgtaaattgtgaagaattgtcaactgaaatggatccagatattagaacatatgtgaccagttcctttcttcatgtccatgtcaccatgtgagttttattttgtcaaacctcaaaagcccaacttaagctcacgtgcgtgtgatttatactgtttgttagagagatcacccgtgaggggatcaagttagttgattccgtgttcaaccaaaattttcgctttgtaatcttatatttttttttcaggttacgatcctccggtattgtaatcttttaaatcctctggtattgtaatcttgtaattttttttctagttacgatcctctaggattgtaatttttttctgctctattaataaaacttcgttaaaaaaaattcgctttgttctgtttcttccttgtgattccgcgcgttatcttgcagaaaccaaaactgaacagttctccgcgcagccgtgtctggaattctcatgcaatggaatactagatcggaacaagcatgcaggcacgagacgcatttgaacagatcggagattaagctgcaagccaatgcatgtattgattaacggcaagatcatgcacattatcgcaggaaggagaggaagaatttacggtgctctaaagaccaaagaaaaggaaaattctgtctgatctactgatcaagactcgagggcgccgtgtccttcccttcctgatcctacgcgtggccccgcgccggcgccgccactacggcggccggcctccgggtggatgagcagcttgaacctgccgtcctccttgcacggctgcagcaactcctgcgacggcagccgcatctcccgcagcacgagccggccggcctcccggtgcgcccggaggctcagccacggccgcccgcccttgccgatcaccgatatcggcggcgggaacgccctcccgctcctcgtcctcctcagcaccatcacggcgtgctggttgtcgtcgtcgtcgtggcctacgccttcgctgctgctgctgaggaggacgtggtgcggcctcttgcacggcggggccagaaagtcgaccgcggcgacggcggcgccgacgtcctccatggcgggggaggcggcggtggcgtcgtcgtcgtcgtccggatcgaagctctcggccccaagtgcctccgtgaggaggtcgaggccgccggagtacgggaggaggtgcggcgggggccttgattgtgtggcggggcgcggcccgagccgctgctcctcgggggctttgtagcagtgcagcggtggtggcggtggtggtggcgccatggacaaacggacggacgggcktcgcgcgcgcggcggttcacgtggcggctagcagagcgcccgcacgcgggtgggcgcgagctatatatatctgcgatggcgagagacgagacggcgagatcgcgcggcgccgatcgatcgagagcgagtcagcgggggcggataggggagaacgaagcgtgcgcgatctgatcgaccgatctctctcgcgcgcgcgcgtgccgctcttgcactagagataagactacgtggcacgccaaaactgtcctgaattcgtggcaaacggaaaacggaaagaacgtcgcgcgcggacgcagccgccgcgccgagatgagaagaagctaggcaagctagaagcccctataaaatagtaccattcacctcactatatcattgatcatccgagtcctaactgggtctcactaagcgaggtaagtagtgtgttagtggaa

SEQ ID NO: 6137 - DNA, 2000 bp, Oryza sativa
gagcaagtttaatgctccgttatctcaatataaatgcatctaaaattgaatgtgatgttttatagtcttacgaatctaagcaactgctaatctagatttattgggctataaaatatcacattcaattttattacatttataaggaagtaataggcttcgagccaaatataaacacgtgaataaaagagaataaaaactatggagtgttggctttctttcaaaaacaggctctaaaaatactggagacaaatgtattaagagcaagtataatagaagtctgtaagaaggctaaatgttgagatggatgagagaagaaaggtgagagatgagaagcgagctgtaagcttacagccgatttagacacaagaatcaagaaaatttgagacagacatgtggaccatatatttatagtgaagagctaaccactatacgagtgagctgaagagatagactataaaaatctatacagtaagcagctggtaaatatctacttagcctcgctctaagtagttgtctgtcatgttaaacttgctctcatgtcgcggaaggtgaaggggaaggcgtcggtgtctgcaatgaaacgccgacgtgaacgagaacgaaaacgagacggggaatcgaatcgaagctaagaacgcgtgcgtgcctgcgtgccgacgtgtgtgggatcgcctcgtgtaggtgacaggcaacagcaacaaacgcatgcagtggtgcagaatgcggagtacattctcctgttgctttcggtgtcagtgtaggattttggaaagggaaggggaaggaggtgggggccttgtcaagtgataaataaatgattgcttaaaaaaaaggtaaatgctaacttagcctactattctcttcgttccatgttaaatttatttttcttattccgtttgttctaaaatagatttatttttaaataatcattgcatcagaatctataaaagtatatcaaaagtagataaattaagaaataattacattgagattagataaaagtggggtattctagtattctggtgtttgtattgatatatgtgagataggtaaaaaataaatttattttaggataaaggtagcagtactttggatatgaaatgctaattcgtgggatgaatttacattttgtgattttgtgaagcgtgcagtgaactttgctgaataattgcgctttgtcatggcatttgcatgagcttcaatttgcatttatttttcattgtttccgtcactttagaaattcccctctctgagacacccgtccacctacttttcagtgaaaatagtactaaagcacaaaacaaaatttataagcaatttttcttacaaacaccaagccattaattctttttacttttaaacggtacactaaagtcattttttaataactatcttatcatttttttaaaaaaaatactggtaaaaaaatcctattgttctatttcaggccgtggaatactacagcagaataatcctgatgacaatcggaattttcccaaatcccaaaatacgggcgcctaattttggcagaaattcatccatccaagctggtaacagccatgctctgacagtagctttcctacacggttcaggctaccatttccagactgcgacagttacccctcctcccaacggtattttaaaaaaaacgcgccaaaagacttgatcttcttcttacgcgcgctataagagcaagcctaactttagctttcttcctcgtctcccgggaaacgtggccatcctcactctcccctctcctcctcccgtcttctcctctctctcctcctcttctccacttcattccacctctcccgacgcctccgacctcgccgcggaaagcttctccatcgatcgatctctcctctctctcccgcgggggctctccggcgcacggtgccctctcgtgcctcggagaccccgatccgccgccgccgccgccgccgccgtgcctgagtagtacagtccttgttgtcgaggtgaggtgagtggtgggaggagaa

SEQ ID NO: 6138 - DNA, 2000 bp, Oryza sativa
tgttgagagcaattttattgtccttaagaaaataacttaagtacctaaatttacactattttttttacctcgacgtacttagtacatggtggtactaaattttatattaaaaaagtatggtaccttttggtattttcttaagatgttcttaagatggtaaaatttgaattgtactatgtaatgtctttagcttgtattactacaattttatccaattttttgttagttgtattttggtttgtaccttttctttttttagaactttgtaatttgtgcccaaagtaatcggaaactattcacctgaaatttatttttttcctcccaaagaaaatagagtttagatttgaaatttagtggtaatgtatttcatacctaaacctatatctagcaacttttcatgaatttacatcactgtctgatcagtttttcatgaatttagagcactttctgatctgtttttcatggtttttcacatatgtgatagttttcaccggatattcccctttcttaaggaccgttttggtttgatgttgtaacgaaatttgatagtgttaaaagatttaagtttagtttgatgtcaaaatcatgtgaaagtaaaatacataaacaaacattagcaaaattttgttattatagaaaatttggtttgttagcttactagaattttgtcattaccaaattttggggatagctaacaattccaaactagcccccaaaaccttttcctttaaatgttttttcatagggcattgttgggtatcttgttaactagaataatttggttgttggttgttagaacagcacatatccaccttaatgatgagaatgacacatttagatggaaccttcatcaaatgaaatggtgcattgtccagttctatcgtaatgtacttggcgtaaatttttaaagggcatgtgaaaaggcataaagtgtcgtggaaattaaaaaagtactttttatgtggtatttgcttaaaaggggtagtattggccaaagataatttagcaataaggaattgaaatcatagtacaaagtgtcatttttgtttgcatgaagaggttgttccaacatctattctgtgtcgctaaatttgtttgaagaaccaactttgtttcatgtgggtcgaaaacaccacatagttttctcaggtgtttgggaattggttggtgaagatgaactcaaaaaccaaaaaaatatattttgattggagcgtctatttaatattgggccctataacttagtaggaatgatatggtatttgacaagactccaattaaattttatatgcgggtattattcatagcaacgtactgcagattcagttctggggccaacttcaaagtagtgaataggacacggaggtcatatgctccgcatgctaaaatatagagtcaatcattatgtaattttttatcatctctggatgaatatttagcaatatatttgaattttgaataagttgcttattttctttggttggtgtctttgtgtcgtcttttcatctacctttgttttattctgtcgtacttgggcttggaggtaaaaactttattataagtgagctttagtggaagcaatggccaggtttaacatccattatcgaaataaaaaaaagcccaaaaaccatttgcagttagctttgccctcacaaatcacaactccctccctaccacccactccctctcccacattttcatgtccttctgcatgcatcctccacatcaggctaaccaccctcgacgtttctctccctcgattcacggcaacctctcggagcgtggtcgcagcaacggccgcggcgttggtggcaatggaacgcccaatctccatgcttcttcttgctgtcgaacaccagatcgcaggagacaagaatcaggtgaaatcttgctgcaaaccattggctttttgtgtgtcgattagattgcagaaatgtgcacgctgatcatctgaatttttcttggcgtttttttttgtcatcctgatccagtgagcatgcatc

SEQ ID NO: 6139 - DNA, 2000 bp, Oryza sativa
tatgtatagctaccaagaatattctgaatcgagtagggtttggccctgtttagtttcaaagttttttttttaacttccaactttccattacatcaaacctttcattcacacaacttttctataacatcgtaccaatttcaaccaaactttcaaacttcagtgtgaactaaacacagcctttatatggaacttcccggttttatacagttccatttgtgccactttcttctggtccacaaatgagaacaaacgaggttcccacttccacttgtactaatagttaatccaggatagaaaaaaaataatgagaagtgattaggacaataacattatctgcattctgcataagaaatgatagtctgcttctgcataaaaaataaccatacccatgtgcctgagccagggagattcgagacagatgtcgagcacatacccattggaggacgatccaacaattcatttttaaggaacacctgagtttgaaacaagttacaagcaagatactgctcggcacacgccataatgctcactggtgaaatcaaattaacaaaatccgtgtgaagttgtgaagccaaatgaggacatatcagtatatccctgtgactaatggtcactgtacgcgtcggtggcaaacctaacaccgcacagaacaaactggccatctctttccatccgaagaaccactacgctagctacgaaacaaccatatgcctctgacggattatatcacgaattatctacttaattatcatcatttttttaagaaacacgcctaataaataccttaaaaacaaactatcgtaggaatttccttttagaaaatgtatttagaaaactttgagcaaataaccattttgtgaataaattagaaagagcatggccaagcaagctgagcaccaagcaaatactcatttcatcctaaaatataagaacttagaatcagataaaatttatgtttagatagatttgtagttctagtacgagagtatcgagtaaagcaagcaaaagaacgggcaagacgcgttcggccgaacggcaacatcgtcggctcacacacgcatcgcacgcagacccagcaatacggcgcggtgagggagcacgacaccgatcgccactccaccagtgagcacctcacagccccatttttttttaaaaaaaaaaaaacaaaccagtgagcgtttgtgctgcgtcaggtcaggacgaagaacaaacagaaaacaaaccaatccactggggcacggccgcacagtgcatacagtgcagttgcagagtcgtaattagggcatccacaatgtagtctaaaactagttcataagcaataaaatattctatttagccatctaacaacattatggaactagtccatagcaagaaaatagcaaaagccacccataagcatatgagttgcccatatagaataaaatatgttatttctctctatttcctctctcctcttaatactagttgctatctatatacattgtgaagataacaatagttatagtccatatgtgtgggtcccatctatatggactacttttactgtatatattgttgttgccctatactagtgttggtacaatagcaagctataagccagctataaatatattttaaagagataaaggaaaagagagaagagcagcacggactccaaaacgtaatgtgtgtatgacacgtgcgaccagatattaatattatagtaagcaactattgtataaatagactattacaatggctatagatgattcggagttagtagtggcctatcctattaaacttgctctaatgctccaataggagtatttagtgggagatttgaatccagtccaagcagacagagaagagaggccgcctcctgcacaccgaccaacccccctcagcctcagctcagctcctccctttcaaaccactccacttcacctctacgagtactccagagagaaaaatttatcagcgtcagcttccctctttgagctcacgctcactcatcacacgcc

SEQ ID NO: 6140 - DNA, 2000 bp, Oryza sativa
  misc_feature (1)...(2000): n = A,T,C or G
ttgtccacgtgacgtgtcacgtaggcaagaccatagtcaaacgcggttttggaccgagatgatacaaaaccaagtttagggatttcgatgtgcggtttgcaagttcgtggacctaagtgaaacctcctgacaagtttaaggatcgttggtgtattttactcattctagatcttccttaaacaaaagcctaacaaatgtaacaaattaacataacttacacttctcaatcttatcaaatacaatactaaaatttgataaggttcattttcagatcaaatgaacaacccataaagcgatgtgtttagtaggaagggttggtacgctttaaaaaaaagaacggtagatcaatccatgattaattaagtagtattaactaataatattttaaaaaataaattaacgtgatttttgaagtagtttttttatagaatttttttaaaaacaaaccgtttattaattcaagaaacatacatgtgaaaaatgagatgcataggttagaaaagtgtgaaaggaatacaacaaattttaaatctactattatttaaatgcaccattataattgaggaagcgtaccagtagaaagaaaacgatgggctggtttggtttgtgacctaaattggccttaccaatttttgtcgatgtcaaattttagcaagttttggcatggctaattttggcaaggcaaaattgtatttggattgaagccaaaatagcctaagttaacgattgaaatgtcctattttctaaggcatgctaaaatttggcttcaaactaaatagacactaaacactgttaaaattgtcaaatattggtaaaaacaatttaagcctcgaaccaaaccggcccgacccgatagaagtaagaaagcgtgaaaaaaaaggaacacatcaaatcgcccagacctaccaccgttcagcacgaggacgagacgagggaacgttaaagacgcgggggccggcagcttccaccacgcatcccacctaccctgctacacacgcatcctcgtctggcggtggactggccgcgggccggtgtgctgtggactccggcacgaccacccgcgggtcgccgacgcgcgggccccaccaccacgcaggccccgtaggcggcgtgtaccggacgcgcggcgaaacggcccgccccgcatttatgccgacyccytcccttwtattatacccmtcycnctcccgcatcacagccattcgccacttcaccaccaccaccgccataatccgtctcgccccgatccagccggctcgtcaccgacgcgacgccgccgcggccccccagatcccgtcgtgcgcgcgcgcgatctgctctcggtgagcgcccacttctcttcgtctccgtcgtttttttttccctaggtcggtgtcgggggatcgccccgcccggccgggttggactcgtggatcctctcgtctgaaatttgttctggcgccttgagggggggatagatctggctggcccgtgcggttgtgcgttgtgatctggtgtggcgcggggttctcgtgcgtgcgcattccgcgtttgcggcggggagagggatctatctgtctacctttctggtgcaggggaggcggtgagtggtgccgatcaccgttgttttgtggttcgttcgttcgttctacttggttgtggatcatggtgagcattgccgttagttagtacatatcacaatcacaattgtttaacgtgaagaatttgattatttggtaaattgaaggctagatcatgaagccgaggtgctgtttggtactacgagagagacttcgcacacacacactctctctctctctctcagggatccatgtttatgtcgctccttttctcaaataaatcgatactagatcagttgcggtttttgttttttcttcattttccatgggtgttaactagatctgctttttataattttaactctgtcttggggtgccttttatgacgtcacatgtgaggatactcttctgatgccattttgtacacatcagcaggcgaag

SEQ ID NO: 6141 - DNA, 2000 bp, Oryza sativa
gctaatggcaaattaattaggcttaataatttgtctcgtagtttactgacggaatctataattttttttgttattagtctatgtttaatacttcaaatatgcgatgtgacacaataaaacttttcaccgcccgaaaacagggccttagcaaacaaagaggaagaaacccaagaaaaggcgtcctaagcaaaagcaatctgtggaaaggaagagaaccgtacgagatccccaagtaggaacagcctctggccctgctctactcgcgacttggactcgagaaagcgatgtggagtatggatccttccttggtgtcaaaatttttttggggtttctgaccgaagcttccatggaaactttgggtaaaggatgggtgacacttcgtcctgttacggctaaacgtgcccaacatgggcgaccaaaaaacgggacacgaaacttctcaatcgtgaccctaaatcagacctaagcaagtcgagtcgacgcagcagaggaggtccaacgtcaggaacccctgaatttcacaacgagataaactcaaatcactctcctgagtcttgaccaaatcaaagtttttgagttcgtgatgaatttcgtagaaatcatgtttgatcggagccattcaatcaaaaatactacgacacaatgctcacattcatagcttctttcagtgataggttatgtactcatcaacagcgagatatctgtagtgacttcgtcaatctcaatatatgccgacttaatctttcaaaaatattcataaagataaggtgtgcatatatgttcatagatgtgagtatgcgtgtgtcgtaagcatgaaatgttagtgttatgtttagaataggggaatgctactagacggtatcccgtttgatccggatatcttagaggtatcacctgatacctgggtatcagccgatacctaccactaccaggtatcaggcgatacctcaaagatattattccatccgaacggggtattagtcgatatctatcaggtatcagataacaatagctcagaggtatcattctgttcgaacaagattccgtcctatagcatttttctcgactgtgtttagatataggggcgtaaagttttggtgtgttatatcggatatacggacacacaattgaagtattaaacgtagactaataataacacaaattatagattccgcttgtaaactgcgagacgaatttattaagcttaattaatttattattagcaaatatttactgtagcacaacattatcagatcaaggagcaattaggcttaaaagactcgtcacataatttacacgcaatctgtataattagttatttttttatttttaatacgttatacacgtgtcaaacattcaatgtgatatctcaatgtgatatgatgaaaaattttgtctggtgatttatacgtgggcgaagaaatatgatccctgatctcgtatcggcatggtcccacgattcctccgacaccgtccgtccgtctgtccaccaccccgaagcgtgacgtgacacgcaccatccacccgccgccccgaccacgtcaccgcgtcggcgctgctacgacccgaaacctgcccagccacacgcacccacagcacacccacgcggccgcagccacgcgctcgcgccgacccgacccaacccgacccgacccgacgcgacgtccaagccgaagcgcgcaggaagccgcggttttcctccctccagcccacgcccaactcatcccatcctcccccctacgcgcgcgcgtccaacctgtccccgcgcgtccaggaatccaatccaaacaatccaccacgcacccacacgtgagacccccccacatccaccgtcctctctcgcaacttctctgaagcccaccacctcctcctcccctatttattcccgcctcctccccaccacatcaaatcatccctctcctcttctcctcctctcaaagatcgcaagaagcaaacaagaacacaacaaatcgatcgatcagtcaacctcactcattctc

SEQ ID NO: 6142 - DNA, 1717 bp, Oryza sativa
  misc_feature (1)...(1717): n = A,T,C or G
anatnaaarntattaatgcgtwttcaggaanwcsgcgttatggggaaaasntaaaggaaacccaantacttcaaagtaactataggaatatatctcggattatatatatgatcttcatctgatatagtaaatattaatatagctttttataaacttgtttaagctgataattcgatttaagacaatactatatgttcttttaggatggatatggagtaccattagttggttgcgcttgcgcagttactaaattctctactcggtacaaattaatgatgtaaggggacttgcacatgatggtgaccaaaccaaatagtgaccacgttacgtaatcaggcacttcaattagggtttaggccacaagaatatgtaattctatctcatcggatggatcgatcaagttatgccgaaattaatcagctaattgaaaaaggattcatccgggaatggatgatcagtccttgtcaagccatgcatttccccgtcatactccaaccatgaattaagcaaccacatctttcgttcgttgacattaattcggtgctatccccgttggcatcatcaagatatagtaggttcacgcacacatgcacccgtacacgtacactacatatgtggtttcactttatcaagcacaatagtggcctggatcgatctccttttaccatctcatctcatcctcatttgcatgcactcgcacgttctaaccttaaattagccattgaacagtcgcattatcgaccgaaccagacggaggatatataggtgcgatgcaatgttaatgccagtcacatagtatactcgcatctagcagctgaaatggatccatgtcagaaagtatggctgtgccgggaaacagaaggtgatgtgtgccataggttgccatcaaagtgccccccccccaaaaatggctcacgcagatgcacttaatgaagcgatcagacaactagctagatcaaggtccacatatgccgtggtccactggtgcatgcaagattgaatatwcaacaatcactggggattttatttccttagttttaattttcttctttccgttgggtggtggtggaatcaacgccagctcgagacatatattcccycggaataaacctgcctgtgcatgccacggsgcccgcgcggcgcgaaamatgcggcggcatggacgccggagtcsgtcgrtcaggtgcggggcaccgggcgtagccgktgcgcgcgctcgtgccatttctccgttataatattccggcgcctcgtggctcgtgctgtgctagctgcaatgtgcgattagagatgcaagcggatcgatccatcaacctatttatacgttagtgggtaacccgtgattactaatttactctattatgatctatttacattctaagatacgacaaaagacaaaccagaacataatatgaaaattctgggttaccacttatttgatttataagtggacttgtggatcggtccactttcgtccctatgtgcgatacatcccacgccatccgtggttggcgtccacctgggcgccgcgcggctgcggccggagcccatgcgcccgccacgtacgtgacaccggcgtttgtttgttcgtagaggagaaaatggaaatggtgttgtccagcgcgttgggttccagttcagggccatgatggagtgttcgtttcgttttttttctgatctatagtacgtacattttcggtgacgaagtactactacc

SEQ ID NO: 6143 - DNA, 2000 bp, Oryza sativa
acttgtagatataaatatattgctagatgaacagtggctgtagcccttttcaaaggcaatcatctttttgctgatcgaaaaaagaaaacagttacacatatattgtagcatgtgtaggcatggtaccatggatatggcccaatgctgatgtgacatatatatatatggtgtcagggtgttttacacatgcatggtcgtttgcttgtttggatcgaaggtttcagttactactgctatacatgaaaaagaagtcaatactgtagcaaatggatgcatgcatctgcattctagctaggtgatagacagaagagttcttcttcagaacctgcatggaatagcctgctccatgagcaatttttttctgactctccttatttgctttatggctaataaaccatgaaaaaaatgaatggataaataaaaataattcatagttaattaaaactgttatatttttgttcctataagtttaaaagctaatgctagaaaataaattacgatgaaaaaccttaaagtaaactctgaaactaagttttaaaattcaaattttgattgcgtcagataaaccaacaagcaaatgatggagcattttgtttttgaatgctataagtaaattgaggttgtgtttttctcccaatgggttgggagaaaagatatctcattctcaacacgcatgccttctgaactaaagtaaattgaggttgtgtttttctcccaatgggttgggagaaaagatatctcattctcaacacgcacgccttctgaactatttgacagtacgttggttgcaaaaaattctctataggaaagttgctttaaaaattatattaatatatttttaagtttaaaataataaatagtcaactaattatgtactaatagctcacttggttttacgtatcttatcaatcttcttttcccccttctctcacagcctcatcggttgcccatattatctaatataagttgtttattagggaataaaaaataatatataggtaaaacttttgtatatgtgttcttagcgacttaaaagccaatataaaaaaactgcgtcaaaattgtcttaaaattaacttcaaatttaagtttaaaattttaaattttgactttatctttgattaataattaggtcaacagtcgaaacccctcaattctccaacacaattaggtcaacagacgaaacccctcaattctccaacacaacctgagactattgggctttatttccattatgtgacagagccaactgaaaggcccaaaaccaacagcttggcccattttcaagacagcccaacaggcctctcgcaatttccgttgaaagtagtagtaacgttcgttttcgcatcttcttttttcttaacacagtttttttttctttttttttaaaaaaaaacatgctcttgttggtgaattgaatcggttgtctctgctgcagggtgtaactcaggtaggatagtaaagccttttcaagttggctattcttttaggtttgaagtttctgttttcctttgctgcaaaaaaataaatacaaaagtctacaatggctcacagctggtcagaaaattagaccaacataatgaaaacgcatgacctgttctgatcaacagcagcacatagaaatattcttcttcttcttaattttccagccaaaaaataacctaaataataccctggaatcaatctacatacgtgcaagcactttgctgctttcaaaaaaatattataattttctttatgtacgtatgggttagctgcggcaaaccttgaatcagtacttcaacagattttttttttttgaaaattttattatatatgaaattgacgtgaaacaattcaaactctggaacaattttttttccctctttgtttcgccagcgcctataaatttgagcgacaaatcccatcgtttctcctcaattccctccaatttttcccccaccggagttcaccgccggtttccgtttcctccccggcggcggcggcggcggctaggatcg

SEQ ID NO: 6144 - DNA, 304 bp, Oryza sativa
atcaatgagaggccggtgaagaaggctatctcgatttctccagcctttcagtctccgagccatcctctgctcctaataaaggtatctacttctacttgtcacacgcttktttcaaccctttcataaacmtatatgrgatactgaggaaatmattagtakcaaatattaggacagaagcaacattttaaactctttcagaagaatatataagtgagatccyaaggaagaaattagtaccaaattaagggcaaacatatttatgcattaaatataaggtgaatcggtgartattagcgtcgaaagc

SEQ ID NO: 6145 - DNA, 2000 bp, Oryza sativa
gtcaaagcttcgctcttcccctagacctccatagcacgctgcacactagctttttgtgctctgtgcgatcctagccgctctgctgccactcacgcctatagagtagcatctttccgccccgccatcctgcaccaacctcctagctccctagtcgttgtgctgcccggcgatagcatcgactagaagagccaatatctagccattatgctacccaactggctagaaaataaaccaataggtgaatcccacataattttatttcttttctaaattttatccactagttcactagtacataatgcaaataacctaatgtggcattttgatcaactctttacctaggtcattacccctcttaatagtacgacaaagctagaaataaaccccacataattttatttaccatctttgttccattgctttgtgcgatcaattttaatccttggtagtcctaactcaaagtataccactcaaatagaatagttagtccacaattagcgcttatcattaattaccaaaattaacaacgagggccacgcacaaggaaaaatgatgtttttggcagacctttaggtgcagacgggtcttcggtccgcacgtgaaaatctgctttggctcgtctggaaaaaatgtttttgtactagtgatcactgggacatctttgaaccaccatcctgttcccatggaagtttcacttcacccaccgtgcctccaccaccttcttattgtcaataatcaccgccacctccccgtccctcgacccccactcctccccaagcacaccactgccacctcatgctctgtcccgttgtcccgaaacctgcatcgtgtgctgtgcactagcaaggctgccgccgccactccccccatcggtgccggccatcgacagccgccttggagagaaatgggaaagcggggagaggtggagagtgatgggagtagaggagagagtagggttggaggaagaagaatgggaatctaatgacatgtgggttcggtcaatggtgactcaatgatatgggttcagtcaactgccacataagcgaaaacaggagactatactatcatgggacctaatgtacaccgttttgttaagatgaatagtgaagatttatggtattatagtttagggacatttatcaaacttgacataaaattgagagatggtaagtggacttattccctttctttgtatgggctggaattactggaacacaaggaataagttcactttccatccctcaactttacgtcaagtttgtttgatatcccttatctccaatactagaaatcttcatccctaaattgtacaaaaccgtgcaatttgggtcccataccagtatggatgtctggtttcgctgacgtggcatcctagttagcaaagaaaaaataaaaataatatgtgaggtccatgtgcaagtgaaataagaagaaaaaatgtggggtttcgtccgcgcttcatggcctaggagagaagggggaggtagccggcgggagaagggggagaggaggctggccgcggtcacgtttgcatgagaaggggaagaggtggccgacctcctctcactctttttcttttcctggcgaggctggagggtggggcagtcggcgaggggagggtgcgggtaccgaaggcggcggtaagagagcggaggaggcgtgcaatggcgctggtggttggagggttttgcagcgcgtcgctggtctaggggcgtctacaagaagtactaggaccaactggaaggctaacaggagtcgggaggtgggggactcacgacggccatggtagcagcggtgagagagtttggtcaattggaaacgcatgagggtggcgaagcgtctcgcacgggcgggtcagctcgggactgaacagcagagcacaagacgcataggaaagcggtggcgagcgaggagggggagaggacggtggtcggtttctcatcgagcggggcggcagctggggtttcgtccgcgcatcacggcagcaggccagcagcacg

SEQ ID NO: 6146 - DNA, 2000 bp, Oryza sativa
aaggagggagtattaatactgcttctgatcatagatgatgccttgagaagcctcagttacaggagaaaaaaaaattgcttatctgagcgatgccatgtgatttgtttgtgctcatgattaagaaagtaaatcagccgggtttaaaaccaagtgcggttttcctatcacgtccacttgcacgcctgcacgttggttgctaactaatcaaccaaatctgcacgcatgtgatgagctgcggatcatgtgccgatctccacgcaagcactacgctacagcgagcggcgccggagaaggaagctgctgccgtcgtgctccggctggccggccggtcggccgcgacgccgcgtacatcacgcgtgacgtcttcacgtatcacaccacgttaaacaagctctcgcacactcattccagagacgagtaaacaacagagaaataaatggagatcagcatggtgcccctaccttgcctagcctccaacggacaaccatataatttgtagttaagtacctccctgaacaagagatacatttgttaactagagttagagcaggtacaatagcagactattagtcagctgtaaacatattttaatgagataaaagatgagagagaagagcagtggactccaagacgcaatatgtgtatgataggtgggactatattaatagtatagtaagcaactattgtatgaattagctataaataaattggagctagtagtgggctatactattaaacttgctcttagacgaagtacaggcgtactgatgacgatgatgatgttgatcgtgcagttctctcgatctataccactgtaacctgcccacaaaaagggtcaggttcatatgaccaacccttcatatattttggtttatcccccctttcaaaagacgctagctctcctcactgcttgtgatctattttgtcaggacccaggattgattccaccttataatcaccataaaatatgtgatcatgtactaataatactactcctcctaagtctaaaatatccaccaaactcttaactaatcagcaaagataaccaacacactggctggccagtagacatgcatatgaaaaaaataatatgattgcttcgaatcgaaccgctccccgcgttgccggcagccgattcgatggatcgccacgttcaaacgccgccgttggctcgcacaaagaatcaaggctttcccttcgaacttccaaaaattcggtcacaatatgcatgtagcattaggggttggtttgttttgaggcctatattggccttaccaatatttagcaatttcaatagtgtttattgtctatttggtgtggagctaaattttgacatgcctaagaaaataggccatttcaaccgttaatttaggctattttggcttcaatccaaacacaatttttcctttgccaaaattagccatgccaaaagttaccaaaatttgacattgacaaaaattggtaaggccaatttaggccacaaaccaaaccagccctagatatagacaaaaaaaactaattgcacaatttgcatgtaaattgcgagacgaatcttttgagcttaattacgccatgatttaacaatgtagtgctacagtaaacatttactaatgataaattaattaggcttaatagattcgtctcgtagttgacagacgaaatctgtaatttattttattattagtcaatgtttaatattttaaatgtgtatccgtacacttaaattttttttttgaaaaacaggcggcagcgacaccaactctctagccgcacgctgcactcgcgagtcgtcgtctcgccgcattattattttttttcttcgtctcttgcacacgcagatcccagcgcggccaatggcgccacccgagtcaaccccctctcgcggcacaaacccacccaccccgcaatcgcaatgccatcgcgtcacgccgcctgccgctcccgcctcccccatgagatgacccctcccccgccgccgtcccatgtgctcgccaccgtcg

SEQ ID NO: 6147 - DNA, 2000 bp, Oryza sativa
aaaattacattttctcactaattccgttgtcatataattttccatttttggaagaaactggttggattccttgtgcacctattctgagaccgatccggccattagccatgagatgcacgtacgattgttgtttttttcccagtggaacgcacacttaatttacggcatatcttgtgaagaaattattgcatttcagctaagatataatcggccggcatctttgcttaaaaaacaacaatctgctgggccgttccaacggagattggcagctacctcgccctgtaaacgtcatgcacgtctccacggatcacgacgtgacggcgtccgaggctccgagccagcggcggcgcgagctttggtgatgcaatttgttgggctttctgcttgccttacctgggccgacctgtatgcacgaattgggctaaattcccaaaaggaatccaaatctcccttcaaaaaaaaaggaatccaaatccttttcgttcccgggggagagggataagggatgaagatttgttgaatacttggagcaagttttatagctaatttcatgcataccatataatagtaagaggtaatatgtatttccacatttttattgaagtttatgtaggagttgtttcttccatgagaggtggtactttctctcttcactcttctctactctatctacctcaccattagtccaatgcgatatctttgggtttgtagttagatgcctgtagtacttagcgacaacaacagcaagctcttccactttttcggtgttgacgatgatagatatttggattaggatacgggtgggagaagaattaaggtgagggaaagatgcagtttttcgagcttagagaaatgactaaggagcagggagatggtaaacctgtggtgacatatatgacgtgcgacgaggcggtgttggcatcatagccatgagattgatggtatggacatgggatctagagtagttaggagatagaggcaatggtagcatctccaatgctaggggccgctgaagacaaaaaaaaaaaaagggcaaggcaagggcggcaagggcccctggccgccgcttaggcttagagaggagaagccaagggagagaaagggggtaaaagggaggaggacgattgagctgggctggttagcatctagatagcgcaagccatgcaaaggggggcaagtgggtgaggatgggtgggcagtggcgcaagggttttatccaagctttgcgaggagagatggtatctctagtatgacagcacgaatcatgaagtggtattggccattagaaacgaccgaaatttaggcatcttagtgtgaccaaaactatgcaccaaaccaccaaagggaaaaaaaaaccattttattttccgaactatttcattggttaatggaatagtaaaatagacttttttttcctaccaagtattgtcagcctatggcccaggtcatactgaaaagtggattttggcccacccgtcgtggaaagctaaagattcggcccatgcacagtaagacgagacaaatgtggacgacgtcaacgtgcacaaaaccttctcttctgtatcggccgcttgaagtacaactttccgctatcgcggtgcgcgcggaaggccccgctgcggcacgtaaacgttcgtcgtgtatcgcgctttaacccggaaaccgtggaaacccgcaaaactctgcatctgcataccgctgcaaagcggaaaaggaaaaactccccgaagcgcgcgacgacgacacgagcgcggccgcggcggtgaaacgaacgggcggaccggttcttcttctcccgctggtctccggcccytccctctccaacacctctgcatgcccagcccccatgcatgccctcttgttctctccaccgcgaaacatgagcccccgcaattctcctttgccaccacaccctgcgctcctctcgcctcctcctcctcctcgtcttcttcctcctcctgtcctggatctcacagggtggcagttcctcgaataaaaaa

SEQ ID NO: 6148 - DNA, 2000 bp, Oryza sativa
ttaagcatgttctctcttgcgtccttgtgcgcctcatccaaaacttttgtagcaaaaggccacggcttacagccctcctccttttaaggcatgtttggattgatgccaatttatgccctaccaatattttgttaatttcactagtaattgttggtatttattgaagcaaaaaattttcaatattgctacaactaattatcacaaaatttgtaaaacatataaatatgctttaataatcgctaataatgacaaataatcataaaaaacgccaacaaagtttgaaaaagcaatcgtgtattaccaattctctgggcgtaattgatgaaaacctgcatggctactgtttttcttatccacatcttatccacatcacacttttcagatgaagccagaatcaagcctagtatgtggccctgaataaaggatttatttgagacattataaaaactatagcattcttagaaagccacagagaacccaacaaagtgctaattaaacgccctactaatacttgtctttcaatatagctcacattcgttcaataagctaattccaaacatatgggcaacactatttggtggaacaactaaaccaaaaggaacatggaccgatcttaaaaaaaaaaggaaattgctatgcatataacctaattgtctcactcacgtacgactaaatttgatcaacagctgcaaacattgtattgcatatatgagcatcttcttctttgattgatctatgattataaatggctagttgtacatgatcgagttgtacaatttattttgtatgtgtagcattaataaaaaaagcacagcgacattggaaggagagaaaatccaagaaatgccattgacaaacactcaaattcaagaaatgccatcgacgaatgcaagttccatgaaatgccatcgtacaagcgattttgtcccagaaatatcatcactgttagggttccgttagcaacgtaaccttccgttaagttctataggatgaacaatgtgtttaatggcgtggaatggacggaaccctaacggtgatagcatttctgggacaaaatcacttgtacaatggtattttatagaacttgcatttatcgatggcatttgttggattagggtgtttgtcaatggcatttcttcgattttctcaaggaagaaaaaggagatgagttgtttcattgtgcataaaaaaaatactatgtcagtttattagcatgcaaattcttcctagctaaattgtctaatttggctagaacaactttacgtaattaaatgccacatgaaaaatttaacttaatcataaatggtatcttaatttattatttttaaatatatcattagtctacatatatacctgttgtacaatcatagctctgtaaattgaatggaggggaaaatttggccgtgttctgatggtgtgtgtgattaagctaatcaatcgatatatatggactattacaggtcaattgtatagttgattaagctacctaattgatgtggaccatatactgtggacaaatgattaagctacgtactactataagctgtatatataggagtagtatatatcttatatatattgatgattgatcgattggttggttgattatatcctgggaatggaagctgcgcgcaccatgtcgatcgatggcacaaatgtggcgcatgcatatatacggccgtggccattattaattagtttatgctgcgttgtatgtatatactgtattatcgttgtcatcagctatagagcgagagcaatgggcaaatagttaatcaattaaagaagatatatgatccccctgattgggcaactggaactgggctataaataggagcgaaaacacccccgaggaaatgcatcccggccgatcgagctagcaaatatcaaaaagcagctccagcttcttctgatcgatcgatcgagctgagctataggcagtagctgctaattaagctaattaattgctaagcagtagtagagctagctaattaattaag

SEQ ID NO: 6149 - DNA, 2000 bp, Oryza sativa
ttgaacatgatgatcgatgatgcactgcacatacatatatatcgacgatgcgccaatgcatcaacgtacgaatcaatatgatttagggactgcttgtgactgaaaattccattctaaatcatgtaaattttgggagaaatttcatggtccttaaaaaaatatctcaaggtacgcaaattcaacactaatttttttggtatttcgagttacttagtatctagagataccaaattttacactaaaaatgtgatacctcccaatactttttcaaagatgataaaattacctaaattttaaaccgcgccacttaaaactaactcctcctccctcctccctcactcccaattcaacacgtaccgccgccaccgattcccccacctctcctacaaagtcaataagtcatgtcgcccaataaaatgcatgctcctactaacacttatcattttgagtttacatcccattccaacaagccaatttctaaacattagtactatttgataaaactaaactgaaagtaaaagtaacatggaccgatcttcaaagatatttaacatatatcatgatattcaaacaaaacgatgaattgcttcattctgcacaaaaggactacactatttactaccatccaactcctctagctaaactgttggttagaacaacacctttatgtaaaccgtaagtggcgtcttcaattatcataatattttattagagcatcgccaacagcataactcaactcctcccaatcctaaacttaggggattttagttgaaaaaaccgctccaacagatcaatcacctagtcatctactcaagaattggagtacttgctcccaatcaattgcctgccaggggagggggagggagaggcaatcgcgcgacgcgggatgatgggacgaataacattttttattggtagtttggggtggcccatactttttgtttagggagtcatgctttaaactatctgttggagggagacataattttaaattctaaatgctccttagaggatcctgaaatgagatttcgagccaggattagaaattaatgaaagcgtttggcatgttcttattagtctctatgtacctattggtcatcagaattatgtttattgattggacggaaaatttcccattttaatcgataaatatatggactattgaaggtcaataaatagttgatcaagctgctaatcaattgatatcaactatattatggaaaattgattaagtcaaagtgaattgcacgagtagtccctaaacttatgatattgtgtaatctatagctaggttcctaaacttttaaaatgcagatctagctaggctccggaacttactctagcgcgcgtcggatgacaaaatggaatggtgttgcctcaccatgaggatcccaaaaccactggcctttggcctgcctcatctctctcatttaccgtgctggcctactatcagccttggttaacagagaaaaactgattgatcacccttttaatttcttgagataaatgattaaaaagggagagagttgagagagaagaggcagtgtcatattggttccacatgggatttcagagggtagatcgatatactattgatataattgatggattgactggtaaaccttaggtagcaaactgcatcatgtcgatcattccattgcgcgaagaatgtcgtccctgacacgatggccatcagtttaggttattgtacgttagactagttggcatcagctcagctagctagccacgatagcaatggggcgggcgagaatatataaatattaataatgaatttaaaataaaataaaactgcatgcaagcgatggatagccacaatatatatatagggcttgggcacctggagctgcctataaatagcagcccaaacaccccccgaggaaaccatcccaagctagctagctagcagcagcaaaatatactatatcatcatcaattaattaagctagtacaattaagaagtagctaagtagtccaatacg

SEQ ID NO: 6150 - DNA, 2000 bp, Oryza sativa
tgaggggcgcgctggcgtcgtggccgcggcggccggacttcttctccgtcctgagcctgctcggcggcgccgccatcatcacggggagctcgccgcggttcgacgtgttcggcaacgacttcgggtgggggaggccggcgaccgtgcggagcggcggcgcgaacaagttcgacgggaaggtgacggtgtacgaggggccggacggcgccgggagcatgtcgctggaggtttgcctgactccggcggcgctggcgaagctcgtcgccgacgaggagttcatgggcgcggtgaccacgccatgagttgcatccatgcatgcttctattcattgcgatttgcgagctcaattggttaaaaaaaaacattcacatcgacatcatgtaatccatttatgtcaatttgtcagtagaaaggtgatgaattcatcaacagctatagctgatagatcagagatatcactggattaccttttgtatcaaacaaggataaatcaatatgtttgtgaagtgaaatttcgaatggtttttagacgaatttgaaggaaaattgaaggatgcccacggaggccgaggtcgtggtcagaaatgccagagttcaaccagaggattcaaatgccagggactttctgatgatcaatcatcttaaactttcatattatcagctagtagatagtaattacttcatccgtttcacaatgtaagtcattctagcattttccacatttatattgatgctaatgaatctatatagatatatatgtctagattcattagcatcaatataaatgtgagaaatactaaaatgacttacattctgaaacggagggagtactgtagatggattcaaatgagcttgcagcttgtgctgagaataaaccaacaatcgtcttcctgtcatcaagctgtgtcctgaacctgaaccgtgaaccgcggcccatcttcaagcagccttatcttggtgcatagaacacaaaatcgattgtaaattgcctttatcgaaattaggatctacgaactttccaatggtatataacacgtctggtagcaaatgcttgtacaaatattgcagcagctgcaaatttagatggttgagatgagtttcagaacatgaatgccgggaacgacggatggctagagttgacgagtcaacagcctcctggtggcccacatgcagaaaagtaagtcactgcctcatgggacccaacttgaccttgctaatctgatgtacggtagatcacatgatgagacagtgtgattaatgtcatcaactcaacgtgaacgaaacacaaaatggattgttcttaggcagtttatattgtttgatgtgtgctgttctgaactccaaacctgattgatgcatgcatggcactgaactttctgcaacctatatmcatgatactatccagtatccactattaagtctttgaaatggattgctaatcattggctaatagcctaatactcgtaacatgctgtcgaattaaaacatctccggttgctgtcacagcatgctgcatatgctgatataatatcatatcatgtatatctgatatctctatgctttgagtcactttcattatcacaacaagaatttcaatacacttgtacacaaaagtggaaaaatgcctgctattcctactaagatatgttcgtattataaagattttttgtaaaaaaaacagaaaacattcgcacaagggatgaaaacgacttgcttcaattctcccccacagcccagaatcagaaagtatcgtgtatatatgtgacttaactaaatggttgtgcaaaaaaaaaatccagatagattatgataatataagccataacataaatatgcaagatctacaattgtattcgctatcagattaagtgttaaaaaataaacttgtctcacttgatgtccataagctcatcaatcagataagaagtttgctgctgttctaaatcatcatcatctgcttagctagaagctacactcatcactacggttgcaaccaaaaa

SEQ ID NO: 6151 - DNA, 2000 bp, Oryza sativa
ctttcttcctaagcccaaaatccttggacagaagaacgatgagcccaaatatacttcggtgcagtacttgtttttagagtgggctacaatacattgtcaaattactgttatacaatttaaatttaaaatgtgttttgtacaaagggaaatgccacttatgagccattttcagtgggtcaatagtaaagcggtccaaaaaactgtttaaactaataatggatctgacgaaatagttcaagggtgactagaaaattctctatgtttgtgttagcccatagcatacatgtccagtgagatcacaagtgaatgcttgttactaaattgaaaataaaaggagaaaataataatggaaaagtatggttcatgtgtgtcaataaggtgtcaacggccttgtgctcggtcggaagagcatacaaaggggatatgcatgggatggaggtgaaattccatgctcacctaatcactttttggtggtcggttcgaatccggcaggccgtcatatgcatgcctatatttatgtcattgctaattckgattkgttataattttttcaaagttatccgtaggttatagttaggtcaatagcattcggatagctcattttttattctttttggcgacaaaggacatgtgtaagtaggagtattactcatttcatcccaagatataagatattttgattggatataatacatgatagtactacgaatcttcacagaaatcgaaccaaaatctcttatgttttgaaaggatggactagtcaatagtcgtcgttattgtttcaacaaaaaagaagtctatataattcatgcaatttttgtgcttttgtcttgtgaagatgtattgtaaaggcagtcgaaaaagaaggaaaaataagttgcacgttaccaaagcagttctctttttgttgtatgcaagtgtagcgaggccttgtgcaaacagtccgtgcatacaaggcttggttttctacgactttcagcaatgttaacttggagtcaagttttttagaccgcattgtgcacacagctacactgcaatatttttgtttctccggctgattcctgtatctccactgtgtgctctttctaaggatatagaagtagaactattccattcagttcgtaaacggttcgattttcacataatcattctatatataaattccttataaagaactatatattaaatatattttacaactttttaattctagttaatttatccgtttgtgtcgttgaatagttatcacaaaatgattcagctattcccaaaaaaaggctgaatcattgtagtgaaattttcgtatattatatgagcgaaatccagtttttcaaatataatccttgataatataatcctcgataaaggccatgtttaaatttcaaattttccgtcacatcgaacttttctacatatacaaacttccaatttttccgtcacatcattttaatttcttccaactttcaattttagcgtggaactaaacacagcttaaaaaccttctgtttttcaaatattggccgtgccgtgtggcttctcccacaaactgcttactaattttgtacccgtcttcccctcgtaattaacccaaaattaaattaaaaccaaccaaaaaggaaactgatgcaaccgcccggtgccagaatctgctagcctgtctcgtctgtgctgttttacagctgcgaacggtgggcccaggaatattcaatattcaccccagcacgaatcttgacgcccaacagattcaccacagacttgacctggaatcaaggcaggtgcagatctgaatcggacggccgagattccctccggggctgtgtgtggactggtatcaggcagacgaagattcctgaccgttggatctgaatcgaacggccgagattcccgcaggtaaccccccccccctactcatcagctatatatacgcacactcgcagccgcgatctcgctggctaaacctagtcgcaggcgcgcagctaccttcctctgaaatggcagcc

SEQ ID NO: 6152 - DNA, 2000 bp, Oryza sativa
ttctggcacctgaatttgctcaccaaccaagctaaatcgtgggtctccattgtagcctaaacgtcaagaaaaataatgtggagtaaaccaaaccccccaatgctcccctcctcccaaaaaagtttccaaacaaacaaatattatctcaagcaaggtttacctctytgattgagcgtcggatccaaatcctaacggtattacggtttccgacaaatttcaagtaatttgggtcgaatccactatttcaaacttgaattctcgaaagaccattttggcatttcaattagtatcttctttcgttcaacgttgaaacatcaaaatttcacgaattttgatcggttttcgtcgaaaacataagtacacctacatacaaaccccttcccaagggaagctaaaattacggggcttttaattatttgccacttttagatttagcaattaactatttgccacacctatctcaatgacatgtgggtccacatgtgtctataacatgtggttacagtggcaaatagttcatctaaaagtggcatatactttctccatcctaaaatgtttgacgccgtacttttttaaaaatgtttgaccgttcgtcttatttaaaaaaattaagtaattattaattatttttctatcatttgatttattgttaaatgtacttttatgtatacatatagttttacacatttcacaaaagtttttaagtaagacgaacggccaaacggccaaacatgtttaaaaaagtcaacggcgtcgaacatttagagatttagggaagaagggagtagttcagaccctgtatagatggcactaaaacttttaagtcctatcacatcggatatttggacactaattataaatattaaacgtagactattaataaaacacatccataatcttggactaattcgcgagacgaatctattgagcctaattaatccatgattagcttatgtgatgctacattaaacaatctctaattatggattaattaggcttaaaatatttgtctcacgaattagctttcatttatataattagttttgtaagtaatctatatttaatactttaaattagtgtctaaatatagggactaaagttaactccctggatccaatacactaccccaatatctctaaaattactggacacggttgcattctgcgacccgcaaacgacttttggatccgtaacccgttgacacccgcgacccctgttttcgcttttctttgggccctcctctctcctctctctcttcctccattgttcccctcctccccttctctcccctctcctcctcgcttccggcgagaagctccggcgaggcgaagcctccagaaccttcaggagagctcctcaccgaagggacaaggggccttctagaaccttgctgcttcctcccccaaaggttagatcagagcaagggcagctgctctttcttctttctttcttcctcgtttgtcttcgtttccaccttccagcgaggattctttgtgtgtttaatgggattttcgaggtgtggtacggcttgattggagaaaatattgttgttttcgtgacgaaatttagtgaggtattgtggggaaatcgagtggcctttttagcgaaaggaagtgtttttttttacttgatctgtatttcgaggtatgtgtgcatcaacatgctgttaatttggtagtaagtctgataaattgcttttcttttttttggtctctggatttttctaggcttgcagcgctggattggctccgaagatcttaattttgctccaaaggaaggatcccccatcgcaaatcttgatctgtgggtggatttggtgggttgaaaactccatcttttatggggcaaggctatgcgaaatccttgatgctcccatggagttctcctcccatggggcaagaggtgaagaggcagtagatagaggaggagcaagaggtggaagcgaagagaagtaggtgagaataggaaggacgaaggataaggagaggagggagctctcc

SEQ ID NO: 6153 - DNA, 840 bp, Oryza sativa
gaaaagktscctggggcaaggcsgcggcggccgccgaagggggaagaagggratgggttgctgtggcacgcggagctgaagccgmacgcgagcggggagtactccatcgcggtggcgcaggcgaacgcggagctggaggaccaggggcaggtggtgacctcgccggcggcgaccttcgtcggcgtctacgacggccacggtggccccgaggcgtcccgcttcatctcctcccgcctcttcccccacctccacagtttagtgcctcgataacgagattattttcgcttgttagcgtgtggatttgatctagaatagaaccaatcagttcgtaataatgtcttggtaggtttaagatttttcatttctgacaaaaaaaacaatgcgttctttttgtttggcgtaatatttattttttctttccttatatgagtttgcttaacttgaccgttcagttttctgcgtctttttagtcaggtttagcgtagaattcggtggatttgttgattacttaattaatgtagtttatactcctctttgtgtagttgcaatttaataacctgtttgtcgaaataacaatcctttgttttgtccagttctattgatacctggatagtgttctattgtgatgattatatatttttgcttgatataccacttgctcatttagaactttgcatatgctttatcttttgatagctccagctggtacttggtagactctagattgtgttgtctattattgatgagatgaattttgtggtttactacttattctgaccaaagatgtcatcataattcaatcaagttatgtgctcaccattaacttaagatgtactaacg

SEQ ID NO: 6154 - DNA, 2000 bp, Oryza sativa
ccgcgcgggcgcgctcccgtggccaactcgccgccaataatgccacggggcgtatcattcccgctgctgttcgcgcaacatctccatgtcccccgccgtgtcctgggctggctttatcgtgggcgctagccgagtccttccgaacgttagcttttctccccatgctacactcgaaagaagcctctcgtgtacagtttgctgcgaaacgtggtgatttctgcgtaataaactcggcctgcttttccagtgcgtgagcgcaccagtgcatcggtgcacgtacgtatgtcctgctggctgatcttagggcaggctcaatgttgggttgctgaatgagcgataggggtgggcccatgtgcagatagctttagctatatctatctctacaatggttatagccttggatgagaaacaagctggatcccactgggtcccatcaaagaagaaatataccaccaattcacaatcatatgctgataggctccattagatatcattttttaatctcttaagttcaactataagcttagagctgtttttaagcatttaatgccttatgtccatgtccacaatgtatatggctgaaaaaaagtcttaaggctcactcttatggttacattgtggatgcccttagagcaagtttaatagtatagccaactactagctccaattcatctataactaacctaatagctcatttacacaatagttacatactacactattaatatctggtctcacttatcatacacacagtgtgccttagagttcgtgctacagctggctacaaatctgtagcccgctgctcttctctctccctatttatcttcttaaaatatatttgtagcgggcttatagcatgctattgtacatgctcttagcctaacgtcgatgcaactaaccaagatcagtacgaatagtccagcacgagcgagccggccattgaaagcctgaaactaacagaggctgcggatcccctggtgttcacggctatgcctgtcatgaagaaggcattcatggaacctagctggtttcttgaaggggccagccttccatgattatttgagagatatttagactatcattacaacaacagatgcaacgaatctgcgaatgcatttttttcccagtaaggcagcgctgtaggttcatgagataaactaaaccctctgcagcagcgttttattaacaaacatgaaaatctccagcgacaaaccgatactcttatatatacctacggcaaacaaactacaaaccacgtcgatggcaatacaagaccggtgttcctgccagtgtacatgtacgattaagagcatgcatgcatcggattctattgctggtgccgagatgtatgattaaggccagttcttcctttcattccgtaccattttttccaaccgatgacaaattaaaagatgtgtctacctgttgacagggacactgaatcgccataaaaaaagagaatccaatggttactggagacaatcaccccagattttgcacggccatccttgcccaagtcgtgctcaccaccacgcaatttgccaattcatgcccgtctcgtcgactcgtcgtcatggccggtgcagcatttccattttaccaggctccaaggttcgtacgtacccattggccggcggccgcatcaaacgggacgaattcctaaccctcgtcatccgtcccttccctccattcaaacgcgaaaaaaaaatggagaaaaatgagagcgagctagctctctcatggggtccaatggcccgaactttctccctcaaaaggtgaaagctagaagcttcaaaacaactcatccagccaagcctccacccctcccaaatcattccatctgctgcctttgcaagtttcaacccgcaagaattcattcggtctcgctcggcttggcgtggcggcagctagattccaagcagtcgtcaaggccgaggcgaagatcggaattttttttctcatgctgtggctgtactaacttgtaaggatcggagggcgcg

SEQ ID NO: 6155 - DNA, 2000 bp, Oryza sativa
acttaaaccgaggtagaagagcagaactgtagaagcgtgactgcgtgagcatgtgaagtggattgtgagttgtgactgctcattagccgtatggctttctgcgtgccgggccttgctccggccgatcggtctaaaaaaaggtagtataaaaaggggcagatgatccctaccaaaacggtgcaataaatctagattggggcagcctaaccagtcaaaatgtagcagtctcaacgtactctgatgaaagggtgtgggtctagctggtctagtggtgttactcaaatactccaatcggtcgggctgcatgcgagatctgtgaacagatttctcaaatgtctgcatgtggcgtgtccgggagattctccttcgcatcgtacaatctcatctgtagcgtttttaacacttctttatttttacgctgatgaacatgataaatacttcatccgttctaaaataagtacagtattccactgtttatgtttaacgtttaactttttattttatttaatttttttatgattagtttttttattgttattagatgataaaacatgaatagtattttatgcatgaattttttttatttttttataaaacttttaaatatgacgtgtctacaacgagaccgttctctgtatagtcataaccagctacctcaatctcatatctaattgctactagtatactcaaaagtgcatgtatttttttttcttcttatggaattttctcttagattagtcattcgatttacgatccgattacaccattatgttcataacaattaaatctttataacaagatctcacattgactatatttttatgaaaaaatacaaattacttttataatatatgtaaattacttttagattacattaaattacttcttagtcataaaagtaatttacctatattatagaagtaacttaaaaaaaataaagtaacttgttacgacattaaaagaaatctatacatccataatgttattcataatattgtgagttgtttattttataatcatttttagtcagtgacgtaatttgtgctgattaaatttaatttctatatagacccatgtttttacctccataacggatttatttttgatgtcgtgataaggttactttctttttgttttaagttacttttataatttatgtaaattacttttagactttactaaatttactataatatgtctaagaagtaatttaatgaaatctaaaagtaatttagatatattataaaagtaatttatattttttcatcaaaatataatcatgtgagatcttgctataaagatttaattattacgaacacaattacgtaatcggatcatagatcggataagttatttaagagaaaatttaatttgaagtataagtggttcctatttgcttgaaacataggggataaactactctctctctagcgtagcagagtgcgtcacatgccttctgattcggtttgttctggccttcttggcaatatcggcatgtggaacagatcagacgactacaccagcgtgtgggatcggacggccctagatgcgtcgcgtgataagaccagatcgagaggcttctcgagatagattttacgttttaaataagatgaacggtaaaacgttaggcatgtatacccacactcaacattcaacactggtgwtcagtcaatactaacaatcaaccgtgactagtgactccaacgagcacgtgcaatccatgcatccctccccactgtgcagtacaggcagccgctgtcctgttcagtcgatcactgcactcccggtctgactgctgcacgagcaacccgactcgatggatcacgatctagtcgccctataaataccaagctccgatgaccccgggcgtgtcgtgtcggccggtcggcgtctcgtttcgccggcgcccgcgcatcttacactgtccaagccagcgcctgcgtgcaggtcgatcgccttctaaaaccggccagcgcgcgcgtctagtgcagcggctggga

SEQ ID NO: 6156 - DNA, 2000 bp, Oryza sativa
aggacaatgcagtcgatgtatcagtttaatgtcaacaagagtcaccgtggaactggaaatatgcttctgaatgcggggcttttaactatttgccatgtttagatttggcaaataactatttgccacccctatctcaatgacatgtgggtccacatgtgtctatgacgtgtgggttcagcggcaaaaagttaattgccacatctaaatgtggcaaatggttaaatatcggtctgaatgcaatttggcatgcttgagttgagagctctgtgtgtgtgttttgtctattaaggtttgtccctgtattaatgggtgtggggggcaggcctaaattcagtgttttagcacacagaatcaaccaaggaagcctttgctgcgaggtcatttcttcccttgaccacagcagtactatatttgatggctagaagtaggaaccacaagttaattagggctttgcatttggtggttgttggtgctaaagtggtttggtacttgcatatcaaagggtctttgtctgtttggtttggttcttaagcatgaaactttgctggtgtctagtttttggtgttgtgtttggcccaagtagggtgccttgctgcctaatttattatgacctctcttttgttgtgctcctcaacaggtagagtagccaatctctgctccatattttctcttgatgcattgccatttcacctaactaggcatatgcaaaattcacacaccctgattgtgtggactgcacatactttgggagctctggaaattcagtccgttgcattttatatctatgaataataaacaatctcaacacaagaatccacaaattttgacaatttgactctttgcaaaaactaattttacaaaaaaactgtgaccaaaacttatttaaaaatgactcttttgttcagcgcaaaatcgtatggtgctgaattaaacacctcagcgctaaatagcatggcgttgaatgcatgttggcacgccgactcagcctctcatccatggtggcacggccctcagcatcaattgatgtggcgctaaggtgtctaaattcagcgccatacgatttggtgctgaacaaaaggtcatttctgaaataagttttggccgcggtttatttgtaaaattagttttttacaaaggatcaaattgtcaaaatttgtgagaaatcagagggggttgggctaatacgcgaactttcgcgggccgcgatcacagatcagatcacaaattcactttatcgtttagtatcattaccttatgtctctaactctatgcttacgtgcttaattatctgcagaatttgcaagcaactgcatgcacgcatcttgcggctagagatcagaactggagtagcatgcaaccatgcataccgccattaattagcatgtactcacaaactctaaacacaaatttaaactttatacgtacaaacttttgatatggaaactttatatatatacttttcacatggaaactctatatataaaaactttcgatatacaaaatttatacacagatgaatttcaaaatgaaattaaaataaattcaaaaaataaaaactattaaatttcaatttgagccaaaactaggctaaatataaagtagtagactgggtacacattaagaattcccataaatcttcatagtcttatgcgtgcattgtgcagcaaacaacaacaaaaatcacatacttgattagtcctaaaaatcggtgattaaaaaaataaaaactaattacgtttagctatacaaggaaagccactgcatgcattcgaggctccagctgtacgtacgcgttagccttctcagtctttgcatatcaacctgtccgagctgatcgcgaattagagttaacgcgaacgttcgcgtattaggtatttagcgtcggtggcgtctctcctaaccttcgttgagaaatcaataatccacgcgccatttcattggtagcagatctctccttcctcctctgacctctctctccatcgcgcagatccagcaccgcc

SEQ ID NO: 6157 - DNA, 339 bp, Oryza sativa
accttccggtgtkgactctgccctggtgtacaggtcgttgggcctccctcctcggggccgcgctgtaactttcctccgtcaaaggtagcttggccggagagagagagagatccaccgcgcggaggcggcggcggcggcagatggagccgaggtcagacgggggagagagagagagaacgcgaagaggaggcacgcatattggcgtaatacacagataaaccgacggtccagatcatcccctggagtttttttttttgtgagaaaaggcccagcgccggcccagcccgacccagacccaacacagaaaatttcactgctcgcaccacacacccgggcggc

SEQ ID NO: 6158 - DNA, 2000 bp, Oryza sativa
gggcgcacggccatcgccgcgtcgtcggatggggtggctgccatgggcaaccccaccgccgccgccatcacccaagtcctccacaacaagcaggagttccgcctcactgccggcgtygacgacctcctcgtcgtctccatcggctccggctcctccagtgccgccccttccgccaccccgtcctccaggggcctcctgctggggccggtcggcgaggccgacgcggagctcgcggccgcgcaggaggtgsccgtggaggtcgcggcaagcgctgcgggtcgtcccgacggctggcgagggagggagaaacggggcacaccgtcgatgcggcggggccacggcgccgcggctggacccggacgcggaggaggaggagacgaggaggacgccgacaaccaccatggcaacgccgacgaccaccatgctcaccggccgccgcgcgctcgcacgccgccttcgccgcccgccgccgcccgttcttgctactcccctgccgcaaagagaagtaaaaaaagaagagaaaaaaagaaaagggaaagagagagatgacgtggcacgctgacacgtgggtcccacactgactcagctgccatgtagacaaaaccggagtcaaaaccaccgaaggacctcggatgatcggttcccgcgtatctggttttgtggtttgaggatgtttctgtaccccgatgacaagttgagggactttcggtgcactttttccccggtagagtaatgttctggcccatttactctgatcgcctcccacccatcatctctcttaatttccaacaaaggcccaacaaaataatgcgccaaactaacggcccttcagtttaagctcgatatccttcaatagaccgggttctttttcctagtaatgcttttcccctggtagatgtgtattcaaatttaaaatttttattttttagaagcataataaaaaagcatgtacccgtaacacacacataatctcctttatgaacacgcgcacaccctatccctatgagcatatccgaaagactgaaccggtgtattttgagattgacaaaatcatcacagacgctttgctgatatatcttaagattgacaaaatcacaacgtgcgccgcgctgtccgggtatgttgcctgccactgaaataaacaattagtcgaaaatagaagcacgtgcgtcaaatctagtatgtgaaccagaatgggttggttgcaccattaaaaatctaaccggttgagccgtgttatcggacgccaaatgagatcattttacccccttttttttacatattttcaaaacataagttacttcttctattcacttacaaaacacagtacaaacgtaaacgctcatataaatatgcacacaattatgacaaaaagacaaaaagaagaagaagatgagagcacgattattggcgtgacacgcagtttcaacccagaaaggtacgtaaaaaccaccggaggcggagagagccaaaggctgcagcgtgcagccaagtggcggccgcggcccaaggcgcacctcccgttcccattcccgtccccggagacgcgacgcgagcgagcgagacaaaccacctcgtcccgactcccgagccgaaccgcaccgtccgatccgtcccggtctcgctctccccgagcggcgcgcgcgactccaccacgaatccgtcctccctgatcgaaccaccaccgatccgcctacctcgccgctccgatcgctcgcaccgcacgcaatgccgccccggcgccgagcgcaccgccggtcgccgtgagccgcgacgggggagatctcgcgcagccgcacwtccagccaagcgccccacgaggccgaggccgcgcgccgcggcgcacccgacccgccgccctggagccgccgcagcaggaagcggttaarccgtccccgaccaamggccgcatccgctacggttggccctcggcggccgactctactcccggccgatgaccttgccgccgccgccggccctccgccgcggatgccgcgagg

SEQ ID NO: 6159 - DNA, 5 bp, Oryza sativa
gcttg

SEQ ID NO: 6160 - DNA, 2000 bp, Oryza sativa
ttcccgtgtgcacggaaagtttatgtgcatagaatatagaatatgttcccgtgatgcacgggttaactcttcggaaatatctgaagagattgtgtacaccattaattggaactataataaacaattaataatatttagtacctgtaaaaagactaatgatttttttataagaaacaatggaatgaaaattttgctgccacgtactaagattgcaaccacatatgcaagcaaaagaaagggccacaagcaacagaggaaggccattctcattagttagcatgataaatttcctagcacaaatctgcaacgggccagtgaagaatgagcagtatcaacctttttggttaattttagtcaggtcttcctcctgaaaaaagaacaattgaacaatattctagtacaccaaatcccagtagaaaacctgaataaatataagcacaaatctcaaaggaaaagcgagggaattcagtagcatgtccctctcccttgtgtggcttcgtgtatccttctttcccaacttgagaaaaacaaacacccaaagcaggcaaactcaaacgttgattaatgaaagaaaatactaataccatcataatcattggggcactgaacatgatgacaagaatcaaaataaacaacgacaggatccttttccggtttggccagtacatgtcgacccgacaacgaactttgacagcaatatgaatgcctaactttgtaagtatgttctcaatggaagcttctgtggattgcttttacattcaaccaaagaaaagcatacaaggttgttctcccatctgtccatcaaagtagagcataactttcacactagacaatcacaaaaccactgcataagcaattcacttatgcagaaatatatatcagaattgtttagaccattttgaaatgcaaatattttatacgtgttgtagtgcttgagccaaaagaaaatttgtgaagtctaagtgagcataataggtattagtaattagggctttaaatttataatttgctattctggatttggctatgtagaagatcctctccaccacggatttagatctacccaaaaagtattttgttgtgctctaactccacaatatcaataaggtgagagtaggcagaattatggagttgggtcaaggctgcttcttctctataattgtttttttattatgttctaagttttgctcagctcttcatgtttctcataaatttagggcttgtttcatagcactagatttagttgcaaaacaacaacgttacataactaaatttacaattcttaattatgatagtttcagccattgtagtagctatatatgctacaacacctaggatagccgaacatgtcctcatttgttcgatttagctctactgccttctaacatggatttaagattttgggtctatttggtagaacttcaactcctaaatttagctccaggagttagtctggagtagagttgcggagcaggttaaacccagtttcacctctctagtccattttgtgatagcgctctacccagttctgcttccattttaggtgaaacttttgattggactgtagctccagaagagttgaagttggattgtgtcaaacagagtcttagagttgtacctattataattttttttataataaaataactctaagtgtaactaagcttttctttcgatggttttctcgacaggtcgcatataagtgtaaaaccaaccaagcagaaaactgaacatcacatctttacacaccagcagcaagtagcactagcaaccaacgcagccgtgcccaacatttgctcttcgcagacagagagatagctgacggccacacaacacacacctcgcataaaatcccataaaatctctccctctcacgacgcgatccacccgcgcgtcggcccgctcgagcccaattacggcccgagacgcgagcccgtagccgccaagaagaagaaaaacttcacctcgggcggccgccgccgccgccgccgccgcccttg

SEQ ID NO: 6161 - DNA, 2000 bp, Oryza sativa
tttaatttccttagttgccaatctaaatattgaacataatcaaacagataaatgagaaaaagtttaattttcagctctctgattttccttagttttctgatttttttatcaggaaaacacactcagaaagctacctagtacatgatgagacgaatcttgaggaggtaatgttctatcctatactagatagctatattttaggacggagggagtagtagttttttttcctcataatttcaaaagagtagtaccgaaaaataataatttccatcttgtgaagtgggctcaaacttgcaatgtggtttgccgacagaggtatcgtgaggcaggtacggtccaacaagaaaaatattatagtcaaaactgtcttttccatcgttttttttactccatcctgtcaatttacggctccatttcagagtcgatcataacggatgagatcgaaatgacaactttgaggaagcaacatattttaatccagagtgtaaaggctaacgatggatcaaactcaattgtttattgcagtagaaaggaaaatgcatggctaacattctttcacaaaggaccacaaccttttaaaatgatctcgtacgtactggaagtactactgctaacaacattagttgatgacagtactaatctcatgtaattaagagttttccgacttgacctcgatcagttggtcaattatgttaatgaaaaataggacgcctattagtctattaatttagcttgattaagggggtatttggaagagaggggctaacataagtccttcagaggacttatgtccccctaattcttacactcatcagtggatatgatatgagtgaaacaaaagggaagtttgattttctaaaccctatcgtctctgtccattcactagctagaccagcagaagcagctggtgagtgaccaaacacttcacatcctatcatagctccctaccctaaacttgacctctcaatcgccggtcaatcagtgtatttcttcagctgaagatggtgtttgaattttcctgaaaataaagatgaagataaaaattaagtgttttacgtaaaataagatgataataacgtgtgattaattgagttttaattattacaaacttgaaaaatggattaatcttatagtctataacaactttcatatagaaagttttcgcacgaaacgcaccgtttagtagtttgaaaagcgtaccacttttatccaaaaatttatctagtttttattagagagaaaaaaaaagggcctaattctcatcagcattgtctattggtgcagacgtaggagtatttaattttcactccatttttatccattgtccacgactcttgttgggagaaaagcaagagagaatcggagagaaaagttgcacagtacagtaaaggagtgttcctttttgcttactcctaccggactatcacgggcaacgatatgatttttacaaatactttaatacaacatagtactatatggccatattatagtttaatgtttctgacctttattaccattttccaatcgatattgatatattttcgtcaatacaacaaaagataatatcttgtttttctactactctaatgtgaactcatgaactcttaagtatacaatttttatgttcaatgcactaatcatcccaatctcatattactaattatatataaatatgtaccttgcattagtagttgcttagtatacatcaatatttagaaagtgcttctatagaagttaaaatgcctttactgtgaggcaatttttgaaatgctaaataatacctctacaatatgaaattaacaaaatatgctagacatacctctaaagcgtctttaggtaaaagtattctaggtgattttgcaagtgcctctaaaattccagaaattcatataacagagcacaaattctgcaacttccacataagagatcgagcacaaaaatttcacatcacattgcagagcacgaggtgaggatggattcatgctcctgagagagggtgg

SEQ ID NO: 6162 - DNA, 426 bp, Oryza sativa
gccgccgccgccgctacctccgccgtcgccgtcctcgccgctcccgcgccgtccccgtgagccgcgagagagaaaaagcgagagagagagagagagaatagagagagagaggaagaagagaagaggatggcatgcgggtccacaattttttaattwaaaaaacgctgaccggattgccacgttgttcaaaaccgctctgaattggttcgaggggggtaattcgtctgatttgtatagttgggggtgaagaatgtccggttttgtggttcaggagggtaattcggacgaccgcgatagttcgggggggtaattcgtactttttcctttaatgtgagacctacatgtcatactcctcttgctctatcgatcacacattctctctctcactcactcactcttcctctctctcacgcggaggcagcggtg

SEQ ID NO: 6163 - DNA, 2000 bp, Oryza sativa
tcaccacccaagtacccaataaccatgtgggacccataaacagggagactttgcctatttcccaacccccaaggccacagaccctgagaactctagctcaatagacacctagaaagtgactgcaaaagtaacatgatgataatattaggcaataagaacaattattgtgggctttagaatatatacgatgagctatttttcttaaaagatatctgttgcaactcacaggtattatgctagtctatcacagtactacaaatttaagaacttgtcttataaaactacagattgagtgtctccgttatcacaaaactacagttttagccttacccattacacgcattgacacctgatgtttgggacccacctgaagtctcatgaagcgatcagtaattaggtattagatttctgcattttgatgcttctataatcaagtgttagctatatgcgcctacatgcttttgtgttacctctgcacggatgctttgacctgatcagcatgtggatgctttgagtaaatatgtacttctgtagtttccggagactgcaggtgggtcccgcacaaaggtgctggtgcatctaacgggcaaggttaaaccatgtagttttgtgataatggagacactaagtctgcagttttgtgatagattgtacaaagcacatgtagtcttgtgaaatttactcaaataaaaatgtcatcgcaatttttttctgcatgcccagagtctcagagtatcaacagcctactgcattgcccactctatcacatatcaactgaataaacatttcaaaagttgaacatggcccctaagaaaggtgttaatccaaactacaaagtattgaggctcaattcgtggttgttgtgctatattgcactgtgcatatttttcccttttctaaaagttgctgtagaaaaataaatctaaaacggttgtagttttgtttatgaatcaaatgaaagctaaacaaaatatttatcaatctgtcatgactcttttttttattcatatttgcatagcactatatattatcatttgagattagattgaaacagaagacagtttacaagcaccaaaatgtataaaagcagttgaaccaaaactcatagtccactgcaatgccaaacagaacctgaatcaaagcaatctctatgtgactgcctagaaacataaagtattaaaaacacaggcaccgtttattagggataaagaattagtactctattgttgcatatatcgaaaattacagctcacaatgcctgcacattcgtgccagtatcacggctatcaacacaaacaacgttaaataactaggtacgacttccgttgttacaatgtcaactaaggcctgtgtatcaaatagtattataggaatttttagacagtggaattcaagatagttatgtacaaactagcctataagcagcagtgcactgacacaatgaccttacaaatacgtgtgaagtgtgaaattcccagtgggacttcagtgtgcatgactagatggccttgtgtttacaggtcacttgcttgtctgacttgcacataatttgagttgtttaacaaagataagcatcacttattaaatgtctgtttacatctggataatttcattctttatggaagtcattgatggaccaatgtaatcgaccacaaaaaatagttgcagttcgatccctcatcacgaacatccatgaagaggaaaatcagcatttgatgaaaagtaaacagatcaatgtggcaggactgcataaagctagcaattctccagatgctttataactatgtacatatttcataattgagttcaactagtaatttcacctacaagaactgcactgtgtggcgaccaaaaacctctagaccataactgagcacatatttcataattgagttcatctagtaatttacctacaagaactgcactgcatggtggctaaaaccctctaaaccataagctttcaacttgcttaaggccaggtgagttcgtcagaagccacc

SEQ ID NO: 6164 - DNA, 2000 bp, Oryza sativa
cgagaagagccgtattaaacaaagggaagctaagacgcagtttcctttacctctgagcatacggtacgtacacatgccaagcttggcaccggaagcaccgccggtgccatcttccattgacagaaatgacgccgacaactctcatgtgcctagacatttgcaaagccagaaacgaacctgatcaaaatgccttttactaatccaaatcacagcagcatgaatcgatgcgatctcacacatataaaaaaacagtagccattaactagaggaggtaggaaatacgtacatcgagaaattacggcccatgtgccatgttaatttggttaatactgcaagcccctgcaagctgcaagcttcacggtcttctacacagacatgtggttaaaataaaatggcacactgactgtaagtggagtcaacgcaagatctgtaagaatgacaaactggcaagtgaaaaatactggcatcctgcgccaaattccagaagatggaatgaagaaatgctgatccatgaataagatgcagagatgtatgtagcttttgtcagagattgtagaaacacatgaaaagaattgataaattgatgcgatcactcaccagatgcttggtgtaatttcagtggtatagttttctttttacttgaattcagtagtataatttgtccagcaattaatcaaagccccaacaacttcagtgattaattccatacttcattagtatcattaccatcctggagaacaaaaatgtatatgagaattatatttattcagaaaatacagataaaaatcagacaacttaaacatgagtggtacggcaggatgcagtaagcgcaaaagatttgtttcaatttgggaaaaatacaaaagcaaacatcagatttaactcaaacaagtgctatgttgacatttttacgatcatttaaagcaaatccagttgactttgtcccaagacaacatttgagcttctcaaagtacggatatgtgatgaacttgtactaagatgtaccgttataaatttgcaaattgtttatagcacaagttctggggttttgttcccatgagcatccatgaaaaaagaatatgagtgcacagccgcacatagggcttagtctgaaacttggaggtctgaatttactggtggaattttggtatgcatcacctcgtaatccacaactgacttaccctttctgacttgcagatcaatttgtctatggaagaacagttcaccgcgtcacttgcattagttgggtttctagaccagagtgtcggtctacacaaaaaccatcagatcaatcaaattaatccaccagtcaggagtaactcctttgaaagattcctctgaggaacgactgatatctattggagctgcacaaacctgacaataatgagggactgagttgaacaacagcaaatcattggtaactgttccgaaggcattgactggaaacaacttgtaactgcatatcatttttgtgtacttccagcctttcacaacctagtagatgtcatataacatgagaaaccagcaagcaagattagatgccttatagctgaactaataattaccttttatgtggatctagtgacagattgcaccacaatggccaaagggatcctaaaactcttttgtcatcataacataagccttcagcaacttgcttgagaaccaccttagcttgtcagaagaccccgtgggacggctcgcagatttggagccaagatccgaaccctagaaccagttagtcaacttgatcaccattctggctttaatggaagccactttcatcaccattttttacacaacttattcagcagccagacgattctcttcagtttcttacatcttccaagaatcaaagtcactggcaagctagatattgtttagttgtttagacgcgctcgcacaaccaagtctcccttcacctcagtctataaagggcacaccatttgagacacagcacacccactcactctgctcactctcccataccaccaaaagcc

SEQ ID NO: 6165 - DNA, 2000 bp, Oryza sativa
gataataaaaaaatgtgggggagccactccctttctcgttattgatagatcggtctctatatcacctttctgggttcctcagtttcagtgagagcagttacaatagcgagctatatgagctactacattagatttacgctgatattctgagttggagagagaatatgagaggggaacgaaacaggctacaagtcaataacttgcttcaacatgaactctaagaagatttatacaagaaatwaaaagaaaataatattaatgatgtactccctccatctacttttgatagtcatatttccaaatctgaaaaatttatttttgattggcatatttcaatccaacaacttatcatcttaatggctttcttggatttaatgcgtgactcttcattcttacacacaagattggctacatgggcatcgagaaatataaatattaatgaatcatttgtttacgaggaatgactagaagcatatttaaatggatgataagtagaatcacttatctttgatctgtatgctaagatgaaatatgactatcaaaaaaaaatagatgtagggagtaatatacatacatagctcgttagtgtatcagtagactgttatattgacttaaatgatagggcaataaatataaccatatcatctctattattagccttgctctaatatctactctctttgtttcatattgtaagtcgatttgacttttttcctagtaaatcttttaatttgacaaagtttatagaaaaatatagcagtattttcgacaccaaataaacatatattaccaaaatatattaaatgtttgttttagtaaattaattaatttgatatcctagatgttgctatttttttaaaacttattcaaacataaaaaggtgatcggagtatatacaaaagaaataaatacaaaagaaataaaacttcacaaaattagctaaacaaaaagcaatttgccggtgggctatccttacaaacaagctggaccttttatttcggagtccagatgagttaaatgagagggtaacaatcaacgctcatcgctcatctatttctttgtagtacaacgcaggcgctcacaagtcacgtccactcatccctgtaaacatatacacacaccttactggtaagtacctttaattgattgggcccgtataccttgaggttgacgaagtaactgtgaccatctcgctattgacaggtatactattattaaaacaataattaatcgtaaatacgagcacccatcgctttcgataggtacatcatctatcactaaaaaaataattatccgtaaataagagtattgtgtcttctagaacttaaaccgaataaattggttccaccgctgaaaacctaatcagttgggctagctacggtcgcttcaccaacagtcatctattattgtaacagataataatttagtctttgcttcaaatatgctagcacctactccttgcagttaataatcgtatttctattagtgagctaggacggctctcttcctcccttcacaatcaataacaaccaatctcgtactccctccgcttcatattataagttgtttgatttttttcctaattaaactttttttaagttttatcaaatatatagaaaaatttagcaatatctataacaccaaatttgttcaattaaaactaacatttaatatattttagtaatatgtttgttttgcattgaaaatattgctatatttttctataaccttaatcaaacttaaaaatgtttgactaataaaaaaagagcggtataaaacggatggagtatatactttctttggatgaaaattatacagatttgtgaaattttacacgatagttaagcaagtatgtggaattaaatggaaaatgattgtaattagcggatagaataaagtatttaaagaaattaaagcggagatcattgtgattagccttaaccaattataaccatcacggcaacaatctttataattgtatcgtggaggcagcaatcatg

SEQ ID NO: 6166 - DNA, 2000 bp, Oryza sativa
catttctaacaaatatgcaggtcagcccctagagtcattcaaataattacaccccaacccatgatcccacatgtcagctatcaaatgtttctcctctctaccatcgaattgatgacattggcggctcaacattgccatcctagctaaccttatttccgtcactctccaatctcatgccattggctcctgatcccccctactccctctcccttatcttcctgcaaaccggatcaccatcggcaacgaggtcctaggcggagggcgacaagatcgagcttctgcctcatttcctccgtttgccactattggcgcagatcggtgatggcttggacctctccagtgatggtgcctgcgacaagcttcctccccaccacgcaactcatgaaccttgactccttgagctcaccggattcagccttgtgctcaccggatccgtgcgaggacgataaggtgaggagcagatgacgacctcgatgaccttgacggcgtgttctttttgcttatctcttagaccacaagtctaatctcaaacaaccatctctcctaaaatcactgttacctatgcagattcctctatcatcctgcgaaacaactccaaactttcaatgtgacaacctagttggaacttaaaatcttagacatgaggcaccgcgttatacatggcctagggtaaattttcagacctctccaatggaggaaccttgccgagaaattaaagcaacaatctcctccccaacgccggcaagagcattggaatgcgtttttttcgcgtagctgttcacatggttacaacttacaactcctgttcggttgaaaaaacacgggaaatcttctccaagatcaatgatggatccaatcatccaatatacaaacggactgatttggccatggatggaccatttaccgtgcattccatttgtgggaaactcacaaaaggtctcatcagcttcttatccagaacttggcccaggattggaaactcgtcaaggattttttttttcaaaaaataaagattatactcgtgcgagtccccgtcagaatacctgaggccgtgcagcgggcaggcccaatccgccccgtccgtgctccccgcacgagcgaatctaggggctgccacgtggctcgcacgcgcacgtgcctgggccccacctggtgctctcatttaccacgtgcgggccccaccgtaccggccctaatcccaaattcccagtttaacgagaagcctgatgaccactccaccaactgggccccacatgtcagtcgcccagacaaaataatcatgtcacttaatccgttcactaaatacgcataatccggtacaggccccggccccgcgtgtcagtgaggagttactcctgcgccagcgcccgcaataaaagttataaaaccctaggggttcttgcggcgggggagatctgggccgtcgattcgtggatccgacggcgccggtgctccgagggctcgtgcttatcactccgccgtctccttcctcgggcagtcgggttcccccctccggactgctgcttaccgtgtgctctcccccattcccccactccccccttccgcgagcaggttcgaggtttcggtggccgaaaatggcggaatcgccggctgatcggagcccaatctgagcctggacgcgcagataccgcgccttcctggcccgatctctcgaaaccccttgaaaaatccgagccgaaatggcggcmaccgccccgatcgggcttgcgaagcgcgattcggtggtgctctgscctgggggtctcgcgagctgcacttattgtgactgaaagtgtggtcggctctttgctggttggtgtgggcttgggtcgcggagagagtaaaggtgcgtgtgtgttcgccgcgagggtgcgattcttcctacgcgcttgccatttttggggggattttatggcgtgttcattttgtgcgattttggtgatttgtggtgtagggtttgtggcatgatcagcgctagcgctgtggcgatgcgtggggag

SEQ ID NO: 6167 - DNA, 2000 bp, Oryza sativa
ccacgccgaaacccggacacccaatccgccgcaacggctcgcaaccgcgttcccaccgcgggcactgacacctgggccccacccgcagtgacacgtcgacgcggcgccctcgtctcgtgtgatccacacgactccagaatcacgtctaattacttattaattaattgatttaattaaattaatccgaaccctgcgagattatggagcgggattattaaagaaagtgccatgtggatatttggaaggcgtggcggcatgtgcccctttatttaagcggccacgcaaaaataaaccaaccgcgtcgtcgtcctcctccaccttcccctccctcagcctcgtcgtcgtcccccccaaaaaaacgcgaagagagagagaaagcgagatagagagagagagagagaatcctccggtgaggaaaagtcccgtgcccttctcgcctcgcaggttggtgcgcccctctcctcgttcatcttcttcccccagatccgatcggcggtggcggtggcggtggcggtggccgatctgagccatccgccaccgcgggttcgtcgggtggttggcttgattttttttatttttttgggggtttttttggggggagggggttattgggagatcgggatgggtgtggttggatctgtgattgttgttgttgttgttgataggggttgcttgcttgcgatttgattgtgtgttcggaggttgaccttatggttatcgattttgctgtgatttgattgcttccaaatttgctgcgatttgatttgattctaagatgtagtcatgtaggggagatgattttttttttttwactttttgagccaatcagcatagggaggagtgggagacatagaattctctcgcttatgaggaaaattggatgtggcatgttgctcccagccttatctcaatcgtgtgaacctccatgagaggtgagggaagctacgccaacgattgatacacggtttctgtgtgctttgcctttgcgcggagattgataaaggattaaagggatcaacctttcttgccgtgcatggcaaatcagcgattgattatattctggggggaagcgccatgggatttcttgataaagcctcgtaaaaaaaaaaargggggaaaagggtcagccgccttttgggatattaggggattgcgggaagctagagagaggtttcttgggattgtaggcacatccggatgggatgaattgaggacgtaggttgcttccgcggtttgcataagttatcgtggagtgaacaatccagcaaagtctatgatttgtctgaggctgtgagcaatatagatggacgaacgatgaggtagaagaacattggttctgcctaatgatctgctcatatagcagaacgattgtagcgcggagtttcaggtatttcgtcactgctgattttgctctgcaggaatcaaaagcagagaagaccgttggtttctatgtgtttcccattgtagtgttttaagaattgctcagcttttggagggatactactataatactaggacatagcctctcgggagaatcatataacctgctgtttttcaatgtttgaaatcggctacctaacattgccatctccatctgcttgcgaacacaatccttagctgtatgaaattatgaaattttatcaattccctggtttgatggtctcttgaatttggttggctagaacaatatttattagaattttgttaacctgggatgtatccagtgacacatttggctgtcctactgcgcaatgctgatacatgctatatcttttgcaaattaatttgagagctgaaacaataaaaaacagattatatcacctaattaaatgaaactgaaaatggtacagatccttttcatgataccgatccctagttcccccacccatttgcagcctgttttcttgcatatggtgttttacttatttcctattctaaaaatgtaattttcatccacatttactcataatttgttttgcacgtacagcctgccggtagca

SEQ ID NO: 6168 - DNA, 2000 bp, Oryza sativa
agcagttttgggctatcttgttgatagtttgtgcaattttttgacagggaaagccaacccatacttcggattttttccaagctgtaatgggatgttaaatgttcatttccattacatatcttttcctgtaatccagtgacatctattttatggtgaagtgttgccttgaggatgatgggatagaggaagaagaaattgctaaggagaagatattgttgttgctgccaagtgcccaagttacagaaactaatgttgatctggtcacagagaaaattcaagatgatgttttttttttttgcaagattcaacatatgtttgtactacactcactaatatgctgtggtgtatacacaagttgtacttataagagatttgtgaattaatatattgtgatttttttcttatagtacttatgagtttttcttgtccaaatggaacctatataagatcgtagtgtaaattattaattacaaattggcaagtaagtaatatgtatttggtaaatgtgaacagtatcttccagttgcatcctattgctcacttacaacagttatttatgtcgttaccaacgcttatgtatgtatggctatagatcgtagcaacgtatagaccttagcaacgccggcataggcaacacatagtcaatgtgttgctattggaccttacaacgcttatttagacctttagccacacatatattcgctgctagaggggggttcctcttgtagtgttccggcgaaaagaaaatctacagaagcacagattctcgcgtcgcctagcgactagcgagactgctaagctagagtggttggccttaatcaaatactgctactgtccaacttgcggttcggctcatgtgattggtcgtcgcgtgttcattcgcgcacgagttcaatacttgtattactgcactgatcagttctagatgcatacatggttggtatttggcatctctgaaaattggacttaggattggatttacgttagacttgtgagggcattgaattgaacatgtagagacagacgagaggaaggagtagttgcgttggcgcctaatccgtttgtcgacagaaggaaataagcagcaaatatatagaatgttcaaatgcaggttctaacgcttgggaaacttctgtgtttggtcaactcgtctttcttaatgggtgatggaaaatatcttaaccgtgtcagcaacacggcaacttctctagaatctagattcccatgcaaaaatgaactattttttctactctaaacaaatctgaagccctcgaccacataaacaggtctgaataatataaccttaaatctgatgaaatcgatctttgctcactgtaatctgctcactaacctgaatacagtgatgcacgcaaaggcaaaaaagtataaataaaaagccagaaaagtcagaagcatctgtcatcatggcctcatgggtgccaatggatgatgcagatctgggacagatgagacgacaattgggcaataatgcccaactccaactccatgtagagaaggaaatttcgaacggaggtcgctttctatatttctcttgtcctcttcttctccccttcgtcctcgctaccatcgccctattaatattcctcaaaatccaaatttgagacaacccgaattcagtcctcagcgagtcggaaacgcgccgaaagacgaactggaggcgcccccccaaatcttgagatcgcaggtaatgtccataggcgccgagcttcatgagtcctcctgcgagggatcttgtcttgaggtttcttgcatattggcctgtgcattttgagttttgatgtgcttgctgctgatccgaattccatctccgttgttgccgtaagattctgaatcgaattcatgcatttgtacggcagatttttttttcccccggctagatccgtatggtgtggttatttgggcgatgatagtatgggtccaagaaacgcggttttccctgtgaattgaggatctccaatttgcttctttggcttcggtcc

SEQ ID NO: 6169 - DNA, 612 bp, Oryza sativa
cacgggctgcacgcccttgcacccgttgccaccaccaccgccttctccgccgcgccgcctcctctcgcgtctcccgctcgtgcagggcgcgcgtcgtcgggcgagctgctgccgtctccgtggccgtggctgatcaggtgagaattgagaaaggttgtgagttttcgcgtggttgtctggttgattcgatcgtgccggcgcgccttggcatggcaggcaagattgtatcaggagataatgaaaaaacatacactgggctttctttttcttaatttctttgcattctttgcttcgacggctatggttgcttgaactgttcaggcggcgcctttgtgtatacacgtgcttgtatgtgatgctctggtcatttctttttgcagaactagttggcgttcgatcggaaagtcgctgtcttttggcgactcggtgagaatttgcgccgcggttcaatgtgaaaaattttggcccgtggcgagttggatttggcgccgagtccattcaggtggttaagacttgttcgtgggagagcgaagctgcgcgcgttaagaccgggctccgttcttgcatcgtgcagagcagctgctggtttgagaattgagaggcgcggttgac

SEQ ID NO: 6170 - DNA, 2000 bp, Oryza sativa
aaagagattcgttaaaatgccatttttcaccccgtggctacaagctataatgctatccgagaccaaattgcccttgccttcctctatcccccatcttctcttccaactccggctatccctgttttcctcatcctctggcgcggcggtgcagatggggaaaaggcagcaccgagcacgtgcgttggctggcggcggtggtgcaaatgggggaaagaatgctgcgacgcagatagggggagaaggcagcgacgtgcgtgtgcttcaggcggcggcggcgcagatggggaagaagggagcggcgcacgtgtgcatcactggtggcagtagcacagatgtgaagaagacggtggcggcgcagatggggaagaaggaagcaactacacatgcctaggtaagaagaaggagaacgagggtaatttggtcccgtatagcattgtagcttgtagtcatgagttgatattggcattttaacaaatcccttttgcggagtggcatttcggtgaaacctagttttggcaatggcagaatgtccaatttctataatatgacatgctgagatagctaaaacgcatgtcattgaggccttatcttttcgctcatgcttatcagcggaaactaaaatttgattgattttaggtttttttatcatcgtttattttcccgtttttttgcttttaaatcattaagaatacgtatataaaagttttattttaaattattttttatttataaatatgtcgcttgacttagttcctgaaataagacaaacgatcgggctgtgaagttgtatgtaatgaaagcaaatcaagtagggctatcactacagtagtaccaaaagtaaaggagaaaccgtacataatttgaaagaaagagaaagtcagaaaaccacataattatgcatggctctcgctgcaacttggtccgtgacccacacgagtcctattaaaaaaaaatcaaaacagcagtagttgagcttatttaaaaggggagattttcttttccttttcatttcgagtccacatacgtttggaggcacagaaaaaggraaaaaaagaaaagaaaaacaaaaagtcagaacatctgcacttgatttcttattcacgcaactccattaaagtctaaccattgacttttttcccctgcccgctcttacacggcacgtctcattcaaatatgaactctcgcacagtgaggaatcccaaattgagaaggaaaaaaaatgaaaacaaatttctttttcctctgacttgtagctctacaactacgcgtcgttttctttattatttattcgtgtataaaaacttttccttttttaawttttgccaaaaaaaaaaaactggtcacgaataatcgtctcctaaaaaaaaaaagtctctagtctcagcgcgataattctcccgcgaactgcgcactgaccccgcgtgaccaattgacatgtcggccacccaacaagtgggcccacctgtcagtgactgtgggatcagggagcgtctggttcgctcggtacgcgtagcgcgatgcggtcgcttgtctcgtagttggaaccaactagcccccgtgaccccacaacgcgtcggattctgattgggcgagacccacctcgtggccactgttgcatggtcaactttcccacccatccgagccgtccatcccatccaacggcgcgtacggatccaccgcctgacgccggtggcgccggtcgacgatccatcccgaccgtccgatcgggctcgcgcgttgactataaccggtccacgccgtgaccgccaccggctgctcccggtgaccgcgtcgcgtcgttttataaccccgactacgttagcctcctcccacttcttcttcttcttcttccccccatttctcacttactccggcgatcaccgtggttgagcgtcggcggcggaggaggaggcgatgattaccatggatctgatgggtgggtacgggcgggtggacgagcaggtggccatccaggagagcggcggcggcgggctaagggg

SEQ ID NO: 6171 - DNA, 2000 bp, Oryza sativa
aaaaattaagatagaatctactctacatcttaataaaaaaaaaggaaccatattgccacgtataatgctcgtgttttaggaagatgggaatatgttgcttgtacttgtagtactgtactccctacggtcgaaaataagtgatgttagagtacagtacgatgggcaccccctgaattcaggcaatggtacgttgctgctggtagtgagcacgcttgacagtatcatgtactatgcattagtagcagcaattacgtttcggtgattagtgatgttgccagatcatcatgtacagtacttactggccttttcagttacaggtgtacacttgcacaaggattcagggagagagagacagagaccatcagaccaccgacctctgcactccccaaatatcccttcgtcctctcgtgtgaccaaagaaatcaagaaaagttcagtatccacgccggcgccggtgccatggaaaggaccaaatggatggttctaattaggcatcaagtgcagcacattaattaattctccatatcatccctgttttgattaattagcaaccaaatgggcttttatcacgggaggaaaagggtcccgaatcacaccagacagccattgaatggagttttggccaactcaaaagggtggccgtaaacaagtgcatgctagctagagaataattttgtgtacacatggccacaggtaatcacgtacacatgggcacagccgaattgtcaattataatcatatagatgtagtttgttggcgtttccctttctcatcacacacaaacaaataattaataatttatggcaatcatatatacatatatattcagccgaggttatttttgttttctactgatcatgcatccagctgcttgatattccaattcatttttatgagactttttggtagaaccttgggggaaaaaatgatactcctacttgatcagctaaactgagcttctcttttaagtaatggatgttttgtttagccgttgatactgcagatcatgggaacaccctagcctctaagccatgttaattactaattagagcatccccttttgaaaaataatattctagtgttttcttttcaatgtctgagaccgtgaccaaatcagtgcgccagatttcttggttgcttcatctagaagaggtaaattaaagagtgagaaagatcaagtcaatatatacaatgacatggaggacaaggatttgatgattttgatcctacataaaaagagaattttgcccaagccaattattgctcaaacacagtgggagaaaaaaaaagaagagctgaaaaattttcatgacttgatgggggtaggaccagcttggttgaaattagagattgattgagacttctcttctaatcaacccagccacacgtcaattttttgcccctttgtgtccagtttgttagggtctacttagccccactatatgcttggccacacactagtgagtagtaacaaacttttatatgcatgccgccatcgatatcacatgcagatcttctaaactaacctctactctagccaggtttattctcatcactggtaaaggcaggggactagactgctgaaatgctaactgtacattgactatactaaaccccatacgaattttgagactaggggttggccagtctagagcatgtattgaacaaatttctactaatatttattagttgttgggattagtattaactcgtgagcattgcatttccagagtgaatttcataaattttctgtgcaagaatggtattaatgtgaaactcgtgtattgcaacgtttgctccttttcttctgctatagagcatatctatccattacaaaattcaaaacaccttttctttgtgttgtaatcttttcccttcaattttgaaatatgattctttctgttatgttgagatgtgcggaaaaaaaaaatctttgctcatgtgccaaacctgatcagagcgaccaacccctttttcccgcgcccttttttgcgtgacac

SEQ ID NO: 6172 - DNA, 2000 bp, Oryza sativa
cgtttaaattgggcgttgtttcatcttatataaaaacaatgtttcaacaaatagcgaaagaatgtttcagttcactgcaacattagatctatacatagtgaaacattgtgagtacacgaggtgaaacattttgggtggaacaaaaaaatgaaacgaattcccttaatagagggtttccaaaatatgttggtgatttgttgtaaaagaatgtttcgttcactgcaacattagatctatacatagtaaaatattgtgagtatactaggtgaaacatttttggtggaacaaaaaataaaacaaattcccttaacagagggtttccaaaatatgtgggtgatttgttgcaaaagaatatcttaattcactgcaacattagatctatacatagtgaaactttgtgaatacactgagtgaaatatttttttgagacacgtggtgaggctaggggaacgtgcgcatgtggggggtggagcgccgatcctgctccacccccgtcgatcgcccgggcttgagcattttcctttattatatcataatatgcttggttctaaaagtatattatagtagagatgactagaactcgaaatcatgcgcaaaatttgttggaaagagtccttttttttttttaagtatagcttccaaaattatatttcggacacggtgtgattccataaaggatatgttcatgaatgaatttatggttttttctcattaaacgcgaaccatatagtgcaaaaatgtccatgatacacttgttctggtatttattgcataatgtggctataccttatatattaattaattaatttgtactcattactctgttcaacgcttacgtctgaagatagacaacgacgcgagtatgatacactctcattaaagcttttaatttggtcttttgtccacattgtgggctaaaagaaatcagcaactctacttttcaactttgtgcttgtaaaaataacaaactttgtgcttgcgttgtttttggttagctcaattctttttatatgaacttcatgtaacacctgaaattccatttacaaataacttatatatatagaaagttagagcaaccatgtgttcagtttgttactagctagtagctaatagcctatgcgttgcaacgaactttctaatagaagaaagggttgtcaatactagtaagtcgattacacatgtaacaccaaaacaatcaacacttctaggatttctatgatttttctattatacaaacattcattagtcacatgtccttgatataatgcaacgagttataattgtatatacaatttatataaaaagacatgactaattaaatgggcttactactaggtgggtggtggtggtagaaccatgaccaccactaccttcttttaatgtagtatagaatttggctcggatttaagttagtcatagatttttagtcctcatgtgaaaaaaaatgcttacaaaccatagactggaattttttgaaacaaaatatgttatttgtgtaaatatcggatagatatattagtggtttttctaacatgtgaaataaaatatatacaatacaatatataatcaacgacacacaaacaattataagttttatctaggatatttccactacatagcaccagccacacccacaacgctagcccttcgctctttttccttgaaggttaaccaaaagaaaaaaaaaacccacatcactccacgcggcaaaaaaaactcacacaaccgcaacacacaagcagcagaggatgcagtgcagtccgttcactgacacgtgggccccamagacccccgggtccacgtgccartgagcagccytgaagccctgggagatgatytccacgggcaagcagcagcagcagcgcccggttactcctycactgcggccgttttctacaaatccccccctataaataccccaattcaccaacgccccttcttcttctccaactccctcccctcaagaagcgaacaagccagaactcctccaactcgcctca

SEQ ID NO: 6173 - DNA, 2000 bp, Oryza sativa
gcttatggcagttgatgtatggtagtcctctatggcttggttgcgcgagcatatcacatattttggggatggtgatggatggggatgtcctgaaatttctcagccgcgtgaacgttgccctacgctaggacacttcactagcagcatggcatccatgccttcgccaagatacaagtggcttcgtgggagcacgatagtggcttacgtagacgagaatcttctagctggatggacactcgtttctatgcatcctcgtcatctatccgtgaacagtgtaatcacacgctagcacagtgacataaaacccacctgatgatgttctcaatacatccctctcgctgcatgtgattcctatgaggaaaagggattaccgttgcttcaacaattttacccgccgtatttgtagacaatgtagattgtaacggttgcctggcaggctgccaccatgtaaaaaaggattattattcttatttatttagagtgtcagttctacggtaagagatggtttgctatttgctaagacttgatactactacttgtaatatactccctccatccctaaatatttgacgccgttgacttttttaaatatgtttgaccgttcatcttattcaaaaacttttgtgacatgtgtaaaattatatgtatacataaaagcatatttaacaataaattaaatgataggaaaagaattaataattacttaattttttttaataagacgaacagtcaaacatttttaaaaaaagtcaatggcgtcaaacattttgggatggagggagtaatacacagtagaacctatacttcaataaaaagattatctttagtaccctctactttaattcacacattttagatcctctctcattttacatcgctgtcgctgctgcctgtgattcctgcgaggaaagggtgggggacagggggagtgactagcgtggttgctacagcgctacacgttcgcgttttgcacgcggaaccgcccccacctttctccctttccccttcctccatcagcagcagcagcacgggcctgaccgtgaccgtcccccacgtcgtcctccccacacacgcgacgccagtacgccactgccagcgcgaaacaagcaacacacgcattcctcctcccgattcgctcgcggccgcaccgcaccgcagctctcctcctcctcctcccccacccaaacccacggcggcagattcgatctcgaattctcgaactctctcgatcgaaccctgtgccctctgctccccgcaaaatcctccgcatttgatgagtagtcctatcactcttcttcctccccgcgcaaatcctcgccgccacttggatgccagggagctccacctcgccgccgaccaccaccaccacccttctctcctccgctccccgccgcggcgcctaggccgctgccgccgccgatgggctaggagaggagagggatcgccgcctccctgcgatcgccaccgggggagccggaccctctccgcgagatctggttaattgatttgcctactaccagtattccgctagattctggaccgattcctctctgttgatgcaaccactgtacagttgttgctttccttgatgatcagaaggagctggcgatttcggaggtgaatgcgttgtttcatatgggtttgcagcttatgctacaacagctatctccgatttagtttattacctttggggagcgtagagattggattccgctttgcgttttcctctttcctgcgagattctagcttatccttcgattaaacctattcgcgcggctattagcgcaagtggttaggacggacgcagactaaaaaaggttaggttattagggatttggttttccatttggattgccgattgcgggagcatatcctattgggagattccggcactgtaaagatatccttggcaactgagttgatttaatgttaatgttagtggtggtggggagggcagataatacgcattctgatctgcctgtcaagttgggggagaagag

SEQ ID NO: 6174 - DNA, 2000 bp, Oryza sativa
gcgaacggttcactagtccgatccgttcgtctccagtaaggtaaagaaaaacttgaaaactatggcggatcgctctcgatcgcgtcgcgccttgcaccgttgcgagatcagtggctgctgaagtccgcgacgcacgacggcgagccggccacgacgaccgcggccgagacgcgcagcacgacgcggcacctcatcgccacgcgcaccgcgcgccgcccgtacaggccgcccagcacgctcaccctgccgtccacggcggtgtggctcgccagccgcacctcgccgcggccgaacagcacctccccgaccacggccgcgcccaccctgtcgacgaacacgtccatgccgacccgcacccggctcgtgccccgcgccgcmacctcccccggcggcgcgttccccagcccgacgtactccggcacgccgtcgacgtagaactccgtggtgctcgtgccgaacctcatggactcgtagttggggttcttgatcacgatgcccgcgacgagcgtcacgttgatccgcagcggccgggaggcctccgtgccgaaccccacatggaagcgctccaccgtgacggagtccatggacagggtgggatccctcaccttgagcacggtgagcgacaggaccagcatcgccacggcggccaccgcggcgaccacgcccagggcgcagcacgcgcgccgcagcagccggctgccgtggccgtgctgctccgccggcttagcgatctcgacgtcagcatcgccgtcgatggctttggccttggccttggccttcaccttggcggcgtcaaagacgaggtcgacatgatctttggctttgggtttcttgggctcgggttccgccatgaatcgatcgtgtttgtggtgtgtgggcgtggcgttggccgagtcggcagcattttgcaatttgcggggccttgcggaatgcaaagccaaaagggggttaggcgttgggggggaagagttattaaggcggggtccgtgtcgcagcggcaaatgcaacagtttggtttggtagttggggagttcggggtcgctgtttgggaacgtcgggcttaaattcggtcagtgcgtgacacggacagacgcctcccgcgatgtaactgccaacggccacggcctgacgttaaacgcgtatggtatgggccaggctcgttttctagtcgcttacgggctgagcctttttaggagttcctctagttactgggctgaaatgtaacgtctgtcgagtatgcggggccgtcggcaggacatggcatcgcgaagcccaacatcacggaaccactagtgtcgcggtcatcatatcacatgccatcgatcgcttcgctcctcttatcgccgttgacttttctagagtggtagaaaagcggttggatccaacttccagcacaaagtactaacacattttacacgaaacgagcttttccagatctaataataatagtactagtactggtagtagttgtagtagcatctcgcacagttttatacgaccacgtcagttcgtctgcggcgtagtgcagagatgggatcgccgatcagtgagcgattcggtgcaggcaactgataaggagggaggatctctccgccgactcagcaccgtccgtttcgggacgtggtgccgttttggccccgcgccgaagcttctcccctttgcagttatcaaattccccttgcagccacgcagatttacgccgcgcccccacgcaacccaaaagttcagcgtaaacttgcctatcaacaaaactacagctcaggcggccacgcgaaatccgaggtttcacgtaccaaaagcgcaaaaatccactcggattccacgcggccgagccactgcacgtgggcgcccacgacgcgcccccgtatcgatcggcaccgcgctttcctcctcctgatcttacccgctactatatcatcatctgcttgctttccccccgagagtccacggcctcctgctcctctcgatccaagataatttcactccagcgtgcgtcggcc

SEQ ID NO: 6175 - DNA, 2000 bp, Oryza sativa
cccgtcttcgacagctccctaccgccagatccaccactactagccaccgcctcctaatcacaagctccgattttcctagccgtcatcactagcccaccgcccaccatctccgcgactttggtgccaccaccaccgtctcgccgcccacccgtgaccatcgcccaccgcaaggccgccgcctcccacagccatcccttcaagccagacgatttcccttcttcccccttgccccacaactctcccacccctaccctaacccgggactctaaaccctaactccactacctttgtcagtgttgccggagttggagaggaaggtgttatcagagctgtaggagaagagtaggggtcgctcgagcacgaatcgtgaagcaaatcccaaggtcagtaatatgcatgattttggccaaaaaaaatttgtcaccaaccattttagccatctcgatatataattgaggacaactagagcacgggatactgtccggacaggatactttatggaggttgacatcatcccacgcatctgcttcctccttgcaagtctagtgtcatcccccccccacacacacacactccacatgcccactccctccgtgtcttgagccagcacctgcagcggcataggcaaagacactagtgacaacggcaacaacaaggaatgagggtcgggttgaggggaaaggagaagaagagaggaggcactgtgcttgatacatgataccttgcaggtaccagctatcaagtccgatacatgtggtaccagccatgataccttaggtaccaggcttggtacctacgtgtactgggtctgatatttgggttttagaagtataccacatgtatcaggcatgatacaccgtacgacgtacctggacatactccggcgaggagcatgatggctcaccatcacacctatgccactgaaggctctagatctagaagcttcagtgatcacacccttccatcatcatcgacaacgcgtctagaaggaggaggccgaggcgctcactgcggtcaacattcttcccgacggcctcactttttcctagttggcccctggccataatggaagctagaagaatgctagatccagtgagtgctgccatgcctcaaaagcatgagatggaggaagaggccacgagactggtgccacccaccatcgttgttgccagcgtgtagtcgagctggatccaacagtgggaaggacctaggcctctagatccgttttcgggagcctgctccagcataccaccactgccatgcctgcacagagaaactctatgtggagaggaggaggaggaggaggaggaggatgaccaagactcgagagaaagaaatggataagactgaaccgttaaccacttatctcatcttgatagaatactatcaaatagtttttctgtatataattacatgagcccaaaataaattcactgggttatagtatgaagggaataaaaaatatttttcttatttaatttactaaaaaaatgcccgtgcgttggaacgggtgaagctattttaattttattattgttgtacaatttagttaaggtraaatctactgtgagaattatattggatatatatttttctagaaaaacatgagctacaattaggagttcgatcatctcaagttagcatgcgagttttcttaaagggatttcttatacgactccttccatctttccaaaagtaaacgaacttaaaacccgactaaaatacggatctatatttttaaaagcgaacgaacttaaaaacacactcatacacgggtgacgtaccaaagtactggcaaaaacatcttcatttttataatagtagagatatacaatataaagtgatgtatccttggagaaaagatctggtagcaaaggaatcatcatctgtgctatataaagggggaggagaggagaggtgcagctgtgcagcctggtgagatcgctcgagactaacaagcaaactaacgtagttgctagctagctctagctatctcggca

SEQ ID NO: 6176 - DNA, 2000 bp, Oryza sativa
tttatgtggtccaaaattatgaccagaagaaagtttttttttgtaatacaaatttaataacatcaattttatgtcacaaacattatgtattaatggagtaattattagtcaaaaccttgtcctaacaaaataaaatatgccctataaaaagaggagggagtataggtggctaatccaaagacacccaataagtggaatgtactaccttcacacataaaaatcaacagggcagtttgcttcctctagagtgtctcatcagatgcttagattttcttacccatcataatctttaagtgacataatttccagaacataaagttcttaagaagacctctctaatccttagaacttgaatttttgactccatgaaaaggagtctaaatccttgactaatagttcctataaatgttatattcatattcggtgcgctctttccatgtatccgaaagttttgtaagtttgacacattcatagtgctgaaaaaggctacctagcatgggtcggggggatacaattccaccttcttttttttccccgaacacgcgaaagatgtgcgcgtcactataggaatacaattccacttgccattgcaacatattttggcaccattttatgcagacatgagtgctgcacctgtttagcttgtgactgaatgcaaggtgtgccactgtaaatcatcatcttatgataggtaaacttacacattgaaattgatattaagccacggttattttcaattaattcttttagatgatggaggctttcagaattcaaccatttacaccaagttgacacaaaagcaccgagcacattctaattaattttatgctcattcaatttagagcagcaaatttgtgtaaaatttagtattaaaccttacattttattacctcaatcccatgtacaaatctcaggcaggaggagaaaccttttgaggcttggtttagttatcaactttttcttcaaactttcaacttttccatcacatcaagactttcctacacacacaaactttcaacttttctatcacatcgttccaatttcaatcaaacttctaattttagtgtgaactaaacacaccctctgagtatgataccgacgaccaggaaacagtccagatcagagaggggcaaatgcaaaccaatcagaaataattctgaaccccacaggctcaagtcaacatgctttagctaaggagatgagatgaatcgcagcagcagagggaggaggaaaggggggagtactaagcaagcagcattgatgcctccattactcccctgtttaatactctcttcttgggaggttggaggagatcacaggacagcctgtgcctgtgcctgtgctgctgtggcatttcttcagagaagactgtgagatatcaccacaaataaaattcccactactgtagtatgaaaactttgggacacattcagatacattccgatgaaaccagaagtagtttctctcaattttatcacatcaaataccgatcgtgctagagtataagtgaattgtccgtcttaagctttgggttaaactggttggtacatgtaactcaatagatcaaacgaagcatgctaattctagtagagaacttcccttcagaaaatgttgtggcaaaagttttataatgggagaaactgtatattgtgtgacagtttagttagtacagttgctctttttccccggatgagtgagtgatgactagcaagtaacaaggcctgtttagttcgcgaaaagaaaatttttgggtatcacatcgaacgtttgaccggatgttagagggggttttcggacacgaataaaaaaactaatttcataactcgcttggaaaccgcgagacgaatcttttgagcctaattaatccgtcgttagcacatgtaggttactgtaacacttatagctatcatggattaattaggctcaaaagattcgtcttgcgatttcctccttaactgtgcaattaattttttaatttatctatatttaatactctatgc

SEQ ID NO: 6177 - DNA, 2000 bp, Oryza sativa
atttgatttattgttaaatatacttttatgtatacatatagttttacacatttcataaaattttttgaataagacgaatggtcaaacatgtttaaaaaagtcaactgtgtcaaacatttagggaaggagggagtaataattcctaatgccttgttcattgcctatttgaggacaatgcagtcagctgtatcagtgtaatgtgtactagtctcgagtgaacctggaaatatgcttctgaatgcaacttggcatgcttgagttgagagctctctgtgtgtttgtctattaaggttgtccctatatattatgtttgtggtgggtgcgacgacaagcctaagatcagtgttttagctgacagaattaaccaagaaagccttgctgcaatgcgaggtcattgctcccttgatcacaggaggttaagcgttagacatcttcattggagaaatgtggtttatctttcgcggctgctttttggtgctagcctgctaggctagtagaaaccacaagttaaaggtttgcaatttgtggttattggtggtaaagtggtttggtacttgcatatcaagggtctctgtcagtttggtttggttcttaagcatgaaactttgctggtgtctagtttttggtgttgtgtttggcccaagtagggtggcttcgctgcctaattatgacctcttctttgttgtgcctcaacaggtagagtagccaatctctgctccatattttctcttgatgcattgccatttcacctaggcaaatgcaaaattcacacaccctgattgtttggtccacacatactttgggaggtgtgcgtgcctggaaatacaaggtgtgcgagcaagtttaataggatacgggctccaattcattaatagccaatttattagctcatttatacaatagttatctataagtatatactacaccattaatatatgatctcatctctcatacatacacaacgtattggagtccgtgctacagctgtctacaaatctgtagccactttccttctctctcttctcttctctcctccgtatgtgcatacagttgttgacttgtagtctgctattgtactcgcttttatatgtatggacaataaacaatcaacacaagaatcagaatgatccaactttgttgtgtgtattcagctgataagtttatgccttgtttagttggcaaattttttttccttgcgtgtcacatcagataaacagacacacatttgaagtattaaacgtagactaattacccaaccaattacatattcctctaggaaactgggagacgaatttattaagcctaattaattcatcattagcaaatatttattgtagcactatattgttaaatcatgacgcaattaggcttaaaagattcgtctcgcaatttacacgcaatatgtgcaattggtttttttcgtctacatttaatactccatacatgtgttcaaacattcgatgtgacaggtgaaaaattttgtttttggaactaaacaacaccttagagcaggtacaatagcaggctataaaccagctgcaaacatattttaaggagataaatgaggagagagaagggcagcgggctacagatttgtagccagctgtagcacggactctaagacgcagtgtgcgtatgataggggaccaagtattaatagtgtagtatgtaactattgtatggatgggctattagattggctatagatgaattggagctagtagttagctatactattaaacttgctcttaggcgtgcaaaatggtacattaaaaaaatatattaaaagcgtagcaaaagggcaaaatggtaaagtgatgctgacccgttgacttgtcaggttggccgttcgtgggctcgtggcgtctctcctaaccttcgatttcgatttattagttgagaaatcaccacccacaccctccccacacccacccccgccatttcttgagatttccttcctctctctctcgcgcgcgcaccccggcagatccagcatcgcc

SEQ ID NO: 6178 - DNA, 2000 bp, Oryza sativa
ctactcgagatcgaccatgcatgtacaacacgccaatcgtatggatgcacacgttgcttgttatacaagtctcacctcgtctctatacttcacacaagtgtacttctatatatggtgatttgctcataaccttattagcttctctgtggatatatagacctgaaatatgtctgtacaagttcaatctgcaatttctttttgaagaacgaaaacaaactgcaaagtttcataacctgataaacttaagcgaattaattttgcccctgataaaaacctatatgagaatcacaattcctatgtgtaaactgtttgagctcttcttttactatttctctgtagcatagtggttgcagtgacctgagtagtaccccaaggttctgagttcaaatcttcataggagtagatttcatattgggttgtttgcggggctaaatttctaatttaaatgtaccccaagatcctgagttcaagcctccatagaaagtgaatttcaaattggattgtttgtggggctaggttcctaatttaaatggccatatatatctagttagatgtagaggccgggtaaaaaataccattctctaaaaaaaaaaagaaatgtactatctccgttctctcaaaaggatgcatgacgtcctgcaatggttacagtcaaatctcaaaatattaaattattaatggataaaaatatcactatttaaaatatggaaattatattagtagttttgtcaataaaaactcttgcatatagttatttttttatatttttataataaatatatagtttgagaaagtaatgataaaacatatgcaatggaaggtatgtcgatgtccaaaacattacccttttgaaaatttgaggtagtactatctcatcttcgataatttataatctaagaagcggtcaatctgctaatttgatgatcaccagtttcaccaccatggcaccatgctgcacttaacaacaaaaagaaatccacgtagaacaatgtcttgtgactacaactgtcactgacatacagtccgagcagacacctgaaatgcaaatttcaacagtagaatcagtcagctgatttaaatataaacaggggtaagaatttaagcagctaaaaagcgatacaaaccctaattaactatactctactaattaagctacccaaccatctgacatggtttactacttcagaaggcagctccccaattcattaaaaaaaccactagtaatttaattatagcaaattttgctacgctacttcgtggttctatatgtaagacaccacacgaagtaaattttaagaaaaaaaatactctataaatatgattatttactagatgtacaatatcgtttagtgttaccataaaaataccaggagcaatttggtcacaccatgttataaagcaggtcctatcttgtatcctagaaacactaaattaatgtatgcaatgtccattggtaaataactcagagtatattctcctaaaaattactctatgttgtgttttgtagttaaacccacgaagtctagatgtaccgcaacagaatttgcatttaattaatcaaatgaaacgagaacattgtgtttctttttttggttttttgcctgtaatagtatacgggtatacggtacgcccggaactagtcagacaaacgattcgcgaccgtcactccgcacgctccgaacccccgcgaccagaaaccgtacccgccttctcccgcaccgggccccaccatagtccacgtcacctgctcagcgctctcccattggtgggtgcgaatagtccacagcagcatgcggggtcgcagcccgccagtcaaacctcgagggagctttgaccagtcaacggtcaaacgttcaaaggtctatataatgatcaccggaggcgtcgtcgttggaagaagcagtagccacacccacacgcacacccgatcgatcctggcatcctactctgctcgatcgaatcgctagctttcttcttcttcttcttctcctccgtctccg

SEQ ID NO: 6179 - DNA, 2000 bp, Oryza sativa
ttgcttgctggcccagtgaatgatgaatctctggaaggaatctcacgcagctgctgcgtgtgaaagtgtaaagggaagaggaatcttcgtcagccaatcgatctggatttcttgcagggctcgcaaaccgtggtgttctggggttcgtctgctgatggcaacaccgacgacgacaggaaccccaacgctgacaggatcgaacacatctccctcccccggcacgatttgtccctctgttcgtccgatcggtgtcaggaggaaagagtacgagcatcatatcgtaccacggccggccggcgacggcggttgcacggcgccccgtccgtacgacccagccagcttccatgacaacgtatatagcgacatggacacctttgaaaacatttctcgtccaaccgtgccgtgtcgtgtcttattctggatatgttcaaattcgtagtattatgacgtatttcgtactagttaatttaatttgggaagaaaggagtagcccgttagtccgtgtgtttaartwkkgcgttttcgtggtgagattagtgttttttttttggaggattttatgaaatagggtcatagtttgtaagtgatgtcaaatgaatcgtagcatatatcgatctgkccttaracttgttcaacaatatcccttcacattttaatggaaggagtatgcattttagcaattataccgatggttaatttggtttaaacttgaaagatacgtatatgtattattaggaagttagagtcaattacagtgacgtgttgctaatgctcgccaaggcatgacttcaattaggtgtgctagtcttgtgagttactaccgtgcatttactgtgaactactggccaccaactctggttgttgtgcatcatcggtcactacacatcagccagacactcacacatggcatacatgcatatatctaggcaacacgtcggaaaacaaacagatcatccgtagcaactatatgtaaatggtacatcagccaagaacatgatgctaactataacacatgttagccatattaatctaccatacacgtgccacacatgaaaccgtcctatatatgttagctacattaattgtactatgttgtgaaggtaatcaaaccaaaatcaccaatagcaaagttaaccactacccccaccatccaattctctaatcatccgtagaaaaaaagaatacatgtgaaatgatcatgatcaataggtgtttacctacaacatcttcgcttgtgcataaaacctacacatatagattgttaacggcttatattacccactactatatcattaaataaaatatgtaattgaaaggacatgtagcttagtggttgcagttcaaatctctataggatcaaattttagattgtcttatttgatggctaagttctatgtttaataagctaagttcctaatttaaaaagtctgcatatatctgattggatgtatggtccgggtaaaaaaaatacccatctctaaaaaaataaaaataaataaaaaatgtatagggccttttttataaatttttgctctacatactacctatatttttaagaaaaataaaaatatacaaaactttttaaatctttttattccggattcgtcaccgatgatcttcgtacgtaagcaatattttttgggccgtgacagagctcagtccatatggctcacacccatgccacgcccacgccggcggtggaccgttttttacgcacaagaaaaaaaccggcaaggagttgacttttcttccccggcgttgaccaaaaggagctcgtcaacgtggccaccctcctggccgtcgatctccatctgcacggcctccgatgcacccctccccccaccgctcgccgcccctcgaccacgacgtgtcccgatgacgtgtcgccgccgtcgagctatatatatactcgcctcgcgagctcggctagcttctcaggtaggccacgaactccatagattttttttttgtttctctttgcttcgatcgcttcgttctcc

SEQ ID NO: 6180 - DNA, 2000 bp, Oryza sativa
ccgtggtggaaatggagcaacatacgatccaaaaaaattcctaatcaaagttactccttaaaaaacaaaaaattcctaatcatttgttttttcctatgaaacaaatttaattctatgaaaaactaattaaacttactcctgaaaagctagtatcacttttttccctataataatccagatccctctcctgcaccgtgattgaaatgcattaaaaaaaaatccccaaccactcgtgatagattttaagaatggaaacatttcctcatatctccatagctaacatttccaatctaaccatcccaasggcaccgaacgaaacaatcggggaaaatcccagatcagatcaggggaggcaaggagacgggggaaccctmacctgacctcggatctagtggtgggcggcgccggcggcgccctgcctctcgagctcctcgaggtgggcgaggtggcggcgctccttggggaggttgatgaggtaggagaaggccatgaggcgtagatgacgtggaagagcggctccggcgagctggtctcgatgtacttgtcgatgtagcggtcgacggcctggtcgctgctcttcttcacgttctcccagctcagccgcggcttcaggtaccccggcacctcccgcaccttcatcccccggatctcgctgatcagggctcgcagcgccatggatggatctctccgatctcgatctctcctcttccccttcctcgcaacgtcagggctcgcggctagggtttggtggcttccgagacgggaggaggaggaggaagggtgggtgggtggtcaagggatggatttgttcgctacggggtggggatgggttgggctgggctaggctgggccgacctgggcttgtgtgacagacatgtgtagaggctcactgtttcggaaaaggaaaatgtataccgaaggtccctcaacttgtcattgagttataaaatcgtccctcgaccttaaaaccggatacaacgcatctctcaacttacaaatccagtgcaagttccctcggtggtttttgactccgattttattcgacgtgtcagctgactcagatggtcggtaggatgtcctccttccttcaggcgaggaatgcattgacctcaagcataggatggcgaggtcgggctcggcctcctcctcaggcagcattgaaaatattgctgaagaccgaatttcaacgcaaaaatatcataaccgacaaattcggtctcagtctcggtctcggtcctaaccgaaatttagcaacattttcattaatgaaatttttcggttctaatatttttgcgttgaaattcggggttcacctttcaaaaaccgaaatgaccgaaagaccgaagaccgagaccacaaatttcggtctaaccaaatgcccacccctacttgtcgaagctcttgctaccggcaaggagaggagtagggtgcggggactagggttacgacggctgtggggtggcttcactgatgaagataaaactagcatgtggagagagatgggaaagaaagaagatgggagaacggaggaagaagatggaactaaaatgtgggtcccacgtctagtcgtctaggggtattttggtctgtatgataaccgaaaatgtgaccgktaatggtatgattttaattttgtgcgaattcgaatgacatgaatacgactagatgaattaaataaaataaaatttacctgagtgggcatatttccaatcaacccaaaaataaaattgcaaacacgcggattgcgagcgcgcgcacgagctaggaaagggagggagttggggagcttagctcgcgcgcggcgcggtggatcgcatgcgcgggcgggctaaaattagcgggagagggaggagttgatcggaaaaagggaggccgcgtcgcattgcgtcgtcgtcgtcgtcgtcgtcgttgtcgtccgtagcgggagggagggagagagtacgtgcgggcgtccggaggtctcagcgcacgcccgcggccgggccgtcgcgccgatcgcg

SEQ ID NO: 6181 - DNA, 2000 bp, Oryza sativa
ctgttttattgccattattgaatcccttttgcactatgctggaactggaagatgctgaagctggagagtggctagacaaagctatgtccagtacagatacagtgcacattggcatattactgtgtttcttgtctggaacgcagcagcctgtacttatttgactcgatccatgtgaatggtttccacagaaattccaagctttattaacatttggggccaatcaataatgtccaactcaaatcaacggatcaaccttataatattttaatatattattacattgtgatccctgttgtaagtgtgtgcagagttttaaatttgtcaatgttgtcttctcctaaactcctacttgtttggctggattctccttttgcaatatactttatttatttcaacctaaaattctcccttttctttgttggttatattctatttccaaaacagaacaaaacaatgttgtttctgacgtgtacaactcctacagattagcgataaaacgagtgttgttttgacttttgacactttgagcatgagtatattagagttggtttctctattaattaagttctaagttaacatccggtgtagtgtttcaaatcatacgatgatccatcgtccacggcaaggcatgcatatgcctgaaattgaacagtccaaaacagaggtcaataaccgcagcttcgtgggggcacgacaagtctgtgaaatattctaagggcaaaaacaatgagcctagcattatcatttattgaggacaatttgagcataaaaatgttatccactattggagacacatagaataaaaaaagagaggcaaatttggcaaaactgcatttaatagtaactagttcatggtagagtgaaatattcccgcaatgcctcgtttgttcacaatatttatccgcggtacaatgtgtacataaaatttgggcaattaatacatgatgtactttacccgcacaaagtattcaattagatatatagagagataacacttcgataaaccaaaaactccgaggatttgccaatccgttctaccattaattaatcctttcatatgcgtatgacgtgggttttggtcgcgtgttattataaacaacaaatgctagatttcatcttcaactactactacgtacaagggagagtggaatgtcaaatcataaaaatccctgcaataaccacattctcctatgttgttttgtgcacaaacacaatggatcaatattgccatgtgaaagaatatctgggcagtcaataaaaaaaatgtatacactactatagcacatcagatgatctgaccaagaggagaagaagaagagagaggatcccaaccccaccacctctcctcctcctcctctctctctctccgatctgcctygccgccgccgcggctgctcttctcctctcgcctcgcctcgtgcgcgcggcgagttcgacctcctcctcctcctctccgagcccccgctcccctggctgcgggcggggggtttcgagggggtggacgcggcctccgtgtcggcttcggctcggatcgaattcaaaggtatcgctcgagctctcgctgctcttacggcggcgcttgatgagcaccgcggcgtagattgtgagatccatcgggagttgggattgatttccttccttttccaatcagtttaccccggatttattttattaatttgatgatacgtgatggtttagtattattgatagcagtttgtttccaatattgattcgacgagggttctgctcaaccctatattccccacgttaggtccggctccttgcgccggtattcacagctaattgtattatgacacttagagtgtgatttgtggattaatactttgttgagtgtgattggtggattaatacaatgaataaccttgcatttgcagaagaggttggaaaccttggtggtgtagttagtgccaccgcccctgtctggagtggcatgtagttttcgcaaggctttgkttatgawtttgkcgaatggcgaggag

SEQ ID NO: 6182 - DNA, 1529 bp, Oryza sativa
tcaatttttctggatggatcagatttggatttaggtactgctggattcaacacatgtcattgtcttaaagtaaattgagtttaagtatcatggtttgacttgcttgatcacaggtgttgggtgctgagagatacagacaactacttatgcttatttatttggtagtctccaaaaaaccgtcacatgattattaaaaaactttcaaatgtaattgtactataattagttgtaacataatttatatataacttaaatatatatgagtgcttagcgacttaaaaacaaatgcaaaaaaactatattaaaagaacatcaagatcaacttcaaacacaaattttaaaatttaaatttcaacaacggcttataaaccatagtgcaaacgataagaccctatatcaaatcagtactaccaaataatacctctgttttatcactcaatttactttaagcatgatttatatcttatacatttacataaaattttagaattagatgaatgttcaaacatatatttaaaagtcaactgtgttgtatattaaaaaaccgagtgagtactcgagtatacaagtactccttccgtcccatttcaagtataaccatggtttttcacgtctaactttgatcgtctatcttatttgaaatttttttaaaaaatttaaaaacataagttatgagtaaagtactattcatattgtatcaactcatagcaacaaaaatactaagatcaaagttragcgtggaaacccatggttacacctaaaatgaggcagatgtagtataataccatttgtcactaactcggttccaaaatacggtcttgtttagttcccaaaataaaaacctttcacccatcacatcaaatgtttgaacacatgcatggagtattaaatgtggacaaaataaaaaatcaattatacggtttacgtgtaaattgcgagacgaatcttttaagcctaattgcgccatgatttgacaatatggtgctacagtaaatatatgctaattatagtttaattaggcttaataaatttacagttttctggcgaaatctgtaatttgttttgttattagactatgtgtttatgtgataaataaatccaaaatttttcatcaactaaacaaggcctacattgacctgtcacagaatcttcagagaaggaaaaacaaaaatcgcagcaaaatcggcctccatttggaaagggaaaccccgttgctttcagagcagcaaccaaaaaaccagccggcctgagctcagctgccatttccgacatcgcggcgggcgaggagcagcagctgtgcggttcacactgcctccgtggtcccggtccacgacgcatccacccatttaaaccccacctcccctctcctccgcctctcgccatcgccatcgacgacgacgacgacgagctcgcctccccttcccttccctccacggcgcgccgcctccgcgacaggtcaccctcttcccttccatccaaacgagctcggatttaggatggactcggacgacgaggcggcggctgcggcc

SEQ ID NO: 6183 - DNA, 2000 bp, Oryza sativa
gttaacttgccgtcgctgttcatactgtaggtgatcccaatcctcggaacactaattgtatatgctccttccctaatattaacatactactaaatacaactacctctactacaggatgtaagtcattttaccctacatcgacttacaattttagcagagatatcgctgttattgacgacggtcgaccaactatgaatagttagttactccatttgtccaaaatgtaaggtaaggtatttcgattttttgattgtactgtttgaccattcattttatttaattttttttgaaattattattattatttttgacttactttattatccaaagtattttaaacacaactttttattttttatatttacacaaaattttaaaataagataaatggtcaaacagagtaaaatgttaaaatcccttatattataggacagagggagtagtttcttatcggttctattgaaaaaaatggaagtagccatagaaaaaaataaaaataaaaaagggagcgtgaaaaccaaataaatcgaaagtgttgtgttcggaaagagatcataaagttataaacttaataggaaagtaaatattatcatggttacaacgtgatatctctctgtatttaaaacaatagactaggttagacagttgacgccacttttacctataccataaatataactttattccaccaataatcaaataaagctcatatattcaatttaacacgtgtctgctaaaacagatacaatcaacgtttacactttcgatttcgatggaaatttcggtgattgtcggcagttctcgtaccatttttttgaaattttgacagattttgaccggagttaaataaactttgaccaacttcaacaaaaagaaattgagagaatccgaaaattttggtcgatgcattgatttgccggtgaggtcttcccaaatttagaaccgaaattgcaatcaccggatgcaattgtgactattccacgaactcttcgtggctaaggcctggtttagttgaggaaatttttttaagtttgattatcacattggatacagagacatatttaaagtattaaacgtaatctaataacaaaacaaattacagattctaccaagaaactacgagacgaatttattaagtctaaataatccgtcattagcaaatatttactgtagcaccatattgtcaaatcatggcataattaggcttaaaagattcatctcgtaatttacacacaaactatataattgtttttttatatttaatactccatatgtgtgtctaaacattcgaggtgaccgcgtgattttttttaactaaacagggcctaagcagcagcagctagttagagcatgtacagtagtagactgtaacccactataaatatattttagagaaataaaagaagatagagaaaagcagtggactatagatctatagccagctgtaacacaaactccaaaacgtaatatgtgtatgataggtgggatcagctattaataatatagcaagtactattatatgaattggttattacattagttatagaagatttgaagctactagttagctatattattaaacttgctcttacaatcagttacgagtagtatagtagcccatagctaagctaggtgtcaggcgaggcgcgcaggattttattacagcggcgagcgagcgcgacggcggcggcgggtaggtcgctcgccccgccgccgccacatgtgtggccaccgcacgcgccgccgccgcccccgcttccgctttgcacctacctaatccacctctcttcccatcccacgggcgcgccgacgtggcggcacccaccgcytctcccgcgcgcgccaacgccaacgcgagaccaacaccaaccaacccaacctaaccaaaaactaagttggcgcctttcccttccctccccgcctatataatcccctcctcatccacccgccgtgcgccacccacgacgacgacgactcgccgccggccgagaccaacagcg

SEQ ID NO: 6184 - DNA, 2000 bp, Oryza sativa
cacaaacaaacccatggttccattcagcctgcacgaagggcccgatcctgacaatggcgtacatctccttctcctggatcagcttgaagaacttgatcaaatcatacctcccttcaaaattgtacttagaaacaaattaaacagccattcatttagacacgatttaattagatggatgaaatcaaatgcaaattgagcaatgtgtgaggaggggatgaggtactgacgacgccctgctcgggctcatggccgttccagaagacgtagctctcgatgacgttgaggccgccctccttggccttgctgatgaggtcgggccacgtgtccggcgggctccgcgggtagtggatggagccggagaagaagatctcccggtggccgtcgatgatcagcgaccggcggtcgtaggtgatgacggtcccgttcttggtcagctcgtagcccgacgccgccgcggcgagcgctgcgacggcgagcggcgacgacggcgagcaccgcggccgcggacatgtcatgcaaggaaggaaggacgagcaaggagggcggtggcgagcgcgcgtgaaagaaaccaaaggcttggtggtggcgctgctgctactcctaaagaaggaggtggtggtggaaggagtggccgcgcgggaacgaagggcatccgtccgtacggccatggccgctgtcaaaacggcgcgcggtcgcacgcggatttggcgcgcggtggtgcaagatcgagaggagcctaattttggaaggaactgacagggatgccatgcaactgcagcaaattagtgctcgttcaaatatgatcaagttagatttaactatgaatctgtatgaatggtttgtgagcacaaaccaaatcagtttggaagatgaacaggtaaggcagttgctggattgcagcggtccagtaatctgtactccctccgtattttaatgtatgacaccgttaactttttaacaaacgtttgatctttcgtcttattcaaaaaatttatgtaattattatttattttatttgtgatttgatttatcatcaaatgttctttaagcatgacataagtatttttgtatttgcataaaaaatttgaataagacgaatggttaaacgttggttaaaaagtcaacgacgtcatatattaaaatacggagggagtagtaatttggattgccattgataagattttttttttggttttgcacactgagtccaaaataagtattgcatggaatatttaaatccaaccatgaatcgacgatacaattcaagtaaatgatctgcgaacaaaaatcaaatcagtttaaagagatcctcttattcagagtatatacctcggtgttaaaagtgaagaagaaaagcgaaaggatatgtagcctaatgtttaccagagcctcagtggcatcttaggtcctgggtttgacgtacccgttgacagcgagacacctgtagtgacttcattaatctccatgatgaatttgctggcccaatcttcaaagatgatcataggggtagagtttgcgtgcgtgtcagcgtgtgtttataggagtgagtgtgtgtgttgtgagtgtctatgttgtactgtgtaattctaaaaaaagtgaagaagaaaaggtgtaagacataaaacaaaacaaaacaaaacaatattttttwatttcaaacaaacaaaagagaaaataatatttgagagaaaataaaaggggacgtgtcaaaaagtaaataaagaaggtgaaggaaaaaaaattgacaatgagggcccacacgccttaatacagtcatggcagtaggtgtaaaactacagtaacagcagacgacgactcgagggggcggagcaaccaatcgctgcctccccgcgttatctcttctcccccacacgcacagtagccagtgagtactagtcacaccacacgcttggcttgacgccgcacgcctccgctccgctccgccgccgcggccgatctctctagggcttccaacctcgccggcgacgcgacgccacgcc

SEQ ID NO: 6185 - DNA, 2000 bp, Oryza sativa
tactacgtccacggctacaacgccccggtgatcggctcctaccccaaccacgccttcacccacatcgtcgacgaccacgccctcgccttcttccacgacgacaacgtccacgcctgctccatcatgtgacctaaaatataatcttatttaaaatcctacatgccagcgacagatacatatctgaccaaatcgaacaagctaagtgacctaattagtggtgcaaaataagagatgaaaaaccaaatctaacttcgtcgatcatctagtaatggtcaagtagttgctcagcaatccaacgtgcaaagagtgtggtgatatgatagacaaattaacgaataggaattaaggtcgaactaagcttatcaatcgacaagttgttcttaattaattgcactatgcgaccctttttcttatgaacatgaattaaaaggaagggagcagtagaactggattgctaattaacccgctatccttttgaattgactattcgacgggcatctgcatggtatcgatgcttgctgttgacagcacaaggggaagaaaagggtggccctgaaaattttcaactgttgatgctagctagcggctgatctcgctgaggtatctgtgccagtaatttttgtctgcggataggacaacatggagaggatgactaggaaaaggagcactgttcaaactatccaaatgtctccaaccaaaagtgatgacccatccttgcatatgtgcgcatcagtgcatatgttcttatgctggtgtggggtgaagattctggtgtgaggggcaaacggtgacaacggaaaagaaggttcgaatataccctgttccctgattacaaatacagttatgagttctgaccattggattgtatacatatgacaaaaagagagtaaacttcagttcacacatcagaccaaattgagtacaggtgctaccagtatttggctttcgaagatattttacattgggacagcgagaggagtaagttcagttcacacatcagaccaagtttgatgcagctgctcaatgctctgtttgttcgttttgtcagggaatatgggctaacagtgacccaatctggattggattcctatcaataaataaacaaataaatctggattggattgtggaaatgataagaacacgcgtgcaatttgatccactttttatgcgatcaatttgggaggaaatgctctttcgtttcgctctcacaaacctgtgaacaatttccaccctctgaactttcagcattgttcttgtattccccacttcctgaagttcttaattctgtcaccaaacgacttggcatgcagaacaattcagtccctcacgagatacagaacaagaagatatattatcttataccccatgggccaggtaggtacaccagcaacaatgcaaatgccgtcgcatcgcatctcagatacttatgcccactaagcttgaaccattatgttaacttggattaggggtaggctagagattgcattggggcttatatgataacactacatatacacataaaccacaaaatcaagctatcaacattcctcatctcgttgatgccgacttatatctgccctgatagcgcctaattaacccgtgaacaacgtgtcttttcatcgtccaagtgcccaaccaacacatgacaaaagcaaaacgagtaaataaatttatttagctgccaataaacaaaggaaactggacctgcccgtgtcgaatcaaatgctaataactcgaatctggaacaaaattaacgccaaaaacaacacaaaaaacgactctttttttttctccaaactcgactcggctttgagagttctaatcttagccaggctccaccccaacctgtgctgccctgttcgagcgaagaacgaaagcgacacgagccgtccatataaatccacgccgtcgccgccgaatctcgcgaaaaagctcgcaaatttctactcggggaagaagaagagccctctccaaaggatctcctcgcccggccggcggcg

SEQ ID NO: 6186 - DNA, 2000 bp, Oryza sativa
gggtcgtgaaggggtgaacgagattgggcaggatacggtgcgggtgcggcgtgacgtggggtgggctggggttggtggagtcgtgggctttttgcagttttgcacgcacgtttcctttcctctctccctctggcggggaccggaccacacacgtacggaggaggataccctcgtacacggtagtacaacatacgtccataccactcatcctgccagtgctggtagttctctatcaatataggccatgtttagtttctctccaccaacttcgaacttttaactttccatcacatcaaaaactttcgtacgtaaatgaacttttaactccttttttttaaactaccaactttctttaaacttcctggtagtaaaactttatgaaagggtatgtatcttaatggttacagtgacctgaacagcaccctaagatcccgagttgaaatcttcttatgagcaaatttcatattgggttatttgagtgttgatttttttaaaaaaaaaggttacctacacgtgaatcatcgaatttggaatattggaataaaaaatacccaacaaaaactaatacaggccttcaccctcatacatcaaatagcttgttctaaaaatatatcatcacaggtggcgagcaagtagaagataatgttggcaataacacactgagagtgagataggaatcaacttcatttctagaagcaacgagcgtgcgagtctaataatatatgtaggaaccaggaccaaacaatcgataataagcgttatagttcaactacactttattttacatagtgtccaccaccatttgaaaacttataaactttatacaaattggttcattttatcgacaaacggaaaaatcatctacacttcaaattctcagtggaaccatcaatcgaccgtagtgggaactggatcctcttatatagctgctcgctaagtcagagggacatcggatgcaccagcgacatccgttccacatcggtcgatataacaagcaagacggatgaccatgctcgtgtctggcccccagcaaaaattaagacgacccatttgaataaagagtttattttagaagccatagccaccaatagctcgttgtcgctcaccgtctcaggtgaagcttgcagaagccatgactgctgacagttcgttaccgcttgccgtcttctccggcgtaggcgtggttggagcggatccccgaggaagcccctcccctccatggtgccctccttcccatcccttgcacccatgtcccttgccggcgccctcctccccatactttcgccaccacctacattaaagctctaccatttactaacgagaaagaggcaaatacttagatatacattttcgttattaaatcagttgtttattctttatggtggattttgatcaataggttaagacttgcacatatattagattgcgtaagttcccctgagacagcgagcaacaacgagctataggcaattatagcttttacaataagctctttcatcaaatgtgatgtctcggttttattggtatgagtcaaacacgagctcgttcggctatctaactcgttatccaatacgaaacggaaatcgctggtatattacgtcagaggatccgattccgctatagtgacacatgtcggtgaacatagcacatacctgagattgagaggaattgaaggcatcatcacagctgacacagccatttgcccgaggaaacaggtcgtcgcgtcccaacccaacgacacctgcaaacacaagtccaccgagagacgagacgccttycgcctttcttctcccaacgctttcccttcttccctcccaatcccaatccctcccaagaacgctccccccgtgtcctcctcgatcccaatcctctcctcgcttggccctcctcgtgctcgcggatcgacccacccaacccagctgatgatttgctccggccgccttctcatgcttccttttgcctgatttgttagggaggctggaagccaaaaggcagcggca

SEQ ID NO: 6187 - DNA, 2000 bp, Oryza sativa
ttgcttccaggtgagattagtattttgctaggtagatccagaatccagattctctctacctgtcatttctaggtacggtactcttgcgttgcgagtactccaaccgtagtagtagtattgtacatttgtacacccagtcaccaacccacagcattaaccagtcaacaaacaatttggcaccgtttccgagtttcaaactctgtaaaattcctctgaatctttgctgaaatgttctgcgagaaaattgctgttgacctgttgttgtgctccaacatccaaacaggggtctgatctgatcccaaaggcaccagcaaagatgtagtggtggtgctaatgtgcttttttgtgggtggctgcattacttttgtgccacacatgcatatgcactctgataccaaaggtagatgtatattcaatcaaaggtatccctcttttggattattttctagattattgcaactttaccacattatttcgaaaaaaatctaaacaaatagatttaggccctgttctttttaaattattcaccggattattaaaaccggtaatttgctctacacttcggaaaacacgtttttctaaaaagaacttacttctattctatttgctaagtttatttttcaaaatatttaatgtatccctataatcaaaccgataatccgtgataataatctgttcaataatttatcttaaacagggcctaagcataacacaaagcataaacagcatccaattcaaacggatcaagacttaaataatcccaaatctagaaacctaagaagagcccatgactacctcgaaaggtagaaactttcaagggacccaggtgcaaaaaaaaagcacacgccaaaaattgattacttaaatccaaatccctcctccagttttgaagcccatcacggcagcaagaggcgactccctcccagcacttaacccaaccaattagtgccacttccagcttaattaatccatttgtttatatctccctcctcctcctcctctctctctctctctctctctctacgactcccacctccacctccgccatcccaatccgatctcccgcgagctccagatccacctcccgggtcgccgccgagctcgccgcggccacctcctcgccggaatcggccgctcgcgagctccagcccggtgcccgttttcgcgccattcgtgcgtgcgagctagcgagctaagctccaagagctgcgcctcctgcgctgcggtgaggtgcggcgctgtgtgagtcctctcgcattgggcttctggttgctcggatagcttgggtaattcttctccgtgcgtgatttagcttgattttttttggtggttccgattttttacgtgagcctctttttggtaaggattgtggcttaggctgtgtgatttagcgtgggcgtggttggtgcttgtggtggcgaagctgtggattggatcgagttggaaatggcgttctgggttagcgaattggatcgggatgatttggtcgtagtttgactttttccgcgagccgccaccatggacttgagcaacgctgcctgcccctgtggaaatcacctgatttcaacgcgtagatcacctgtttccaaccaattgcaaccgccagcttttgctagattcatcgagcagtttagaaatctccaaagtatgggagctggtagctcgcatcacagctggtcatagctgaatcgcgtactagacgcatcaagatttgtgcaaaaacaatcattggccaaatggaatgttgtttgtgattgtgcggctgaattctgtcccttatctaggagctttcttgattccttgattaatgttgtgcttacttgcaattgcaggaaggtgtcaccttgttagttccctcaaatttcattgggccctggtgtagtaacttcacatcataattaccagagtttgattactttgatggtggtaacttctagatgatctgaacatatggagaggagatagaagtgtcttgagtgttgcagtaggacagcaaggac

SEQ ID NO: 6188 - DNA, 2000 bp, Oryza sativa
attatctttagagaaaacaattctaaactttcgaggggatatcctcttgttgtctccatgtcactcaaatagttatgaaaaaaattaaaaaaatattaagaatatgtattaacatgtgatatattactagatcgactccacaaactgcatgttcaaattaaacttctacatattgcaatgaaaaaaaaaatttaaaaatcaaatttatttattttttgttgtgacatgtagaagttggacttgtatgtttgtggtgatatattacatgtaacacatcttcttaaattttttttcataactatttaaatgacatgccgaagagatattccctcgaagagtttagaatccattcccttatttttgtatgcttcccgaatcttttacaatttggtcctttttaaaaacttatttcacaaataggcctctgggaaaaacttatcccaraaatggtcatttttagggtgccaaagtcagtgacatcatggtccaatgggactaggatggggctagcatatctggcgccgtctccctgccactgtggcggaccagcgctggcgtggaaagggggaccgtgccaatgatgctaccccccacccacaatgctatcttttttttccttggtgcgctccccccgagggtcacacccatcccccgcgccctccctacgcgagcccgagcgccgctgctcttgctctctctctctccctcttctcaaatccacgcaagatttatcggtaagagactttctgttttcagtgtttttatttttcctatagtcagaaagttaccaaaacaatattagattacatttccttaatcctataaaccctttagcatttttttactagcattgctttgttagtgtttgttgagtttttttgttacattcgagtgacctttcttaaaacaaatacagaaaaaggcaaattatatatttacaaatatctacataaaaagttacatctgattctcccccatttcgcccgggtttggtgaaattagaatctcgaaattctgcttgcaagattgtgttttcaaggcgagaagttttttgatagagctttgaaaaattctacaggtcacatttcattcgtttgagtttaatttttctatgtttggttcttgtgtgctcctaaatgtgaaaaagtataaaataaaataaaagaaaattatcattggcgcgcttcccctgccacgtcagcgccggccagccacgatggcagggggacggtgcaagagatgatgtcaccgtcctattggaccacggcgccaatgactatgacgtccaaaaagaaccatttctagtacggtgtaagtttttttaggggtttatttgttaaacaagtttttgaaaaggacgaaagtgtaaaacatccaggacggctaccgcctccgtactgttcgtcgccgcagacaatactctgacacgccggcaggcggcggcagacagcttgtactagggtgcacagtgaacaggggcccatcgatcgatcgattaatcaatcgagagctagctacgctagggagaaggcatgcagcaacattgattaatcacaggtgattattacccgggctagctggtaggctggctgggctgagacgctgagatgagacgagatgagaggtgaggtgtggtgctgagctgagcactttgatggcaatcacaggcggcaatccgagacgtcgcttttttacctcccattaatcccatgcatgcagccgatccgagccccagcgcatgatcctcctcctctccctcacacacacatgagacgccattcaattcctcttccctcccccgcacgaaaccctcctccaccatcgatctccctcctcttcttcttatatgcacgcggcgtcacggccacccctccctgtccacctaatcacacccagaccaacctagagctagcgcgccatcacggagctagccagcttagaccccctgcagctagccagctagctagctagctacagttgttgttgttgtacggtgtgcc

SEQ ID NO: 6189 - DNA, 2000 bp, Oryza sativa
agttacattcagatgggccacttcagcccgtgtgcttactgcatgcacacaactcatacaccctttgaactaggaaacttctcttaccatcgttggttcccacaaatcacttggtagtggtggacacagactaactgccaccgccactattggtagtatagattacaaaaacttacatccactaattaactttagttgagccaactaggtcaacactttgaattataataaaaactaaactaatgatcttcctagccttcaaaatgataaaaatgtgacaaatttacagaacacatagctcataaaatcgctccaggatcgaataaaaacttcaagattagtggatggactttgtatatcctaaaaaaaattcccaactccgtaattcatctgaataagctaatttggccaaattgcttggtaactaatgtgacattgtaggagccaagttgtggaaaccactcacactcatcaacaaacagatcttgttttgctaatttgattgtgtcgacgtttgatgtcgcgattccggtatttgcatagtatggggatcgttggtactaggatatatgcgagattttaataaaagagatggggacgaggaattttatacaggttcgagcccctgaatcgtcaggtaataaccctactcctgttggccgaagccggtcattgctcttattcaccatgatcacaccagtacaatatttaaggtagcctatctaactgttgtcgacttggcggtctgaagtgctgactcgtagtcgacaacagggtagccttcctcctcgaatccacatccggcgagatcaaagacagcgctatgtctctcctgacagtatccgtagacaccgtagggactagccatgcttatctctgaagtcaatatccggcatcttgtcttgtcttggcgtatgttggcttgtatgttgtatcttgatctattgctccgtgtcccctctcctcctatggggtcttgtatttatacccataggtgttcccttgtctaagtagaactagggaaaccaatatggatacaatccgagtagtcattgtcgtttccatgcagaattatggttgtctttctctatccggaactccctccatatcagaggtcagtatccgtataagacatggtatgtggtgggttctgccaagatttagtcaactactattaggtatatggtatccataaccctgacagattatttgtggcttattcttggtttttttttatgcattgtatttgcatgcatataattaaaaatgacaaatcacttatgctcaaataaatttctacaaagtttctcacattctatgaaatagccttctatgaaatattttttcataattttgtttcatattttggtactcaattaaatcagtcaaaacggtcaaatatgtaatgaaacaataacattctcacagatattctatcttttgccaatgaccaacgattgatcctaagaattgccatagattacgtgagttgcatcacacaactatttttcttcctttatgttattaccgttagctaggcttctgtcaacttcagttaaaatgtataaaaatgtaaggagaaacacgtaaatataacattcaaactttgcaactaccactgatgagagaaaatttataggccttaaaaagatgccgagatataccattttttttctttggaaaaaagtagctcccctgtagctctcaagaatggtgaattcacacttccatagaaccagaggtgcacgtgcctgcgtggaaagaacaaacaaatggccctcgcgtaagcaatgacgcaaggcaatagcagccacagacccacagttccgcagccaatatataaatcacaaaagaaacaacgcttatatcaccaaatcccccacactacggtcaacattgtacaataatagacgcccagggtagcaacaaaatgggccgatgagcagcaactatatatgtaccaacaaagtgcagggcaaattcagctgcaagaaggacca

SEQ ID NO: 6190 - DNA, 2000 bp, Oryza sativa
tccccatcctccctctcatgctgtgacaaaaggagtaagtcatctttgatggttgaagctaagtcttcaagtagctttttttttcttgttttcttctttgtttcttctatgcggggtttagagtctaaataactcgtataagatttgaatgtgtatatggttcatggatatagagaccaaatttaagaaaatccatgatcttaaaaaatgttgcattaaaaatatgaaggtttgaattggaaatacatacttccttcattttaggttataagttgttttgactttggtcaaagtcaaactgtttcaagtttgactaaatttatagacaaatataataatatttataatattaaattagtgtcatcaaattaatattgaatatattttgataatgggttgaaaatgttactacttttttctataaattttcaaacttaaaacagtttgactttgaccaaaatcaaaacgtcttataacttgaaacggagggagtaggtaaaatacttctcatactatttagagtttgatttgttccttttttccgtcaatatatagatcaactttaaaatatgcagtcccatcgtttcatctaaaactggttaaaatccgtaacgtttgttaatgataaaaaaaacaatttatatggaaaaaatttatatactccacccatccctaaatatttgacgccgttgacttttttaaacatgtttgaccgttcgtcttattaaaaacttttgtgaaatatgtaaaactatatgtatacatataagtatatttaacaattaataaaataataggaaaagaattaataattacttattttttttaataagatgaacggtcaaacatttttaagaaagtgaacagcgttaaatatttagggacggagggagtgtgttttcagcaacttaaaaactatgtaaaaaaataaaataagatgaaagttataaaaatcaactttgagattatgatttaaattttaaattttggatgtgactgataagctaatagggaaatctgagctaaatatccctgtaatttcagggtaaacgaggaggaatgtcctagaggtgtacatatctagctcaactaaacttttttttaaaagaaaatcaagttaagaaaggcacttgaagttgcccgaaaattaccgttttccttttgtactgaagaatgtagaactcaatgaacattggtcaacaacgaatgtacggtctgcctagtggcggaagctagtatccttgaagtgtcccagactttccaggaaataactcggtagaaataaattcagactactaaggccgtatttagatttagattttttcttcaaactttcaacttttccatcacatcaaatatttggacacatgcatgaagcattaaatatggatgaaaaaaaccaattacacagtttgcatgtaaatcgcgagacgaatcttttgagcctaattacaccatgatttgacaatatggtgctacagtaaacatttgttaatgacagattaattaggtttaatatattcgtctcgcagtttacaggcggaatctgtaatttgttttgttattagtctacaggcctgttcactttgatgaaaaaaatcttaccaaattttagcaataccaaaattttggcatagttgccaaaattttagcaacttaccaaattttggtaggatttcttatatagttaacaaaatttgacagcaaactaaatgtaaccatttttttggcaactttaccaaaatttggtaaggttgaaaatggcatcaaagttaacaggtcatatatttaatacttcaaatatgtgtccgtatacttaaaaaaaaattggcaaaaaattggcaagagagtcttgtattcttgtcgcctgcttctgattgttgattttcaggcagctcacctggtcgacttccacaccgcatcatattctctagctccatgccttcatcttgttcaggttcctactgataataattaacaaggatataccgatcatatcg

SEQ ID NO: 6191 - DNA, 2000 bp, Oryza sativa
tgctctagtaaatgctaagagtcgattctgagccgttgtcatgcataacaaccatactcctttctctttcctctatgtcaccaaatttacttgcatggcaatagagagagaacactaataaacaccgttgtacatgcccttatacatgacaacggcttaacaacgactcttacactataatatagaaatatggttgcatgaggataaaaatatggaaagaatattaacaaaaggaatattttttgagttaatgattagagtctttgtcgtctcaactattataaagacatggtctctaaatatcttgtattgtttaagagaccatacctgtctctaccattgaacatgcccttagagctaagctagayttgccctcgtatgagtcgatctttatttgttttctttctatctgctttcagccattcggtcaagttccagctttccaagatggcgatcttatccttttcggtaagatatctctaggggaaaacttgtacatactctagaactgaatagaacactacttaatataaagaatctaaacatgctgttttgtcatgattcgttgtaatatatggtgttctatctaatcctactgttagagatatttgtgtgcatgcatatcttattctgtttttgccgtttatctctcacaatctattccgattttgtttctataagtcggttgagatattgtggagaggtagaggctatatgtacacatgttgcgcgatgaatctttttatcgtgttgagctatccctgctttcacctacattgatatattataggacggagagagtaaatgttataactttgatgaaataatcaaaagttcaaaacataagcatacttgtagggtattttggtaagttttagtctagactttggtactttccaatacctaagtcaatgagaaatatcaaaatttgtattaaaaaatatgataaccttttaagagatagggagaatacgaaaaatgagatacttagggtatctacttatataatccactcgtatatttttacgcctcgtaacaatacaaatgaatgtgaatacgtaaatttaactaagctgttgtcttctctgccatcgttaccaagttgtcactttcttttgtcgattgacagagtctcgtgcaattgcaaaatatatactccacttcgcaaaagcgcatcagacttgctgaaggaaagcaacctctcgcagtctgcaataatggtcgatgtgtggctcgaagttgagtcccaaactttcgacactgccatgtcagcaatcactttccaatgcttaacaatacccactttcatgggcggaattgctgacgacaaaatcgtggaggagaatttggggaaactgaagaaagcccttgaggtttacgaggcacgctcgtgcaggttcaggtacttggccggtgatttcatcagcctggcagatctcagccattttcctatgacgcactacttgttagctactcctcatgcatcagtgctcgatgcatacccacatgtgaagtcttggatcaatgatttgatgaagaggccggctgtgaagagggtgagagagcttatggaggcatgatgagaaaaaggagatatccatcaattaatcatcagtctgtaggtatgaaatgtttgtcatttctggtggggctgttagttaattataatggcttaatccagagaaaggaaggaacgacattcattatcttaattaaaaccaaaaaatgtcacgcctccatgtgtccacgtagcttattatgcagctttgagttgagagacttaattccaagttgtttcatgatttgatcagattatttaaaaaaaaaaatctctgctgttgagatatgcatctccggatctccccatgagttgaccactacagtgctctgatcaactcgctataaaagcgaccaaccccttgccttcgcctcaagtcacacgacgccatcaatcaccatctacacctctagagagctaattaagctaaggaaagagaaaa

SEQ ID NO: 6192 - DNA, 2000 bp, Oryza sativa
tatgttataagtaaactgggtcaaggaatggagggaatgcagttcggtacacaaaaagtccaaagctggtgcaccaattaggcaattaccggttccaaactaaaactgtttcaccagtgaagaacagcgatatagaaggaagctctatttcttcttttttctttctgaattctgatctactttagttcttgtaaatcacaaagtacagaaaaaaagcttcatacgtgcagttttattatattacggtacataactttcataatccaccagaaaatacagagtgacagatcacataattaggagaataattcttttatattagggtacataacttcataatccatcagaaaatacttgagtgacagatcacataattaggagaataattctcatctcaaatgagatacgcatcaaaaatagatagagaagtgtaccttttgttgcactttctaataagtacgcatcaagaatagatagagaagtgtaccttttgttgcagtttcacctaataagtagtatcctgagattcaacagctacagtctgtatgattgattgcatgaaaacgaccttcaagaggtgccccttcaaaggaacaacaaaaggatgcgatgcaaaacgtaccaaatcaaatgtatctctaaacatagggaacaaaacataaaactaatttccgacaacgttcgaggaaaaaaacataacactaatatcaatatagaaatttgagaaattgcctgcacttcacttaaatcattgcccttcagtgttgtttgcttttagcaatgctcttacccttggttatggaaaaaagacaggacgagagatgagctcttgaaatgcacaaaaatagaagatgaaatatcagcaccaaacataggactaacaagattcaaacatttcaatttcttcctggttacaccatctttcgcatgcttcatttgggtgtcttccctgtataggagcaaccacacttctgacaattttgcatttcctggcaaataaataacttaaaaaatacttgtgacctatatttatcatatttcccccaacatattctttctgcaatcagctggtatctatctgtttacatgataattcacatgtttatacataatacttcatcaattttgattctggcaaatttgtatatcctgatgacgatgcatccgtgaaacaatgcaatggcatttcaaccatttggtgcacaagttaaacaccttattattgcttacttggtcatcactgatagaaggtagatgtatacgggccatgcacaaggataaagcaaagctaactttgttaagacaaaaggcatgtgtgataaaaaaaaatggtgacaactaaaaaaattctgtcaaatcgtcatttagcacatgtgctcctcactagtgaagtcagtacttacactttcaggaaatatcatattgcaaaattctgccagaaaacacatagcagtttttttttgtgtgtgtgatgaaaaaacatgtagcagtttgagatgaaaaggaaaaagaaggatgtgtcctcaaacaatatgtatttgaatgaagaaaaaaatcactcatctacaaacacattgaaaagacattgcttcaaagttcaaactaatgagcaagaacttactgagaaatgtcactgcaaagaagttgctttcaaaagtttgacaaagcctattcaaacagagtagcttctcaaaaattgctttatgtgaggctttgatccaacttgcaagacaaaaagagcttgctgtgagtccgactttccatagttaagaaaagaactattcgtcttgaatcatcacacctactgaatgttcctctttgcttcttagcttgggtaactgccttctgcaacacaactgcttctatgactcaagctctcaatataaataccagcctgctggccatagtacacgcttgagggaagatagacaaactgaaacaggaatacagatcaagcaatagtgctatcactctttattttgtgagcaatttcaagagca

SEQ ID NO: 6193 - DNA, 2000 bp, Oryza sativa
atctgatcttgccgaacaagcacgcatgccattggctcctaagaagcttttttttttcttttctgcgaacgcgtaaaaaaattacgcattaatatattaaaaaaaaaattatagttacacaacacaatcagccagactgacttataccagaagaaaaactgaagtttaaaaagctactgtagctaaacacaaacttctcccaataagctttctccaccccgatcccgtgtttgcccgttgctgcacacagagattccgcattcggcggcgatgtggtcactgcgatttggcggaagctacccggctgacccgggccggccgatcgatcagctctcgtgccgtcgcgtctccacgtcaccccgattgacaagataacataagatactggattgatattgagtggccatcgcctggagccctgtaacatgtatgattcatgcaaccagccgcatggaacaaacctgcccagctgctgctgctgccgccttgtctcggaactcgatccttggcatcatcgttctttcgccggttgcacggtgagacgatcgttcgcaatawtcttcytgctggaaattggacactggacactggcactgcaatttgtgatttggttgtatcagcgagatattttaggctatcttagggcctgtttagttggtgaaatgaaaattttcggatgtcacatcggacgtttgaccggatgtcgaaaggggtttttggacacgaataacaaaactaatttcatgactcgcctgaaaaccgtgaaacgaatctcttaagcctaattaatccgtcattagaacatgtgggttactgtagcacgtatggctaatcatggcctaattaaacttaaaagattcgtctcgcgatttacatgcaaactgtgcaattagtttttctttttatctatattwaatgtttaatatatatattcaaagattcgacgtgatgtttttaaggaactaaacatgcccttagcctattacttcactgattkgtgcatgtgcagctgattcaaatgtctaccatttgtcgtccagccgaaccctgctagtatggacytccccgggatatttagggcccatcctagtagggactcggtccatccataaaatggtccgtgctctagaaatcactgttgccaaatcagctgatcggtctgcaactgcgctacgataattcagtctccacatggccccacatgtcagccctaaggattagagcatgtacaatagcagactattagctagctacaaacatattttaatgagataaatgatgagagagaagagcagcgtgctataaaactatagccagctgcagcacagactctaagacacaatatatataggataggtgggaccatgtattaataatatagtaagtaattattgtatgaattggatattagattggctatagatgaattggagttagtagtgggctatactattaaacttgctcttaggctgtgtttagtttcacgccaaaattagaaatttgaagaaattaaaacgatgcgatagaaaagtcgaaaatttatgtgtgtaaaaaagttcaatataaaagacaagtttgaagtttgaagaaaaaaaattggaaactaaacgggcccttacacgcccacgcgcccccacaagccgaaaccgcctcaacccaacgtccccaccgcaacctcccccacatgtcagcgtacgtggactggggtccccgtctcaataaacccccgcgcccacgcccacctcgcctcctccgaccaatccgcgcctctgccagcttgtcgcgacgcgcgctcccccgccttcctatttcacccccctcctccgcctccgcgccactccaacccaatcccagccatcaatacctgcctccgcttcgccatctctcccgaagcctcctctctctctctctctccccccgattccaccacacgcaatccaattccaacctcgtgtgcttccacttgtgcgtttcgcccgctgctgtgaacgtactgcgag

SEQ ID NO: 6194 - DNA, 2000 bp, Oryza sativa
tgctagtcaatgggatgcttagcttgttgggtatatggtggtataccaatatacatcatggaatttaataaacatgagaagtttatcctggttattgttgaaccatttgccaaaaaaaaactttaaaaatatgagctattttgttatggacttatgatgccattagaagcaagctgaaattaactctacagattgctgtagcatgcaagaaatcttcagttcgttttcgacgtcaactgcagagacagtaatgtataaactaccagagccaatgctgctaagtaacttgctactgtacgtgctagagaaattgtcagaagaattatgacgccatgtcgccacatatatatttgttcttataacttaattaatttcctttggaaattgagcacactattccttctgaaagcatctcagaatcagatggaaatatttaagctcatttgttaacattaaactttattgcattgatcgcacatcacatatactgagagactttgtggtgttcttataattatatgttaggaagaaaatttctaactaatttgtggacaccatttaatatttccaagaaatgaatttaaagtggatatgattaaataagaacaaccagttcaagcaaaagtaaatgatgtttattactagggttctatttcacataaattgtctcatatatgctccattaaacacctagcagaatgatcaaaaaaatgcgcatgttttcccaaacttctaaatagtgtgatttttatttgtacataacttttttatattttttggataataatttaaattcatttttaattttataatattttattcgtctataccctcaaataattatcataaattattcaacaatcaaccaataaaaaaacaaccccttaattaatcaatcggaaaatagtgatctttgccactggtgttttatttcacatgcattatatatgtgaaaaaatgtacaatatgcgacataatggtattcctactatgaagaacttaatgtttttgacatgtaaaactttcatagttcgtttttgtccatatatttttaccacagkaccatggaaatatcacacatatatatatcaccgtctatacccacacggttgattaatgcgaggaatttcttttgtttacaactagtcgaatacaagtcttaaaaattcatagaccaaagggtatggactcaacattcaatgcttcatctccacaaaaatagtccacaaagcaacaacatcaccaccacatcatccctctaccctacctccccacatctcatccatgcattatgttcccttcacaacctaacacaaaacaaaaccattcaatttctatagaaaccacacaaacatgtttacaataataatcaaacaatactaataaacaaataaataagatttacataggaacaaaaaatgaagccaataagctagcccaccaagccaatcactcactcaccaaggtctcccactcctagtcatcatcatcatcatctccctaactaaaaccacacctcccctcaccactatagaacaaaatccccagcctctctctctagattctctctcctaataaaagagagaaaaaaaacccaagaaaaataagagagagaaactctctctctctcatcacccacccaaccaagccaccccctctctctcttccttgcaagcatccatctcatcaaaggccaaaccctcctcctctccccaacaagaacaacaaggaggcgcgattcacgcgaacaatcacaggagggggagagaaggggagaaatcatccgctcatctcccaaaatcctccaaaaaaatccatctttatcccgaaaagatcctccttttcttggggtttctgacaggcgtgcacggctatctttaggcgttctcggcctcatctctcgtggaaaggttcttcttcttcggggttgtttgctgctgcttaatttgaggaggaaaagcccaattcttgtggggagtgaagggagggaggaggggggc

SEQ ID NO: 6195 - DNA, 2000 bp, Oryza sativa
aatacaatttacaaatagctgaaattcggaattaaaaaataaggaatattagaagaggggactagagtccatataraaatacaattaggaaataactgaaattcgraattaaaaataaggaatattasaaktwgacwatagmgtmmatatmgraatamaawtaggaaawawtagaaatkcaggagaytarakatmtmattwaaggaatagaaaaaggagcctccacgttcgctctcatggcctagaaattctcacattaatcggagaaaaagaaaaarcagagtccatatagaaatacaatttacaaatagctgaaattcggaattaaaaataaggaatattagaagaggggactagagtccatatagaaatacaatttacaaatagctgaaattcggaattaaaaaataaggaatattagaagaggagactagagtccatatagaaatacaattagaaaatacctgaaattcggaattaaaaataagaaatattagaagtagagtatagactccatatagaaatacaattaggaaataactgaaattcggaattaaaaataaggaatattagaagtagactatatagtccatatagaaatacaattaggaaaaaatagaaattcagaattaaatatakaatttaaggaatagaaaaaggagcctccacgttcgctctcatggcctagaaattctcacattaatcggagaaaaagaaaatacagagtccatatagaaatacaatttaaaaatagctgaaattcggaattaaaaataagaaatattagaagaggagactagagtccatatagaaatacaatttacaaagaaatttggaattaaatatataattaaaggaatagaaaaaggaacctccaagttcgctctcatggcctagaaattctcacattaatcggagaaaaagaaaagacagagtccatatagaaatacaatttaaaaatagctgaaattcggaattaaaaaataaggaatattagaagaggagactagagtccatatagaaatacaatttrgaaatagttgaaattcrgaattaaaaaaaggaatattagaagwrgagwmtagagtwcatatagaaatacaattaggaaataatataaattcggaattaaaaataaggaatattagaagtaaagtatagagtatatatagaaatacaatttagaaaaaaaaatagaaattcggaattaaaaaaataaggaatattagaagtagagtatagagtccatataggaatttaaaactaactaaaatttggaataaacataataaaattaaaagtagagtttagagtctgtataaaaatacaatttacaaataactaaaattcaaaattaagaaaaacattggaagaagaatttaaggtcaatataggaatacaaatattggaatataatttagaagcaactgaaattcgaaattaaaaattaaagaatattgaaagatgagtttagagtccacatagaaatacaattagaaataataaaaattcataaataaaaatgaattaaaaaaagraatattaaaagacgagtctagagtccatataggaatatatataatttacaaatwactaaaatttgatattaaaaataattaataactaacacgtatataaaatatwatayaaataytamacattagtattaaaaataattaataactaacacgtatataaaatataatatmaayattacgcattagtagttttgtaaagttattgtaaaarttaaaattatgttgtmttttaatatatttgaataatataatgagaaaacatatatgctattatatgagagaaaatataatgatgctagccgcgcaatctgcgcgggccactatacttgttatcttagaaaaacaaccactcctagagtccagagagcacaacttcccatcctaacctccctcctgagtcctgacccatccatttcttcccactcgctcgcccacctcgccgtcgccgcactcccccccacc

SEQ ID NO: 6196 - DNA, 2000 bp, Oryza sativa
aatctaatatgataaaatagatacaattgccattaccacaacaatagttagtggttaccttgaaaccgactattggctcatcgaacatggttgtcattcttgccatctttatttgttgctcttccttctatgcagaaaattttgatacaccctttacgtattacatctaatactcagaagataatttctttagggatagtttataaatcaatactaaaccctccacacaacacctccctctctctacttaccaccatcgagctccttaccagtgtcaccatcggcatcaacaaggagcaatgcttcttctctatcgttttaatagaccattctttcctacaattatagaggaggttgtgatatcctgaaaccaacaatcaccacctcataccaacatctacccttaaggtttgtgaccctcttctgtttttctacattaacttggcaaagacttaacgcaatgagatctttagtcgataacgtcaataaagttgcataagaagatccaaacacaaatcttgaaatgaattgatttttaaatatatatggtaaatttctaaatttcttttatgacggttagcatatctgaaaataaattccctacaatattttgcatgttaacaaataaataagttacgttcatcaacctaacacgacaaccattctagagatgttttagatacatgttaaattatgtgacaaaatatgaataaaatattacatgtttatttattgctaatttcttgatttataataatctatttgttatttaaaaatgctcaaattatgttgttatcaagttgtgtgctagtgcaaccacctatgcctagcctatcgttccctcttcttgatcccatctcatgacatcatttgctctaacggtatcatgacgaaaaactttacctccacacgtcagcattggtgtacccctctaactacacccttctctgcctttctccctttactctccttttcattctcctctatgttgtcatcaccatcctttttatcaactttagtgagttttatctcgccttgccttagatggcttacgtaatcggatccgccacgccatcccgtgctcctaaccatattgtctctcttgtccttatcaccgaccatactcatcatctatcgcccccactcattttgctagattttttgttctcattgtaatccttctaactcaccgcttatctactctctcacgctgtcatctaaactgaaaatctaatctaaccatttttactcaccgtacctgaaaagacacccctatcataaactcataataaagttatcgtcgcagttacaccattaagggtatgtttagttccaaagtttttttttccaaacttccaactttctatcacatcaaacctttcatacatatacaacttttcaatcatatcgtctccaatttcaaccaaattctaaactttgggccaatctaaacacagcctaaaaacaaatttaacaatatagtaactctaactcctagctccccgttgttacatcatcttattatactcgctctaatagcgagccctcccttcgtctcatggtctcatatctcccttttatatacaacaacagctttgatcaatcaatccatcaactcaggttaatttggttagtactaggaacaaacaaacaaaaaaaaaggtgaaatttttactgctgttttggtaaagtgggttttggtaggcaactaggcatactgctaactgctctcctctcctgctacctccacgttctcctctcctcttctcccttcttcccttcttcctcctcctcctccagatccaccctccgccgccctcatttcgcagccgcgggtttggattaccgtgaaatgagctttcttctcctctctgaaaaggtcagtttggtggtggaaagattggattttgattcccccgattcgcttcccctccggaaagattcaaccttgtcagctctccatccctcaacgaggcagtactaggagctatcaatcagct

SEQ ID NO: 6197 - DNA, 2000 bp, Oryza sativa
tctccctaccactgacatcggcggatcgaagtagcgacgagctcggaaccgcgtgcatgcgtggatggcaaggagcttgggcgtatctggaatgtcgacgcgtccttctcggcaacgatgcctgggcgaagaggtgattgaagccgcgacgacgccgagcagagcagcgacagcgctaggcggagtggcggcggggcagccagatgcccggatccagcccatggcagctcccgtttcccaccattgccggtgtagctccccttccccgaccgccgcagcagctctccctcctcttcgctgcccccttccccgccggcgcctctcaactcccagacgccactcaagctcaattcgacggcccgtggcaacggccgcctctccctctactgagctctctagatccggtgtggtggctcgatagcgtggcggtggttcaacgcagctcaacggcacagcggtggcatctcaaagacgatgatgacggcgactccctggtatgcctgcccccttgcctcgttctctctttctccgccctggccaccgtgctctctttccctaaagaatcactaacgcattttgatgaggaacgcgggatcaactttgcctccgcttttctcacttgggcacgggagagatcgatgtggctgagaatcttcgacgtggaatgctggggctgaatgctacatgtgtattgtgaatggccttatagttactatatgattcagtatataaactattattatcctgactcctcagtggcaggacatgtttggtatgtcaaatggtgccattgagccacttcaccgtactcctcagtattattttctacttttcagttactttatcagattaatattaggaattatttgctctacacctttaaaaccatattctcggaagaaaaatcttcactttattgtatagataatttattccaagttatttattgctactatttataaatttattttaaaatatttaatttattccaataattaatgaagtagtagtatgcatgtctctgtactccatcagaattcagacacgactggctttgtgcgccggaaacgatgaatgaaagcgttttgatttatcatcgctgataagtcatattagtatgttgctgcgcatcatatcatcaacagtgcatatgctgcttaattcaatgtttcttgtgtcagagttgcagaacttctgaagttctgagtgtcaccatctccggaagaaatcttctaatccttcactgttcaatgtgtaagcttatgtagttataaaacctttggataataatgtcaaatgtcatgatccagcgcagcacgagctgaatgagccaacagctcatgattagcagccggcggctaaggagaggagcaagtagggctagttgcaaagaaaataggtgagattgtgaccgcgtcggttgattattgtttttctccgatcttgaagagattattaagatatattttactgtatcaagcattcaagctcctgactacgttcctctcctttgggagctaatctcaccgacatataaaacagaacaactcattagcgtataattagttaagtactagtttttcttttgaaaaatagattaatatgatttttaaaagtaatttttaatatagtttttttttaaaaaaacgtaaagcccgtttaacagtttgggaagcgtgcgtacgaaaagagagaagggtgagttgggaaagaaaaaaaaacatagcctaacactatttaaggtaataggtatacaaagccgggagaaaaaaaaatggccattgtgttttgtcttgatttgttcacatggcacagtagttagctcgagatgccatggtactgtctgacgtcgcctttgattgtgtagattagcttctttggatgtctatttaatcctgtatcacgcccagattcctgagtccaaaaccaactactgatagtctaatagtatcgatcactgaggaagaagagcatagcaaaagagtggtcgatcgtcatca

SEQ ID NO: 6198 - DNA, 2000 bp, Oryza sativa
aacgagaaagagataatggcgagcgcggcttgacgatgaacggcaacgcctccttctcggcggccgacgatgaggaggaattttggactaagggtaatttggtcaaatttatggttgcaacggtgtgaatgaacggtgtgttgacagcgatggcatttctggaagaaaaatgattgtacgatggcattttcgggaagttgcgcttgttgatgttatttctgggattagggtgcttgtcgatggcatttcatgaattttctctaattggaaatattacaacactattattttatggaccatttttctggttatacggaagttaggggttttcaacatttttaaaaattggtgtatttgctttgttagaagatagttaaaattatataaggagcaatagaaaaaccattggtatccaattgtttattttttgttttttgattgatgagtagtatgaaagctcgtgcttctacagcaacataggctatgtttagttcgtgtcccaaagttttttttttaagtatacggaaacacatttgaagtattaaacgtagactaataacagaacaaattacagattccgtctgtaaactgcgagacaaatctactaagcctaattaatccgtcattagcaaatgtttactgtagcaccatattgtcagatcatggcgtaattagtttcaaaagattcattttgtgatttacatgcaaactatgtaattagttcttttcctccacattaatgctctatgcatgtgtccaaacatttgatgtgacggaaaagttgaaagtttaaagaaaaaagtttgaatctaaacacgaccatatttgctttaaacaaaattaattcctatggagtatttgaggaggcggcttgcagctggtagtgttggtagagttgcagtacctacgacttccatcttctttttttcatatcctttttcccaacaagacctgcggtgtagatgttttgggggacttctctccattccctctattgaccggaggagtataatttatttttcaccttcttttaacatggttcttgtatctcgtccttgttttgtgttctctctaatctaacggttcatgttaggatgtgtcacatccctccaaaatcccttatattataggacggagggagtacttagctcttaaacgatacgtttttttattaataaaaattacatatacgaatttctcgaaaagctatacgaatccattttcaactttaacaatagctgattcattatccatttgtacgtatgtacattcgaacaatgataacaaaaaatcattcaaccattttccagaccatatggtagttgaggtcacgagttcgatcccctgttcccatcacctcctcccatactggactacatacagtgcaccacgattacatgttgctaggatttttccaagcagccgttaatattattcatatatttttataaacttactccctccatttcagattataaaatgttttcactttaatctagtcaaactgtttaaacttgactaagtttatagatttttttgtaatatttataatactaaatttagtttaatcaataattgaatatattttcataataaatttgacttaggttaaaaatgttactactacatttttctataaatttaatcaaacttaaaacagtttaatgttgaccaaagtcaaaatgtcttggaacctaaaacgaaacggagggattaacatacaacatgtaatcgctgctaacggctgcttggaagatcctagcaacggcccgttatgtcacgtcattttcgcacgcacaccacctcgcgtytaaccttcccctctttcctccggtggactcgcaatcactcgcttgccattctccagcaccagcagcaagcttcttcttcagcaactcagcagcacttcacctgctgctgctgcgaccgccgtgaccatcaccacctcgtcgccggcgagaaacctgcagagggcgagggcgagtgcggcggagcagggg

SEQ ID NO: 6199 - DNA, 2000 bp, Oryza sativa
aatatgactattaaaagtagatggatgagtacatttcagtccttatgttttcgcatgctttagcctttagtatttggtctcaacaaagctgagttggatcctttcttataaatccaacgtaatcaacgaagacagacaggcataattattgcccggcacatgtgcagcagagttgaggcctttcatcatcagtgttgtttcatctaatcaatgatgaaaaaaaaaatcttttaccccctaaacttggtagagaaataggtctaatatcatgaattttaaattcgaacattcaacccctaaattttataataccattcaaattacccctaaaatggttttggatagtgactaggtatttagaatcttaaataagtggttttgaataactaatatagcttgtttacatatcctcaaccatcgttcattaatttctattctataatggatatattacttagtattatatttacatcgatccatttgtaaaaaagagatcaaaaaaatagggttcaaaacggaaagattttggtgaagatttgaagatatattaacaattcatataccatgtagtcaaaatcatccgacatacatacaaatctagaataaaaaccaccctgcaaaaccaacatacttagagtgttacgtaaacgatatacaatattgtatagctcaggggttgaatatccgatttcaaaagtatacgagactagatggactttcaatcaaaaagttagaacgatatttagacttttcatcagatccwgagtgtkgaccatgatgtttggaccgaataggagtattagtacaaattaaggtgcgaatttgaaagggcaacatatcttttttttttttgagaagaactgaagaaggctcccatcggttgcctacagcttataagccgtggtcaaaatttagaatagtttttttttcgtgatagtttattttaactattggtttttatctcgctaatgacatccaaatgaaataatttactcctaaattatatttttttctaataatcttatagtcaacattacataaaccaatagcaccagcgaactccacgttattttaaggagtcatcttaaaagaaactcttcttttcttttttctttattttaaaggaatggaaaagcatattaatgcgacatgcttcacgggctcataaacattacggttttcattaataaaaagtacatatatgaatttctcgaaaaagctatacgaatccatttccaactttatattagctaactcatttgtccgtacactcgaacaatgataacaaaaatcagtcaaccggcattcatcctcgccaagatcaaggaggaaggtcgggcataggtcaaagcaggagcctcaaaccttcaagagtttggaatcttaggagatatcacttaaacctcactttttatggatttagttctttggactagccctatacatatttttgttgctctgtattttctccatctttatcaatatacgagacaaaacttttgccctcctttcaaaaaaaaaatcattcaatcatttgcagactactccctccgtaaaaaaaaagacgaattggacgtgatatgatacattctaatacaataaatttggacatagatatgttgagtaatatgttagttttttatttgacggcggaaatagacagtagttgaggtcacgaattcgatcccctgttcccatcacctcctcccatactggactacatacagtgcaccacgattacatgttgctaggattttttccaagcagctgttatgtcacgtcattttcgcacgcacaccacctcgcgtctcaccttcccctcttcctccggttggactcgcaatcactcgcttgccattctccagcaccagcagcaagcttcttcttcagcaactcagcagcacttcaccttgctgctgctgcgaccgccgtgaccatcaccacctcgtcgccggcgagaaaccttgcagagggcgagggcgagtgcggcggagcagggg

SEQ ID NO: 6200 - DNA, 2000 bp, Oryza sativa
gataattccatatgcgacctgactagcttgttgctaccaatctactcgcccttcatacctgtataaactatccatctgtagagtcttcttgcctttctcctagatttgtttacaagttcctacagcgaattgtccatcctctacatcatggttcaatcgtccaagcttcgtcatccaacctgtctattggtctgatcaccctgtcagtccggtccaactgccttgcactcctcgcacctcttcctaccaatagcatcgtcaagttcttctggatgtatcaaattttccatgcacctactatgtcttgaggtcgcttgagtcgtcaaaggagtcggagtctcgatcaaacttatctattctccattcttgggaaaacgctttagaggcgtcgtatgccctcttccccgtcttcttctcttcaccgtttcccctttctctctcacctagtaacgacacgaagcgagccaagtcctcggggccagaggaataagccatcgccgaagaaagcctcgacctcgccggaaccctaactcgccgttggcagcagcggtggctctgggaggagaggtgcgtgggggcagagcagaaggcgccattgtcagagaggatcccgagcttgctgacggcagcaccgcgaggaggaggtgtaatcatcgtcgaagaggaccaagctccgtggcggtggcacctacatcgctcgaagatgcatccatcaccggttagggccccaagctcaccgccagcagcggcacggccacgaggaggcggtgcgctggacagagcttgagatgccatggcctgagagggcctgagctcgccagcgaaggtgaggaggcttgtggcaacgttgagctagcgaggattgttgcacaccacgtgttttttttttgcmcataatgtgttcgtgatgttataatctgtattttctgtatgtttcttaaaatggatgttgcatttggtttcttcggatgttgtacatattgggtctttattgttgcagtcacatcttgagtgtttcattcaattgaaacattttcgataaagcggtgaaacattcttctgtaaaagatgaaacattaaggaacaatttatgttgaaataattttttttagcaatggaacattgtaacatttcttcaacgtatagtggaacatcgtctttaagatttgtaaatctccggacgtttgatacgtaggcctctccttattcttggtcaacctccccttgcgcactgtccaggttctgtacgagtcggtccagtaccctcgatcctgtttcttgtggaacaaaatttgactcacttccctgtgctcaacacggccagcaggtcaccttctgcacaactccacagctccagcccctatcacatgtgcaaacaccaacgcatgctcctttcatgcaattaattaatcctcgcatgcaagtgtttaattaaccagcatataacgtagtgcatgtgcctcttgctcagttgacttgctcctttctgtgtcttctgtatgtctatcaagcgtatggagtgttatgtcgtgtctctatacgcgacgtcaatgtgtcggctggccgtccataacgcttccacgtgtcttcttgatctaatgcgtcttctgtacatatatcaaagcgtatgcatggagtgttatgttgctacgtatatcaagcgcatggagtgttatgtcatgtctctatacacactgtttgcgcgtcggccacgtcgtccataacgcttccacatgtattttttatccaatgctgaaatcctatgttctggtatatatcacttgttaaagtgtgcagcttaacgcatctaccgagagtcacccatgttatattgggccttctctattacaaactcatccggagtcacaaggtctatacaatcaaaaaactagtcttatatataatgactttaagttatactcccccactatcgattattgatgtggaactaatcatctttcagatggttttcttagaacacgcttttaattttttcctac

SEQ ID NO: 6201 - DNA, 1055 bp, Oryza sativa
taaacttttatatccatacacccttatcaatttaaaaatcaaagctggaaaacaaattacgataaaacaagtccaaatttcactctaaaattaaattttataattcaaaattttgtgcatgcttaagctgaaggctaggggttgtttgtgttcaactagttattaatccatatagattaacactatgatatatccaaatatctcctatatactagattagtagtaattaagaaatatacaacatttctctccatatattcatcattttaagcttttttttctttatctgataggatatatatattaacacgcggaaacggttgaaacagttgaagacaagatgccaactttccattagatacttgacctgaaaaggttgctattattatatacttattaaattacttgttaacattgatccatgctttattagtccctaactaaaaagtgcttagcttaatccctttcgcgctttgccttttttcttttcctacctccgatcacgaaaagaaccccgagcggaggcgctttcggcgaaaacccgtaacccctatagaggacacggaaaccgcctacgcgtatacacgcgccgtgtgtgtcactgacggtggggcccacctacccctctcccccactcccccgcgcggcgcgcgccacctgctcggcgaaatgcgccagtggtggtcaatgctacagcgcgggtttgacccttgctccgccataaaggagagccgagctgagctgagctgagcttcttctacctctctctctcccctgcagcgcccactcacttcagtcgccgccaccaccaccaccatcgtgttgtgcatcccgattgcgcgggcgactagtgccaccacccatggctgggtgagactgtccccgcttgctgggtggtggtggcctagtggggttgggggggtgggggcgctcgccttcttggctgctgctctctgtgcgtgtgcgtccatccatggcgcgctgtttcttggcgtaaaggcggtgcgcgtgttttgctcgtttttcgttcgaggttgagctcggttgttgcggca

SEQ ID NO: 6202 - DNA, 1739 bp, Oryza sativa
tatgggaagtttkggaatgatgttkgggattatggatggatgtatgttttgtawgggtctcygggaatattactggctgtaaaattcygkgaattgaagtttggccccggttgtgtgcaaagttttgctaaagtttagcagggctkggacgtcagcgccatgctaaatggcgctgacatgtccaaactcagcgccagtgcacctggcgctgaggtcccagcccagccatccagaakgcttgctgggctgggccacggccgaaacggccaagtcccacctcagcgccaggtgggctggcgctgagtgtcccactgtcagcgccattatggctggcgctgaggtcccagcccgcaagccatccawcaggcttgctggtctgggccttgggggtttcggccaagtcccacctcagcgccaggtggactggcgctgagtatcccacggttagcgccattatggctggcgctgaggtcccagcccgcaagccatccagcaggcttgctggtctgggccttgggggtttgcggccaagtcccacctcagcgccaggtgggctggcgctgagtgtcccatggtcagcgccattatggctggcgctgaggtcccagcccgcaagccatccagaaggcttgctggtctgggccttgggggttgcggccaagtcccacctcagcgccagtccggttggcgctgaggtagctgccacgtcagctggggatcggcccggccgacacggtggcacaatgtcagcgccagtcccgttggcgctgamacggccaacgtcagcaccaatgtgtttggcgctgaggcgacggcctatttttggttgaagtttttggcaggggttagtttcgaaataagttttccaaaagggtcaatttgtcaaaaaaaaacggttgcgcgcacacacacatgcgtactccataccatacgaccaaaggaataactcgcgttcctgtatcataaagctgtcgatacggcaaacacggcgtactacgtactactcgattgcatgcatatgcgtcggcgtcggcgtcgtcgtcccgttgcactgtgagttaacagtggtcgcgcattcggcatcttcacttcttcagcatgaacaggaacagcgtcgtgcagaggggacacgacgcaggtttccagatgtcgccacgttaaataccccgttgcacgtacgtacgtgtcagcgactgaagtgcgtgcaacacatgcatcatgcatgcacgctgtagcctagcagctagcgagtagcgactgaacgtctgaagccgcgtcgcgctggaaagctggacaaaacggatgtgtatgtggatatcgcttgagtttacggggaaacggagccggattagccgcgcgcggggtgcgccccgcccatctctcgatccatatcgcgtttcgcgagtgatttctgccgctgttgccgtgtggcctctcacgggcaaatccaccgtttttctcgtccggctgcctacgcgcaccgatcgagctgcaggcaggtgcagacaggctgaaggctggcacatgcgtattcagctcacccagttattattcccttcccctacactgtgctagtaccagtgtgttgctagctccacgcatgtttcccgaggctaccagcagccacgcacatgtccaaacccagccgaaactagcgataaaagccacgcacgcatggttttgaacctctgacaccatcatcgtcgccgctgctcctggctacgtcgttgacgacgacg

SEQ ID NO: 6203 - DNA, 2000 bp, Oryza sativa
aacggcctaaatcggttagatcaaaataatccatctttagcgatgaggcagatttattattttaacacattgaaatcacatcacatggtactgtactagtattattgattgatacacttgtgatgtcatgccagtaataatgctgtaatggtaaaacagagggatctaaaagcatttgactgaacaagaacagtaggatcaatctttgtgcatgcccttctgggaatcagtaactgattgatgctgaaacctttctgctgtttcttgtgctatgtatgcccttgatgcagtgataagagcataagacctcttctcctgtgagcagaagcaaagcaccggggattgattctggcacaggcatataatgcagtaatatgcctcaagacagatcatctcctttcggtgctttgaaattttttcgccaaccagcaggtgcgtgcaaataccgatttgcttctcctgctagtctgcaagcagacagccattaaacaattgcacatgcctaaatcmgaagcaagcccatttgattgggaactccatcaaaacaatgacaagaagattctggtcctcacatcatgggagcactaagctatgtcactgtacactattctggaaaatttctcaaggtatttgatagctatcgcgatttctgtaggccttccagactctgttggaggagttttatcaggacctgtgtcaaatgtggcaacaaggtggtactttggtatttggtagaaatttatattgaaatgatgggggaggatcggcattctaatttgggctgtgtttagttcgtgtgccaaattttttttgaagtatacggacacacatttgaagtattaaacgtagactaataacaaaacaaattacagattccgcctgtaaactgcgagacgaatctattaagcctaattaatccgtcattagcaaatgtttactgtagcaccaccttgtcaaatgaggctaaaaaaatttgtctcgtgatttacatgcaaactgtgcaatcggttttttttttcgtccacatttaatgctccatgcatgtgtccaaacatttgatgtgacggaaaagttggaagtttgaatctaaacaaggcctttggttcaaatgtgaaacttcaggaagaaattgagacccgtgcattccccaaaggtgcttctccattacagcacatggtcaacaacattacttgctgtaggaaatgaccttatcatcatgcacactggtggtcctattcatatatctagtctctttcgcagttcccctaatttttggactgaagttatagccttgtaatgatgtgatgaaaaatgagattgcgctgtcacatcaaggatacccagtacctaactatgtaatccacatagctcatatggttgcttatttggcactcctcttgttactttcggagcatgttgaaagtttcacaggaatattggggcatccaagtagtttctgaaagcaacatggagaccagaagcatctatattagaacttgatcacttctcttcagcctgctctgggttgctgaaagaagttcttgtttcttagagaactttgaattttctgaagataacagtaaagaaagggctcctttcgcaatcttcacataaggggagggttcagtaacaagttgagatatgggaaactgcgccagctttactccaaaatggtatacatctgatctcgctaaaggtttcctgtcatactattgcctcgcatcttttgatatgcttacttctgtttatctctgtgtttctcaggggattaagtgatcttcactgtaagggtatggttccaattgatgaggatgaaactcacgaaggcataaagaccaattaggattcagaaagcctgtgaattcaccaccagttcagttctttgcgtctgcattatcacctggaacatgaacggcaaggtgcatataatttacttcatttcattcttctagatgatgactgcgccattttctttgatctgatattcattgtttgtgaag

SEQ ID NO: 6204 - DNA, 2000 bp, Oryza sativa
gggtgcttcctacacaaggcagcatgactcctgctggcacgtcttgttcatttcgagtcatgcttagctagggtaggataggctcgatcggctgcaacaagttgggccatctcgaacttgttgagcttgaaagggtggtaatgggccataggccatgggatctttcatagtccaactcaatcatttctcttaacctcaaaaccttaaaaaaaaaaaaaatcagcccaacctttcaacttttgaaatttatagactaagcccttatttagttcccaactttttattcaaacttccaacttttccatcacatcaaaactttcctamacacataaacttccaacttttttcttcaaactttcaatattagtcaaacttccaattttatcgtggaactaagcacaccttaaaattttgggcgcatcttctccatcacctccgtcctctcctcctccgctgctgtaggctgcggcctcatccactctagctgcccaccgccaccgccgccgcctccttctcgcacatgcttggtgagcttgagctcatcggctcccttctcttctcttccgccactatggaccacgagaaccctctcgacgctgatctctcacagctggggatacaaatatgaggggcgttcatatatagacgtacacgtcaataaccatctaccatgtcataaagaagccctctaggaaatgccctcctaatgcgtgctatagatttgcaaaagtttgaaaaaatattttaaaaatattttaacaaaaaatataaaaacaaaaaagagtaaatttcatatttgggacaaattttattaccgatgtttcgttttggaccaccctttaaaccaatgttttcattttggaccaagtaatcttgcctttccttaactttggactaccccgactctcttctcgagcagatgaacgacctcaagtacgtcggcttctcctcgtcaaaaccccctcaaatgtatgtagattgtttctttgacatatgataattttgatgtagatggataaaagagttgagggatggttcaaagtgccacaaaggtaaaattacctggttcaaaatgtaaacattagttaaatggtgatccaaagcgagacaccggtaataaaaaggtgacccaaagtaaaattactcaaataaaaaaatttgtagaatttataggctaaaattttggacccattactaaaccgattgtccaaaaagaccatctcaaagtattttagtattgaccaccaagtttaactgtcaagtttgaactgtagttagggtctgtttgaatctctaacttggtttagctttttagcacaagcaaaatgagtcaaaccattagcacatctgtaattagtataaattattacaaaatttaaaaataggcttattttattttttaaagaaaaaacacactatttaacattttaaaaaatgtgttaacgaacaaaaaggaaacctagtttggagttgaaaaaagacgaagccttggagtttaattttaggctattattcgttcacagaagttatacatagccatgtaatttatgaatgtagacagaaataatcctcataattccatctattcagtttgctccaaattttattgctaatgctacagatctttttccccgtgaggactatcaccgcggcgccgaattgccgaaatcgcgacgatgtacatttgcatctgcagtgccttttcggataaaaagcgtgacacgttgtaccccaacccgaatacccgatggatccgtccccgagaattcttcccgtttcccgcaaaacgccacaggccgcacgccgaggagaacaaacccacccccaccgaccatttcctctccggggaggtggcgctgcggtgcacggcgagaaaaagccccgcacaccgtctcatctggttgtgagctaagccatcgccggaagcaattaagcaaatcgagacgtctcgaggaggccaagctagctcgcgcgcaaattaatcgccgatcgatcctacg

SEQ ID NO: 6205 - DNA, 2000 bp, Oryza sativa
ccttttgcatatgtttaatgctttctttccttccggatgaggagggagctgactcggagcctacgcgacgcaccgccggtctccattgacgcctcggcgcgccgcgcgcggcgaagcgacttgccatgcacgtggcgcgactgttcgctgcccagggcggctcggctggaagcggaagccctggtccacacgacggacggtagcttgggggcggggcgtccggcggcaacgaccgtgaccgtgtgacgccttgccggattggtagaaaaacgccgtcaagcgtacgcggcccttgggtggtaatggaataataatattgtcatttgattccggacaagaaaaaaaatacttggaaaggagtgttgcttggattgctcgcctactcgttaaccgctagcgcttcttctaggatgaccacttggataataattttgtagtagatcgtactgttcgggtatgaagacaaagacaacctccaacttgttcctaaacagctacttgcagctcgttgggtgtggacgaggggggcactggctgctacataatatagaatccggtaagccttttgtcatccgtaagaaatccaactgagtaagacgtgcgaacacaagtttacaatttttagtgtttaggctcgaaatctgtacgtaccgagacatttgtctcattttcatacgcaagcgtctgcactgtacagtcgagttcatctacagtgcgactgttcaatcagaaaatattccaccgtgtaatatcggtggaaaattcgagatattggagattagaatcacatcgacatattcgtagcaatcagtttcacataaatttggttaagatcgtatgaagacccaatgtggaacacaaaaatatcagataaatttgagtagcaatcagttcatttttactaattaatagtactgctttggggttgtttggactgtcccatcgcatgtttgaatactaatcagaagtattaaacgtagattattgataaaactcattccataaccctgactaatttgtgagacgaatctattgagcctaattaattcataattagtctatgtgatgctaccgtaaacatgtgataattatggattaattaggtttaaaaaatttatcacatgaattagctcttatttatataattatttttttaaaatagactatgttatactttaaattaatatcaaacattcgatgtgataggaagtccctgcatcctaacaccaccatgtactgacgggattaatgctagctgaggagaaggcccacgcaccaaacgaagtcatttcccgcgcgtcagacctgacgtcagacgacgattagccacgtggcacacagtgcacccgacacgacgaaaaaacaagggaaacatccaaatgaacccccggaacagttagaattcccaactgttttcagaacagccgatggcccccatgaaccaggcgcggggcagcggtcgaatcctgtccgtccatccagcacgcgcagccgggaagaaccctcatccgagccgttcatgacgtgggccccgcaaaagaaggtggggcgcgtgacgccagctggcatcggagggggggggcaaaccgcaaccttatcctctctgcccgacgcgtcctcgtccctggaccaggtccaccaaggcccgctcacaccgacaattcggggcccatctctgtcagtgggcagagcgtccacgggaggcggagcccaaccctggagaatatacgggcgtctcctccccaacctctcgcctccagttgcatttcccatttcgattcgagactcgaaaacccaccacccctctctccctccctctcgctcgcctcggctcggctcgccgtctgtctctctttcagatcacatcaaagcgggcaccagcaccagcaccagcaccaactcctctctagggtttggtaaaaacctccatttcctccgcggatcgaagggaggctagggttccgatcgagaggggaagctttcgggtactcgtttcagcc

SEQ ID NO: 6206 - DNA, 2000 bp, Oryza sativa
tctcttagagctcttatctagtcagtttcatcaagtctttttgaccttaagtcagcctacctgggtatacatatgctcttatccttatttttggtcaatttctatacatatctgaaaatggtatcctcgttctgttccattatacttcattattgggtaaaattccccaactttatataccctgttcatggaaatattcgctctaattgaatgccgaaacggcgtgggctaacgaagtactagatgtattctcccaaaactcctatgttgcctgtaagacatcttatgattgcctaaagccttttacttatgcctaagttcatttataaaaaaaaaaaacgtttactatgtcaacctctcaagttctcatatgttagtgacactgacacatgtaatccgaccaactacagcggttgtacgtgctctatgtagccttctcaacattttgaacattttgcagctgggaagaagactgtttacccacctcaaggtgtacaagggagcagaacatccccatgaggctcaaaaacctgttccactgcctatcaaggataaaagaatacagaagtctgagaagtagataattcctgtggagactaagaaagacacaacaatctcacgtaaattcctcccctcgagattttgtccaatctttggaatgtgatgcatctgtctgtttggggaatggagtgtaaaattttttgtaatttacttcctccaaaagtttgtgtttctaagtcatagttcttgttgattacatatcatgtacctaataccgtacgattttaagcaatccgatatttccatatccaattgagtagtgcaattttgacctgagatgagcttgatgtgtcattgtttgggggcaaaagtgttctcttttttcaatgggcatcaggtgtttctaaattctcttaatagttgatgtagatctgttaattaattgcacgtccgtgtttatcttccatataacgaaaaagttgacagtaccaatcgtgtgctcaagtaacacctattgtaccatgtactcattctgtaaaaaaaaagccaatttagatgaagatctgataccacctaaaaataatgattagagttatccagatttatattaggtggtatcaaattttcatctacggggttgtttagatccagaggtgtaaagtttcgacgtatcacatcggatattatatagagtgtcgcatagggtgttcggttactaataaaaaaaactaattacagaatccgtcagtaaatcgtgagataaatttattaagtctaattaatccatcaataacaaatgtttactgtagcacaatattgctaaattatggagcaattaggcttaaaagatccatctcgtaaattagtcgcaatatgtaaaattagttattttagcctatatttaatacttcatgtaggtgttcaaacgtttgatgttacagaataaaaaattttaaggtggaatctaaacaggtagttttttcaaggaagaaagtaattgcgagaacatagattgaagttcaattgaacagaggcggcatggcagtgagatgagtagatcccggagtggccgggtcgtcgcctataaaattcagcgagattcattcgagagcgcgtcactgcttacctaaccccacccaatcaccccaaccgaaccccgcacggcgcaccggacgccgtcgcgtccggtcgctcgtcctccgcgaccccacctgaacaactgaagaactcatcatccgtcatccctccccctcccgccagttaccctccagtaccatctcgcccgcctcgtcttaaaacgccttctggaaaattccgccaatccgagagggatttttcctcgcaaccaaccaaaccaaccaaacccccaaccaagcgagcaagccgccttcgccgggggggcccccaccctgacggcaaccctagccctccgatcaccggcgctgagactgatcccgccgccgtaggaggaggaggaggaggtggtggtggtggtggtg

SEQ ID NO: 6207 - DNA, 1413 bp, Oryza sativa
tagagatatataatagtagagacmgtataagtcgacgttttccgatggatcttaccaaaaggcctaggactaggagtttactgagtggacttattgtgacggtgttctaaagaaatcagttttaataaaatactcctaaaccatatcggagtacgtagtagttactaatcgtgacgcctaaactttagatctatgaatccaaacttcagtccttttccatcatatcaacctgtcatacacacataacttttcagtatggtttaattatggtgaaatttaatgtgggaattcgcatgatcgagctgcaattaagagtctgatcatctcaagttagcatgcaagtttttttaaaagtgatttcttatacgtctccttttgtatttttaaaagtaaacaacttaaaaaccgacttaaacacggatttgtatttccaaatgcgaatgaacttaaaaaccgactcaaatacagatgacgtaccaaaataccgacaaaaacatcttcaatttttataatagtagagatatgatttagttaagatgaaattcatgagctgcagttaggacttaggagtccgattctcaagttagcatgcgagtttttttaaatagatttcgtatatgagtccttctgtattatcgaaagtgaactatcttaaaaatcgactcaaatacggatatgtatttctaaaagcaaacaaacttaaaaaccgactcatacacggatgacataccaaaataccgacaaaaacatctttaatttttataatagtagagatatataatagtagagatacgtataagtcgacgttttccgatggatcttgccaaaaggcctaggactaggagtttactgagtggacttatggaatacagaaaccatattgactcaaagaatcagttttaataaaatactcctaaaccatatcggagtacggagtagttactaatcgtgacgcctaaactttagaatgaaaatagctattcgcccataaatatgtactccctccgtcaaaaaaaaagcaaactctggattttcgtatccaattttgattgtccgtcttatatgaaatttttttataattcacattttcgttgttgttagatgataaaacatgattaatattttatgtgtgacttgtctttttaatttttttcataatttttttaaataagacggacacgttaagtacggaaaccaagtttatctttttttttttttttacggggggagtatgtacttactagtattgcatttatgacgcggcgcaacctccgattcgttcacctccctccctttctgtttactcggcagcagatatatacgccatcttgcagaagctttccctcctccaacttccatcacaatcccaccaaatccttgtcctcacgtcaacgatcgcaagccatagctccg

SEQ ID NO: 6208 - DNA, 2000 bp, Oryza sativa
tatgtgtgtgtcaatcttcaaaatattttttttctcctaaactacttatccgatctaaaattcgaatgctctgttgtattcgttggaattaaatatttataacaagatatcatatgattatattgtgattaaagaaaatcatatgtttcaaaccattaatacttcatgttttcatactactttgtaaaaaaaaggcaaacaatagctacgaatctggacacgcatgtgtccaggttcgtagctaggattggacttttttctggacggagggggtacgttatagcgacatgtcttagcgtttgtttttaccgtgtttcacaaaattcacagaaatacttgccactactctcctctctctctccacttcatcaaagcttgcatgcatgcattttagtgatcttaaaaatgatttttcttctaaactacttatttaatctgtgatccgatcacactgttgtattcgttgtaattaaatttttacaataagatatatcacatgattatatttgatgaaataaaaacatatgtttaaatccgtttgctctagttgattcatagtacgtagtagtgatatgtttcaacgtgtatcttcactgtgttttataaaatgttgtagtgttccaattgctgaatttttttcaccatatataagttaatgtttcacttgtttgtcaactgtaacatttgactgttcgaaaaagtcgggcatccgatgggtagttttctcccaaaaatatacataaaccacaaactaagccatcttgaatgttaaaatattcttgtaattttttttgaacggaatattcttgtgaattgagtggtattaaaatgtgaaaagattgatttttgcataaaaaccaggtaccttcttagcgtattttggctttcttcgatctctggcgcgacaagaaagaatggcaatgtactgtagatttttagtggggtttcatttcatgtggttcatcacttgggcgctgccgcgctggtccccgtcttccctatcggacgagctcggtagagacacacaatttgacacattcgtcagaggaaactcgtgccgttggcttttcctatcaacctcttcttgctggggatatatccagggcaataaataaataaataaaaatctgagcaaccggatgggcaaacaatcaggctccattccttcaccgcgaagctgctctaatttattcgaggcaagccaattattaatactccaatttatgcagaactgcaggtcttgatactagtagtcccagtaaagtacagtacttgtaggagtatttgattcgaagcgtcagctgctgctgatttctgagttttttttttcacaaagacctgacagtttagcactcctccataccagtacagccaaaagaaaaatcgcaaacaaagcgctcgtgttttccgtgctcttcccgtttccttcgacacgtcgagtggatggatggacctcgactgtagcagcaacaccaccggacgttgacctggagcgtgaatctcaaagctactccactccataccactcaccgccaacccgtacacacacaaaaaaaagcccgataagcccaacccgagaggatgggtggggcccaccccttacctgcccgcacacgtggaccacgcgtgatgactccccatcgcgatcccgaccgtccgtttcgataggggccgatattaactgaaatgaagcggttggctgtctaggactctaggtcggtgtttggctcgcctttgcttggacggaacaaccagccggcgactgcggcgactccgactcctcgcacgcacgcacgcacgcggccgtggaaatcgcgccggctcgcctcctccctccccacccccacccgctagatctcgccggcttccgtaggtcggtagatctcgctgcctcctcctcctgggaatctccgtctcctccgcaagattccaatcgggaggcggcggggcggcggagaagctcgctttggtggagtagtttgactaaccggtgcggcagg

SEQ ID NO: 6209 - DNA, 858 bp, Oryza sativa
acgccggsgaaaacgsgcgcgcgcgcgtgcccgtttctctcgatctsgcmasggctagctaaagagcgagacagtgagtgcaacctttgatcgatcctacccccaawtagaagtagaattgrgacactgagtggtgcaaagccctactactacgtgcactgccgctgtcatttctctaagtagaagtggaaagttagtagaactcgtcgtacgtacgtcgacgactcgtctcgcgcgtgtacgtacgtgcacgctccactgcacgtcgtggaggagaaaagcggggctcgatcgtgtgcgatgtgtgtgtggcgtggccggccagcgatcgagcgagcgcgctcggtgaggcgcgcgcgcggggggttgggtcggtcggtcgccgccattagaaaaatgggcgcccttcggcgcgaaatggcgaagagcagccacataacaagcctctgatgaggcctccactaccgttcactcgtctccaccaccaccaccaccaccatcatctcctcctcctccgacgcgcggccatgcacgcgcccgcccgcytcgctccctccctataaatcctggctccggsgctcccaacacttctccaagcccaacaactcccaacsgtctctagctctagctaagcttagccgcggcctcttgatcgacaagccttcgctagcagcagcagcagatcgcgtctcgtcgtcctagatccccgcgacagcgaccttggatactgcctgcgtgcgtatataagaagaggtagacgggtagtgatcgatcgatccatccatccaagattcaccattcagctcagagctgcacgaacgcctctgcactgagagtttttcataggtttctgcggtg

SEQ ID NO: 6210 - DNA, 2000 bp, Oryza sativa
ctagattataataatgaattgtagctctcttgagcaaaggccgggatgttatactctattatcttaaaaaaaatttaagatcttcttgttttatatatacgtactagtagtttctttggtaaatgataattatcagaaggttctaaaaagaataggatgtgaataacatagtgagtttgagtttattttaatttgctagctactgccaaggaatactatgaatctatgatcagttcattcttctttgggagtatttctcatgtagcttgcatcataatgctcaccatataaaatattaaacattttattatttatttattttcttccattgcaacaaccacgatgagaatatgctccatgcgtaagaggatatacggaagctaaagattctcaggaaaaaaaaactccatggaacaaaaagaggaaaaacaaaattctcttagaggaaacaaattgggcctgggcccactaggcccagcgaagtcggcccagctagaactacctcgtggcgtggtcgtcgcctcgtcggcaacgagttcggccccgaaagtccaaacaattcccttatctaaaagaaattatatttttattgattttttattaatcaatcatgctttggataagagagacgatatactcctatacgtcttcgattatgggccggagcgtataacgaggagatcttgaaagttcaacgttgattctttaatataaaccctcggttttgcctggaaactcaagttaatctaaagaaacagccctgaataagtaaacttcaaaactaatatgatcgtaggttttgccttgaaactcaagttagctgtgtttagatttaaaatttggatccaaacttcagtacttttccatcacatcaacctgtcatacacacacaacttttcagtcacatcatctccaatttcaaccaaaatccaaactttcctctcaactaaagaaacagccctgaataagtaaacttcaaaactaatatgatactaatatgtatgtcccattgtccaacttagctaaatagtagctagtactaaaatagatcaaattttaagtggataggacatatcctatcatagtgcaataatttggatatatgtctatccagatagtactaggatgtctttcatccactcaaaatttgttatattttaggatttattcagctacgtaatacttctcagattaataggactatgatatatcttatccactcaaaaatatacattcaaaacttgttatattttgggaccagatctgtagtgctaggaaatgtcacattcacttaaaatttgttatattttaagttggagggagtactattacaatttttcatgtaattcaagaaaaaattatgatggtactatcacttaaatggactatagagtaatagatgtagagtaatactagatgtgattttccggtgagtatgaacgagggggcagttcacaaaatttgcactaaacctaatacagtatattccagattttgtaaatatattatataactcctcgtgaaagtaaaggaaagtggtaaaccaaaaggaaacgcttaacaactctactccgagccgtagactttatttattaacgatggaattaaagcaatatccaaggggttaaacgcaaaatccgcaacaagaaatccccattaaatagcggcgacacgccaccaaccaaaccaaaccctaccgcgacttccttccttccttccggttgcttccgccgatcgacttctcgccccccaaatcgattcgccccccgcctcgatctatcgattccgcggcagcgccccttcgatcggtgagcctctcgtctcgatcccccaacggagccggccgaattcgcgaggattcgggaggttttcctctgcgttcgtttctgcggatgatttgtttttttttccttttggtggatcggtttgatcgaggggaaacgttgaccttgggggtttgtttctgatgatcgattgatgatttgattcgcaggttggag

SEQ ID NO: 6211 - DNA, 2000 bp, Oryza sativa
cgctatatttacatatttattcgactttgttttttgaaatagataaactcattattggttaatgaatatgtgattctttcatgagacttatgttatgtgttgctatttctaaataatccctgatcaaatatcatatgtgaaacaaatatgtttagataatcagcacatgtattaattgatgatcatggtatagagataccaaattaataatgtggacacatgttggtgaacatgttgttggatagacccaacatgagacactgcaagagccatatgtgttgtgtcatcagtgatctcatttagtgttggtgttgaatccttagatctgagattatcatagttctcaacatgtgtagtagcttacttagggactgctaaacgctactccgtaattgggtagttataaaagtagttttcgggtatgctatgaaacgtgtagtgagatatgaataatcaagatgggatttgcccctcctatggagagatatctctgagcccctcgatgttgtagattatggaagtgcatggccatgccaaaggtgattgaggagtcaatcacaagttatataatctattaacaggttcgagtggatgattaagctattagaggatggcacatatctagccttgagcttaatcgatatcgtgatgcaaaggggttcatacaagtatacactagaggttcagccgatatgatctttatatatgcctggtgggtcaatacgttctgctaggggccgctattgacgtgtggactgaaaaggagttttgggttagaaccgagtatacatgaacctacagggtcgcacgcttaatgggccgaaataaggggattggatggagatccaatataagcttaattcggatagggatccgaataggagtcctacgtgccttggagtcccgagtgatggatcctatatattcgtgaggggtgtgaccggcggagatattgcatcacgtgagaaaccctagtcgtcatttccctccccgagcaaaaccctagccgcgcgcgggtgctagtacatctgcacgtggcgttccgtccctgtacgtgtggatacaggtagaggcgctgctggtatgcggtgctgatcggcatggaagtacggcgaggagaacgcacgaggaggagaaggtcgagccgatgcaatcgactacttcttctacatcgacgcgcgctacttcgcgagagttccttcgacttcttagcgttttcttccgctgcgcagcgcgtcgagtggtaacgatctatgatctaatatttgcatggttcctggttacgcgatagaaaattttgatttatgctatcgtagcctacgcgtatcccaacagccaggtgggtcttattcataaacattcgtgtgatcgtccactcgcaaagaatgcgcaactattgtgtcagttatcatgattagkgtttttttttcacacgatggttgttgtaattagcgtattgttttaaagttattagctaggagtgtcttttttaaaaaaaaaaatgattagcattcctgtttcgcaccttatgcatatttagcacctttaggaatgattttttaacatgttaatggctttatattcacaaattttggctaatttaaataaaactttctgttaatactattctctacttaaattgtcaaactttatactcaaaaactttctaaaaaaatttacacacgtaaactttatgcacatataaattttgcaaaaataaactttgcatgtataaataaacattcaatacaatatttcatacatagaaatataaagtatagaaactctatacatataatattttggtatagaaaagttataaacatagaaatattcatattaaaaagcgaactttttactcatagcttatgatcttgccagctggcaccgtcaccaatctcaaagcaaccctgctcccaccctttcccctagttgtggtgaacggataagcggaagcagggccggccggaccgaccggcgagacagccgtaaccggggag

SEQ ID NO: 6212 - DNA, 82 bp, Oryza sativa
  misc_feature (1)...(82): n = A,T,C or G
ggnttwaanwwggggggtttccgagttgatttggggaggggtggcggtgacacaggggtaaagcttagcagggagatgaggg

SEQ ID NO: 6213 - DNA, 2000 bp, Oryza sativa
agcttggatcaaccagtaaaaaaaattaaaatattctccacttttgctgtcagtcaattttctcagtcgttatcaaggatattttttttagataatcgttatcaaggatatgggctcatgaatgctagtttttgttgcactcatgcaaacattaggatgaacagtcacatgtaaggaattctgtactgtgtccctttttttcccygttgtaacaacttttttttttgagaaacccctgttgtaataactttgatcggcaggaaaccgtacaaatcctgaagagagtttttttcttcaaccaaagattggaattctcatacaccaattttgaaccggcaaacctgataaattagcggaccacggagtaatatttgctttgcatcatggctatcaaatatttcctgatattatattgttttgaacaataaagtggaagagctctctgacaaaaaaatatgtgataaaaacaagattagtagaaattagtgacataataaaaatacaatcaccagtcttttgtttgtataccatccaagtgcccttttttcagaacgttatcatcctctttatagcacggagttgaatctctttcaattgacttgataaggcttgcacccattttaatggtatcctagtaggaagctaagtcaaaagttgtactttattagagcaaaagtccataattaaatcctctttcaagtttcaacaatatgaatgcgaatacatgagcaagaaatgagaaccatagttctttttggttcatgatggaaacatgcatggttttagatttgtctatactcttggaccaacagggtcacagtacttcactttgacacttctgataaaatcaacaaaatgcaatactttgacatagtctagcaccacatccacaccaaggacaaggagtgctactattgtcaatttcaaagatctcatgcatcagtccatctcctgattaatcactgtcctgctccataaaaaggactgttgcaagaacaataaatcatctattccatttatacataaaataaatctattataaagggagccctggttagcttgcctggtcaaacaaaccaccagcatagatagtgccttggagccttggaccaattccaggcacatcccaacaaaccaaagtcgttaacaattgtcttcttctataaacattgttgttttttttaaacacctgtaatgaaatcattatcccttttatttgaattatttttctttcagaatatcaaagtagacccaatattcttgtaatcacttcttttggaatgatgctcctttataagctaagctttctaaccatatttaatagttcgtatattcttatatttacatgcctatgaaaactgtattttacttttatgcataagtaaaaaaaagtatttttagagaaaatgaaattcttttattgtatacatacactattcatgaaaggacaacgaattgaacctaggctgtgtttagtttgcccaaattctcaactttccatcacatcatatcccatcgaaaatttttctacacacataaactaccaactttctctcaacttcccaacttttccaccatctaaacacagccctacttatattcgcatacatatatatttttagggcaaaaatactgttaacaatgaaaaattgccaatacaggtagtagtattactctaataaatacatggaaagttgtaaagaaatttgcatttggaaggaaaggtgagagctgaattcagtcagagataggccagccacatgcagaaagaaaccggagacttttttttttttgcagcttcttctcctcctcttcctccatgagctctgcagtctgctaacttataatccccccttgacttgccattcccttccccmtactcttcttcctcctccctttcttggcctctctcctccacaacccacccttccttcctcccttcctccccttggtgcgttcttgattgctgcagagagggaaagagagagagagagggagag

SEQ ID NO: 6214 - DNA, 2000 bp, Oryza sativa
aatcaccacttgaaccgacaaccgagtgaaaatataagatttgagacagccggcgaggagaaatcaagccgggaaatcgtgcgcgcgacgcgcaaagatgttgagctcctacgaaaagcaatccatcatccatgtcgtgcggcgcatgagttaataagcctagcattgagctaagatttttctctggtcaacccatgatgctttgtgccaaaaaaaaaaacacctctggttaattccgtttaaaaaaaattagatacttggttccaacatgggccaagaaaaaaaarggaaatccagcttattaattaaccatatctkgattattttttgagataataaacatatactagccctgccaatgtggcattaactgtcaggacatataagaaaactgtgggtgatgcctgctcgtcgttcgcctgaaataattcagagtctggttctgaaacagttggaacccatgtgcctgcaactctgttacctagaattcctcttctctgtttgtgtcttttttattttgctaatctgccattacctagaacacatagtttagccaggatcagattgactttctggtgaagcccacatggaaaaggaacaatcatcatctcacctgccaagaacgaaacaaatgagaacatatcaaaacaaacggctcgaactcgaatgagtacatcactgagctaatgtcgatctcatttccaactctgatttgagtggcagtataatgttatcctccattggaatctcgcaacaacctttaaaacgatatatggacgcttctgtttgtgatcttccacgtatcaatgtcatgatcatggttcaagctttagacaaaactttttttgtgttgttttgaaaaagtttttgtgttttaggcttatcatgcatctataatctgttggcttaagggatgcagccattgttgttatcccaggttaggtcggacaaatgagttcatttgaatgggagctactgggtgcatgatactcctatatgtatgattgacctatctggcgcccgttgggccggcaatcccggaacgaagcctaaaactggggtcaattttgggtcccaatgcgacctgcctagatgaatactgcatgttttttttttgtttgattttgataggagtacatctgtacatgaattggattagcactactccagaaagtgattatggttcagaaggcacttagacaccaccagaaaacactgttaggcctcctttgaaacatatgaataagaaaaatgaagcattttatagagagaagttttacggtacttgagaaagcaactcgagggacctatattttacagaatatatgaaagatacaggagtgaccatttgcatgctgcgcagaaatttgatgagagattcaaaggagaaaaagctcccatgaggttgaaccttatgttaaatttgctccaaaactcttatgattgaatcgttacataggaattccacagtatccatggccccattctttgcttaaaagggccatataggcaaaatttctatatgattctacatattcctctatctaaaagaatattttgttccaaagtgggctagcttaacgataccaaaaccacatggtatttctttaggtttcttacaaagttacaaatgctttccagatttaattaagaagcttacatagttttatgcttttcgtatcgtttgcccttattgtgcattcgaaggcatcaccttttctgccctacctctccccctcttttatacacaccaaatatgcaaataccaccttttgtatcagcaacaactactaatccatctcaagccaaaatctccaccactaacccaatcattacaaaaaaagaaagaaagaaacttattagcatctcacctctcacaccactgctagtattacttatagctggctaaaccatcccttgtgctgtctcctctccctccgtgttgctcccttcttcttcttcttcttcttcttccccctctcatgttctcatcgtcggcc

SEQ ID NO: 6215 - DNA, 2000 bp, Oryza sativa
atcttcctccaactatttacaaaatttcaaattcatgtacattataaaaaagcagggaaaaaaagaaagaactaatatatacttccatactctttaaactctatgtttttgtttattcttttaactgcttgaacataatgactttgaattagaattcttttttcaaatccttggaagatgtatgcatacaccgcactcgcatgctcgcgagtatgcccttttaactagggatgaaactggttcggatagtttccgtccgtccggaccatttttcggattcggatagtttcggtcggaactatccagaaattcttggattcggaaacgaattcggatttttttttctcggaaacgaaaacgaatacagtaagggtactatccgtcggaatcggaaaacggtcggaaactatccggattttttttcggatatccacagacattgataaaattttagaaaaaatacgtatatatacataactttttcatacggaatcagatgaagacaaactttatatcaacattgtagagcttgatgagatctacaacttttttattgactattttattatttgagatcatttaagggtctaaatatttattataatataccatattaatttttacaaaatctcagatctacaattcaaacgacatctgatggagatgtgttctatatcaaagttgtagagctcaacaggatctaccactttttagtttataacatttatatttgaaagcatttaaagcataaaacaaatattgcaagtttcgaaaatgtgaagtaaaataaataacatctccaatttatacaatggcaagtaagttatacatctaataaaaggtcttgagaatagaaaatgataatcatatttgcatatggatctcttagagaaacaaccatgaaaattgattttcacatacggttgtgagaccatctacaaaattgacgatataaatgttggagatgttgaactaaaataataagtgatatctcttccttgattaagaaactcaatttgaggggctttttatataccggtaaatattcgctaccgtattcgatccgtctcgtattcgctccgtatctgtattcgataatattcgatttcatttccgtatccgagttttcgattccgattccgattccgaaaaaaaatatgaaaaaaaaaatatgataaagctagtttccgtccgtttccgatccgttttcatccctacttttaacacacggtcaatacaccacatacaatataattgtgagtttacgcttttaaaatatgtgtatacacatagggaggacagataaatcactgcaccagaacgtaggtaccgagatttttactctaatgtttggagtttggaccaacacaacaaccctgtgcttctcaatatgaagtcgaatctaataaagcgctatgctacgcttcactttagcgaggataaaaaaaataggagagctgaaaaactaataaaaatactagaaaacaatataccgtttcaacagaataactgacgcttaaatactaagatatattttctataagatatcatatgatagtttctacgagatatcatgtatgatacccttggtaccaaatctaatacttacggtaccatgctgacaccatcatgatacatagataccagagtctgagacaatacctatctactaatacggtatcataggtactggatttggtacctaatatattgtgctgatataagcacaaataaactaatattttgttggaatggtatagtgctccgtaataaccctcgtatataatggtatatatgtaaaagaaaataaagaaaacatataatggcgggaaacatatctaatgtacccctcccgtttgctcctataaaatcccccmacccccaggtcttaacggctaataaactctctctttcttcccttcctccaactcccaaccagtcaaccaccagaagcgagagaaagaaaaccgaaatcacgcgaaccgccgccgcgtgacgcg

SEQ ID NO: 6216 - DNA, 2000 bp, Oryza sativa
atgaaagctcgattgacccaaaatttaaagcactatgacttcttgccgtaccaaagtaattaatgtaagtaggagttctcctcgtgcaaaatctcgcttgatttggaagaaatgaggttaacaagatgatgctaattagtaatttacacggagcacgaaatctctgtcctttaatttccttttttccataacaacaacatttcactgcttcccatagccttatcagaacagtcaacagtcatttcatttcaatctgaactaacatttttacgaattaatcatcaaatcaaaactaacattttactacattgagctttgctcttgcagctgtcmaacgaggagcagcagcagcagaatgcatgggcaagtgttsswtscaaycaaraacccgagyaggaratscmgaagaagagaagaatygctagagsmaagaagmatttgacgttgacgcgaatcaaatctcagtgaagtgcagttgagagagctttggtccaaaatcgagatggggatttgttcttccaaagctggggagattaatggtgttgcctgctcaatttgccgggaattggggagacattgggtttgcatttagtacaaatcacaaagctttttgatgaacattttgacctgactgacacaagcgcacgggcgaagccttttgtcctcgagcgattggaaggagcaagaactctcaccccctgtgctgaattctcgcgtcactgtccatgatccagtgatcatttcttggatgtttttgtttgtgtgtttttgcagttagtaagataattaagaaactacttaattaccagttgtcttgttcttcattttcatggatcagtttgcagatgagatctctcttcaatgaaattggtggctcaccgattcgttaaaaaaagtttatagatgagatatttttccctttctctagcagaaaaaagttcattttgaaatggacatgtactttccatgaatgtttgaaacacaccgtgtgtttgcatatagtaattgaatctaagatgggattaaactattcagcgtgcctatccagttttctagtatgttcagaatcttgcaaaatatttaagaatgcaatcttatggactgtggaataataattccatgtggagtagtaagagtacgtgatgagttagcataagattaaccatgctgaccatggagcaaattggaccggtttccagcgtggcaactcagctgcaattaaatttagtgtaacagaactctacttagaataatagaagcttcccttccttccaacacttagcagtgtctcacacgctagctgataaaaaaaattgttgagctattacactgcctaaggccatcactatcttatgagaattcagcaaaaaacaatatatattttagtgactacgcattactaaagaaatatattactcaggaagaatagaacatcagtgagtatttcagaatcccaaaacatcagtgagtaggttttagaatcagtattaaagaaatatatcttgaagttcatgtaaccaaaattactcaggaggaatgaaacattctaaataaactaaatgtattggtgtatttggagaggctaaaacaaatttctgaaaaattcagaaggctaactgttgcatagtttaatgattgttttgactgccgtacatgagtattctaaagtgtgaattgaaagtgacggtaatctgctgagcttgttgttctctttgagacactgatccgggattaaagaaaccttgacagcttcaaatagagaacacttgtttaatgcagaatgaaatccttcagacttgtgggcctcatctagtcaatctaagcatcacaagctttcatatataagtacacatggtgtgtaatggatttgcaatagtgatcaactgtgtcttcacctcactggcttcatccctagaagccattcactagctactgcacaagtagtacaggagcatcttttgtcagatttgcttcaggcttgatcttttcttgtgtgagat

SEQ ID NO: 6217 - DNA, 2000 bp, Oryza sativa
ttcatcttcatctttaggagattcaaacatcaccttagagcgagcaggtaaaatagcagactataagtcagctgtaaacatattttaagaagataaaagaggagagataaaagtggcgggctacagatttgtagccagctgtatcacggacttaagacgcatgtgtgtatgataggtgggaccagatattgattgtgtaatatatttttataggtaactattgtatggattggctattaaattgactatatatgatttgaagtcaacaattggctatattaatagtatagccaactactagctctaattcatctatagctaatctaataactcattcatataataattacatactacactattaatacctggtccccctgtcatccacacacttcgtcttggaattcgtgctacagctggttacaaatatgtagcccgctgcttctcttttttctcatttatctttttaaaatatatttacagctggcttatagcctcctattatatccgatgttagtctcctcctgatagaacataaacacaagctcagaattcaataaatccaatcgtgctgctgcctgctggtcaagatacggtgggtggtgcatttccattccaatttccattccactggcgcgcgaggaggtgggtgggacctacccatgattctctgggacccgccgatgagccgccgggagaaatgcgccggccggcgtcacctgatctgatcttcccttttcgtggtgcgagtgggaagcgtccaaatctgatcctggaatcttccgcttttccgctccattacatcacgacggccgccgcagcagtcaaagaccacttctttttttttcctctttgtattttcttttacgaagaaaaaaagaagccgccgccgcagtaggaactaggtagaggatgaccacgaattccaactgcagacggaaatgcagacaccatggtggaaataactgtgtaacctctgtattaacactgttgatttttttttgagtattcatatattttttacatgtaaaaaggtttaagtcacactgtactttaaaaatgtttaatgataaatcaagtcataataaaaataaataataattacataaatattttaagataaaccaaaggctaaaacatattatagtccatagtgtagtaagtatacggcctcatttttttcgtttatatttatgtttatcagccaaaaattaaattttcaatcttaaatttaaaattatatttaatattttctcattaaagtttattttctagcctttgattttagactaagaatgcatatataaattttatttataaattattatttttaaatatgccggatctatagtctaccggcggcggcgatgtggcgcctcggggtgcgaggaattttcctcgcctttccttttcctttccaaggcgaagagcactttttggcttcttttttttacccacccttcctcttcttctcttctctcgcccaaccaatcgccttctcggattctcctcctccgcaagcccagccctgacgttgtctcggacacccaaaggctgtgtttgatctccgcccgccacctgtcttcctcctcctgctgcgcgcgcgcctgcttcttcttcccgttgagccagagagcggttcttggtgcaggtgaggcaccaagatctccctcttcttcctcctgcgattcagcgaaatctttaggtaggtaggagtaactccaagtcaatgtttttctttccctttttttgttgttgttgttggaattttcacatgtgtttggcatgatctcgaaacagcagcgatctttgtatgatctccatgtttgttgggatttggtgatgtgatattgtgatgtgattcatcgggatcttctcctcctttttcgtctggtttagatgctgcatctgcatgcgtgctcgctgagaaatcccccgtttgttttcgctcatcttgatctgtgtctgttgctttcgtctcgtcttgtgcagagccgggg

SEQ ID NO: 6218 - DNA, 2000 bp, Oryza sativa
agtatgttactccatccgtaaaatataatgcacccgtcttttataaaaatcaaaaattttaaattgtactactaataattaaatttacaatacgtgagagtttattagttacatgtagtactattatattcatatttgataagatttttatatgatgttaatttcgtagctgccgatgttatatcatgcaaaaaattaatggtcaagctataacataggagatcaccacgtaaaaatctaaatcaccttatactttatactttagaaaggagggagtatataattttgaataatgaaggtgctatacttctttatattgtttgatcttcagacaactcatcaatcaacagtcttggaaaaaagcagccataatataaaccttaattgatatagtggggtatttctataattaatctaggaactaattacgttatcatttatctctgtgtttcctcattatcataaaaatggcgaaaaaaggagggatcacctacagattaatttcatttgatcagcacatactcgaatccattatctctactacgtaccgtaagagcggtgccatcctcctgccagaccatcgctccttttccactaaaaaaaaacatcctaactcgaaaataaccaacccataaaaaaacagtatttccacgtgaaaatcaatcgactagaaaattaattagatagacgaaccacagctcatagaatcatccgtgtccatcttcctctagaaaaatacagttttcaggatattcatccctaaactttctctaaatatatatgccgacgattaacttcggcaaaagaagtgatcattatttcactatatgaaaagcaagacaaaaaatatcagtgatgagttaagtcaaccctccacgaaatcaacagaaattaaaaacttgtagacgtacatgttcgatgtagacacatctcacagatacacacgcatatactactatattttttgccatgttattcaattggaccatgaggtcaatgctagattgtgtagatcagaaggcaattgcaatgaacattcttctcgattttttttagacgtacgtctttcttctcgaatttttttttgacgtctttcttctctaatttttaaccgaatgaaatatttgtccttaataagatgagagtagtttggtagctgtgcactgtgcaagggtactgtgacagccgtacgtccaatatccaactataaatatgtacagctgtatatacgtatggatacatgtcatccttcaaaacggtacttgtgtggcacgtgtatgtcaagaaagagctgtagtgtactgtgcaaatcatttaaaatcttgaagcatgcctgatcatgcataaacatttgaatcgaaattcacatgcacagtttcgaactcttggctggatccccgtagatgtccgttaaaacgcggtggatgtaagtgagttacattgctcaaattaatggacacaaaacatgtacatagtatatgcatgctatgcccaatatataccaactccaaccgggaaatagtatcttaattcagcatacagtaagctgaactgtatggattcaactattcatagtacggcaggccctacacaatttaattacgttgacactggccggtcttatacctaatacctccctgaccaacagatgcgaaaagaatctaaattaagcacgctgatttcattaataaaacgtctctaccattaagaattgacgactagctagctagtatatatgtgtgtatatatattaatagtactgctggaattatggagtattatatatatataaacgaagatcactagacgccgcaccgagacagatttacatattccatcacaaaaagtcgtatcttgcgcctatccttttccagcgaaggaaaagaaagaaaaaacaaatcaaaagggaggtgagaccggttgaaagctgaaaccctcctcacttccacgcctctctttcctttccacacataagctagctccccatactctcacacccc

SEQ ID NO: 6219 - DNA, 2000 bp, Oryza sativa
ccgcatatatatgcatgcgacaaacttaatagctactccatccgtttcaaaatatttaacaccgttgactttttagtacgggtttgactattcatcttattcaaaaaatttaagtaattatttattcttttcatatcatttgatttattgttaaatatactttcgtgtacacatatagttttacatatttcacaatatttttttgaaaaagatgaacgatcaaacatatatcaaaaagttaatggtgttaaacattttgaaacggaggagagtactatccagttgcactgtatactccatatatagtggcagtgctagcaaagtcaaactaatttaattaattattaagaagcactcgtatgtatatatacgtacagttgccgcgctcgctgcagcaagttgatgatatcgactagctaagctacccagttagcagccggcaggaccgatatatccgcaggcggctaaagactggagtaattagcaagccagtttgagtagtaactagagtaactaataaacacatgtgcagaaactgagattttgtaatgagtagaagtatgtatctagcttcacgagcaagctaatttaattaaggtascgyccwtttttttttaaaaaaaaagaaatcgtagctagagaaggaccggccgggaaaacaaaatcagctgattaattgacagtatatacagtatagctactgtagtaaattgctttgcattgacgttgaaatctgaaagcagaataatctgcagtccatcggtactctctagctagtctgtacgtagtaatatctctctctgtctactactagtactgcaacttgttttgactgtcattgctggagtatactatatatgattgataataggagtagtaattaataaataatgtacacttgccgccggaatacatccatccctacgtactattcaccagctgcggtcatcttgactccacacttgatcagtagcactcatactcaaactaaccaccatttgctagtacttcctctgtttcacaatgtaaattattttagcatttttcacattcatattgatgttaacgaatctagacatatacatctatctagatttattaacatcaatatgaatataagaaatgttagaatgacttacattgtgaaacggaggaagtaccaattaagccttcttttcctttggtcaaataaagttaactgaaaatgacgttgtacacatacacatccatatacagtttccggccaaaaaattactaacaccgttttgactaatctatgtgtatatcctgatactggccgacatcaacttaattacatcatatcgacccccctgcccaaactatcggacgaactaagctagagtgtagcaaaatcacacggtacagctaccatatattagcttgatccacaagctccccaaattcccattaattaattaacctgcagcctcaattatttggtctctgactcgtgcttaagtatacactatcatgcgcaggaagacagatttacaggtggatggatgatttgtgatgattattcgtgatttgcgataaatggtccctggtaattaattatttgagagtacagacgaaggaatgaattaaaattattaattatccaaaaaaagtagtatttgtaagaaactcatgcatgaaaagtctttttaaaagaaaaatggcaccattatttaagtacttttgcagtgagcatatggtacttaattgagcactgtgcatgtggaaggaaggcaatctcacaacaattaaattacactctgttcatgcagttcagtcgacgttatacatgcccttgaatcgaatcaatatctttgtgtctgtctgtctcttgctggactctgcttctgctaagcttatttataggcctccactcactcatctctccttgcactcctccctgcatgcaagctcctctatctagctagctactctactctactcgatcaagatcaagatctatcatggacgcagcagcagcc

SEQ ID NO: 6220 - DNA, 2000 bp, Oryza sativa
cttcaaaaccccaccagtggtcagcaatataggacttcatcttttcacaagtcatgatcgggatacggaaacaactcatgacaaagtcgggtatcgcctgtgccactgatttcagcatggtttctttacccgcccttgagagaggcatgtctgtccaaccattgactcttttccaaattctgccagggagaaattggaaggagtttgaaactgccctgctgatttcagtaggcattccaaggtaggaatcttgtaggatttccgttgacacttgcaactttgcctttacttcattccggatgttgcttggacatctttttccaaagaaaatggaggatttttgcatgttaattttctgtcccgaggcatcacaataggcttgcagtgtggatttgatagcctggacacttctgtgatcacttctaggaaagaaaatgctgtcatctgcgaagagcaagtgggagattggaggtccttgcctgccattcctaatcccatgtagaaatccttgttgttccttcttctgcagcatgcaagagagcccctcagtacagagtaggaagaggtaggggcttatgggatcgccctgccttattcccctcgagggaacaacagtgtcggtgagctcaccattaatccggattgcatatcttgtcgaggtcacgcagcgcatcaccgtattgatccagtcctgttcaaaaccaagtctcatcaggcagccatggagataagaccactcaatcctatcataagccttcatcatgtcgatctttagagcaaagaaaggcttcttgttgctttgtttcttaatggtgtttaaacattcataggccacaagagaactgtcagtgataagtctccccggcacaaaggcgctttggaactcggagacaatatcaggaaggaagagtttgagacggtttgctaagaccttcgaagcaattttgtagagcacattgcacaaactaattgggcggaatttggagagatgttcagggttgtgtaccttgggaattaggacaatgacagaatcacaaaaaccttccgggatctcctctcccaaaaggaaaccacgcactgcattgcaaatctcccctttgatcagtccccagtgggttcagatgtgaagagatcctcatagaactttccggccatccggccccggtgctttggttgggcccatttggaacagcgcatctttgatctcatcatcagagtatggtttgcccagttcctcattgaccagcacatcaactttgattgggattgcctctaacaccacatcagttgacacacaaggttcagatgtgaagagatcctcatagaactttccggccaatttttttataccctcctgatcagtgcatctagtgccgtcatcctttaccagcacagtgatcttgttggtgcgccgccgtgccgtggccctagcatgaaagaaagcagtgttacggtctccttctcggagccagtccactcgtgacctttgtcgagccatgatttcttctctctcaaagagctcacacaactgcctttctaccatcctttcttcttgtatcacactctcctccaaacctgaagaccggagtgtttttagcttcctctccaatctctgtatttctttgcggatcgagccaaaagacactttgctccagtcacgaagagatgcagccatctgttgcatatttctccaggtgccctgcagagactgtgagccatcactgccccgtgcccatgctgattccaccacctccctgtaatccccagctctgagccaggcagcctcaaaacggaaaccttgttgcacaggcgtcctccctgtaatccccaacccttccacactcttcactcctctccctccatataaactccaagctccccccctccatctctcccaagtcccaacaaagaacgcgacgatcgcgcaagcacccacacacgacgagagagagagagatcatcaccattatatccaccaagcaaagtagtttttgttatcg

SEQ ID NO: 6221 - DNA, 2000 bp, Oryza sativa
ccggtcattgaccaaggatcgagattctctcttgcagttgcatgcagctgccgcactttgcactagtttacccgtccctagaacggaagcgaagaagtgcgattgtatcggatctctcgttgcgtatgaacagacagaccccttggctgttgtacttgtaccctctgctagcctggactcgagaccagaaaggcatccatctgcttcacctgggcggatccagcattgggggcggcagagtctcgagcccccactattaatgtaaagataataagagcctctacgaagatcccactaaaattttttatcatatgtagatgggagaggaagtaccctactgctatttttttctggatcaccactcagcgtaggctgtgtaccttccttcccttcccgccgctttaggcttccacgctttgacacgcaatgtactccatcatcgtttaacagagagtgagaggtgctcgttcttgggcagatcatttgtttcgtgccgtaaaatcaaagaacgtgacggcttcaaagacagaatgacagattctcgctcgttcttaaataagccctgcttgacgcgtactaagctggaggaatagacaacggaaaattcaacggagattacacatcacgaacagcgagcttagtgctcagcctcggtagatcattcctgacttcttgtggagtgaggagctgtctggcgccaacgaacagtcggacacgttcgcctccacgttcaccggagggaaaaggctgcaaaagccaacggaccaactaaaaatacggccgcgaatacatacggtgtcaccgcgatcccactcccacgttgtaaaagagggccgtaagggttggtttggtttgtagtctaaataggtcttatcaaattttgtcaatgctaaattttagtaaattttgacataactaattttggtaaggcaaaattgtataagtttactattaaaatggtctattttcttatatatgctaaaatttagcttcaaatcaaatagatactaaacactattaaaattaacaaatattgaaattcctaatttagctctcaaactaaaccagtcctaactactgttaaaaatacaactgctagtctggtactgtcttcctgtggcgcgtgttgtgccgttgagtagtgacgtgaaaacggcaacggtcaagcgaacccgatgcagcacgcacggtgggtcacgcacatcaacggtctgcccgacccggtcacccagcacgtcgcgcgcacatggggcgagacgagaggagctgcccgctgcctgcctgcccactgcccggagtgtccggggcgacaaagcgtgacgagaaaagccacggccatgcttgttttacagtgcttgtaacgatagtggtacacgagaaaaacacactgtagtaatgggaagaaaagaacggtctagtatagctacgcaataatacaagctcagtcatcagtgcctttccccggccccttctctctctccacggttctcttcctgaaaaaaggtcaaggctattcatcacggctagcttcacaagcgggcagggggttccacttccacacttccactgcccatccacacactgtgtcactggacacccacacccatatggagcgagaggtctcagcacagcagttgcacttgcacacctcgcagctcgccggttatttcttttccagctttccattataaatcaggccaccactgtggtacactacacacgcccagagcccccctgcccgctaaaccctgcattgccattgtacagaagagccagctagccagccaagcgcccaagcgagagcgacccattcctctgatctctgccgcgcattggggcttgggatttctcgaagccataaaaggggaaagctccccaaaacgaagcctaccaactctcccaactccaagccgccgcagccgcagccgcagccgcagtgctagcgagtggagggggagtgcgagaaggggaggaaaggggaaccacacccacacccaaca

SEQ ID NO: 6222 - DNA, 2000 bp, Oryza sativa
ggcggccctcctaccccggcagccgtcggtgcggcactcctcccctgccggttgtgctcctcgagaggagaaaagtgagagaggaaaggaaaggagggagaggggctgctgggagagagggagtgctgatgtggcatcctgacatgtgggacccacggtgactcagcagccacgtcggacaaaacctgggtcaaaaccgccaagggaactagtttaccctggttttgtaggttgcgggatgcgttgtgtccggttttgtggttggagaacgattttgtaactcgatgacaagttgagggaccgtcggtgtactttttccttaatcgcaggctcgcagcagctaacacttgatccactgggccgtcatgcctgaatcggcccaaaggagggagccagcagatgatcaggtacagcgcgggacacgacagcgttggtgtcgtgtggtcatggtcgcctccaaactccaaagtctccaagactccaactgtccaacacctcatgcctgccggtacagttttactcgtcagcatccccctttttttttttttaaaactgtcagcatcctctctccggatactccgccacctgtgtgtatcttttttcccttggagaaaccgttttgctgataccagcaactgcccggccatacaataataatatcatgtccagatactcctatacaattacaaaatagcttgagaatgaatagttctgctatcaattattcaaaaatagagggtgtaataaacatagagttgtatttatcttggactctcaggctctcagcttaccattttatatattagtttaatttgaaatactctgaaatattaaaatacgcaatgtaccgggcggacgactggtattattactgatcttgctcaaaatggtcatcgtaatttcagaacgaactgatcgttcaaacgttcctcatgttgcgcgtgtgctgcaactactgcacggtaaaagtgataggaatcggtcggaaacagtattaatgtttttattatttttacaaaaacgaattgaaataattggaaattttcatatttatatattaaactattcagtatcaacttcaattcgacgtcaatagaaattagaaaagcataattatacacagtaataggcgttcaagatattattgttattatttagttttgtggaaatggtatcaacgtgatcggaaaattttgtacatgttttcaccctgcgggatatctcaattccttctcctccctctaccgccatatcagcacacgttttagagcaccaatcataacccataaatccgtgggctactcacttatttaatttatatgtgaattcgtgacctgactcactcacatactatcaaaaatttgtctcagtcacccatctccttctttcctggtccgataagggtttatcctacggttcgacggttatcacgatagtcgtgcggttactgaggtataccgtgatttaaaaatatgataaagttaccgcaggttttaactgcgcggtttggtaaacctgttcctcctcaccaaccttctcctccggtctccttatgtgtctcaccgaggcgagccgccgcgagaccgcatggacgcggtccacgcacctggcggtgcacctcctcctccccggcgaagaagacgtggaggagagtaaatgagcaatcaggcccacggcccaatcgccgtccaccacccaccaccctcagcgacccaaaaccacctcaccaacccaactctgtaccgtactgtacccgccctcccctcccactgacactccgggcccacctgtcggcgcgactcttccacggtccccttctctcctcagagattttttccacgcattttttaatttttttttctgcagttcacatgctcttctcccactcttccgccgcgctatataaaccgcgcgaggcgtcgttgcctcgtcggcgaagtcaatccggcgatccccggcgagcgagagatcgaagcaagctgctacacagatctcacgac

SEQ ID NO: 6223 - DNA, 2000 bp, Oryza sativa
ttaagataaaaagacaggacgaatcgagaagggagtactatacgccacaagctttggcattagctaattaatatcggaacatgaatgttgccaagtcagaaagctaagctagggaatgttggtgacaaccacgacctgccgcaaattgacttgcaagagatcaaattaacaatgtgtataatatgcttctactattaattatatgcaagttgccacaacttaggttgagtttcttttgtctactttctcatcacttccctccttttccacgcgcatgcttttcaaactactaaacgatattttttttaaaaaaatttttatacgaaagttgctttaaaaatcatattaatccattttcgaatattaataaaccatcatgtttttcgtgcggggatatagagttccaaactctacctcccgaatgcggccttattacttttatttctcactactagatactaccaagtaccaagagacaacgttcttagcttataggaatatactcgctccatttacaaatagatcgcttttgattttgagttatcttgcttaatttgaccaactatttttaaaataatctaactatttagcctcaaactataattgaaactaacttactaatgcatattatgttgaaatctattcactttcatatgacttaaaaagtagcgctcaaagtttgtctacctcttatcaaaaccaacaattataagtgatgaaagggatcggagtgaaaaatcttagctacattgtaacattattatttccagtagttattctttatcatcccgttgccattaattataattcagtattattttatctatcacatccacccctcacaatcctcattgctgtatgttgacttttttttgcccgggtcgtctcttgtataattgatggtacattctctctttaccctctatatgccatctaggatcttatatgatatggcaatttgcaaagtgacagcctagctatgtatatattgttgaacatgccctaacattcagctaagaacaataaactgacctgctctgcgtacagatcgattaattgaacctcatatcagcccagcaactcatgcaatgaccaccgaaaaaaaaaacaaaaaaaactcatgcaatgaaactttataaccatttagttaactagatgagaatgtgcattgtgggaggtatgtatatatgtgaagggttaattgtagagtattcccgcacaaagcctggtagagtattttcagctaaatatctcgagtgaagtactcacttcgtccaaaatataagggattttgagtggatatgacatatcctaatacaataaatctagacagactccctctccagattcattgcgctaggaagtaggaagtgtcacatacaccaaaaatcttttatatttagggacagaaggagtattaaagaattcatcagcagttttgttgattgttttactggagtatttatgcccataaagaatattgtagtatctagctgcacaatcactgttcaaagcaggacacaattaaaatggagtagctggcttaattagtctgttgatttcttttaaactgtcttaaaaaaaaggttctactcctccacatatttatgtagtgacggacctccagaagaaaaagaaaataaaacagtaggggagagcaatatctagctaggtacactttactccaaagcatatatactctgctcaatgctttacccagtttgtagttggattatggcttccatgttcataaacacagctattatctcccatataataattatactccatcattcattgatgagttcaattaagtaactatgaatgccccaagacttagtccggataatgcatataaccatcatgcacatgcatcacacctataaatacccatcattactacatactaacacaccatcaccctcatcttagcgagctagctctttaattagcagattaagcagcagcagcaagaactgattaccaagagctgcgcgcta

SEQ ID NO: 6224 - DNA, 2000 bp, Oryza sativa
tgcagtcaccactgagatgaaaacggagtagatactgacaaataatgcttatatgatattcattttcataatttttttacaagatacagaaacgaatacgaataactctgatataaaaacaaatacggattctctcgaatactaataaggatcgaatataatcggacacgaataaggaaacactttttctcggaacacgaaaaccaactcaacttctaatagaaacaaatatcattatatataattagctcattttatataaaatatagtataatttattagagatactactagcattgcagtgtgctcatagtattttgagtgccaagcattcatcaggccaggcccaccctacccgacgtcctgtcatcctgctcccaccgttatcggaatatacgatttactttgataaaaacaacttccctacttccgtcctcaccccacgtcctgccatcccgctcccaccattatcggagtaaacaatttacttcgataaaaacaattaccttgcttttgaccccaccccacgtcctaccattctgctcccaccattatcggagtaaacggtttactttgataaaaacaacttccctacttccggtatatattctttttcccgtacccaaccaaccactttcacatcccagcccaaagatcagtgacacaacatggaggaggacgacggcaccgtgacggctgaaggtggttgccggcgagcggtgcacaccggagaggaggacgatgacatctcggcggttgaggcgaaggtgttgctttgagcctcgcctcaccagcaaggaggaggtgttcacctagaccaagagcaacaatcaacgactgctccaagttggcgacattgacagaacaagcaagtaaggaaatgacactccaatttgtatctgcatactctccttcaacttcacgcgtgaagccccaatttctttttgaaaatcaaattaacatgcaatctacaatattacctggtctgaattgctaggctgtacaggtcctacatttgcacatcgtgctctatgtggctggccacagagaatagggtggagtcagccgatgatggaggttgtttgctatttttcttttgctcgtcgtctctatgacatgaacgagaatggttttgctttttttcttcttgccagataatggatggctactactatgcaacgtcgagctcatctctataccacaccgctacatatccttccgtgattctatcaccgactgccgctcgctacccggttgccctctgcaccccctgtcataagacacggaccaacatctccatccttatcgcaagatccagcaaagccaccaggatctcagcttcatgatggtttttaggctggaccattttttcttttctagtttgattcacctgtgagtaattttatcactaatgtgtgattgagcctataaatattttattcgtatattcattttgtgattcagactamcaatacttttattatcagtttttactcctatacyatgtattgaacacatcagtaatcatattactgtatggtgggatacgagaacatgggctatataaagaggaatgtggtaattgtcttaattccccgtggaggttctggctctattactcgtcaaggccggcctgacttcactagcatctcctctgccatgagctcgccggcgccacatccatctgcactatcgtcgccgccgaatctctctctctctcatcatcgacacggattgctccacgcagaggcatagcttcttgcatgctgagccgccatcatcctcgtcgctggagcagcagcacgacgagtccatctggaacatgacgatgttcgcgctgggggtagcgttgctcgtcgaccaccggccctatccattcgccatagagaaaggggaaaggggagagagaaacagagggatgagtagagaaaccgggtcaccaatgatgccacgcatcgctgccgcgcatctgacctacccacccatgctcctgctcttcc

SEQ ID NO: 6225 - DNA, 855 bp, Oryza sativa
acggggaaaggaggcggtgctttagggattggttggttgcagaattcttaaagcaatcagatggtctaaaatttacaagatttctatgggggttttctgtcaaatgatctctagacagccccttaattaaaacttagcatcttcattgtttcaaacttatgatggttttacacgcatgcattctattctttatacaaatttacgctgtagttacaccctacttctatcccacttacacaccacttacacatgtaattttgagacttacatacacactacttacacatgtaattactatgtaattttgagacttacatacataattttgaatcttacattataaatacactaaatttacatatgtaatttaggtacttacaatgtaaatatatgctgactattttttaaaaaaaaatatgacgtcatgaatatgctactcccataaaactttatataaacgtcgttagctatttaaaatacatattgtaaaataaaatatgaaaaaatactataaaataaactttaaattttgagttttaaaatttaaaatttacagaatgttataagcacgagcatagctgaaacgataaggcactttacagcttagcggctggactgactgacagctatcccaaaccggcaaaaatccccacgtgggccgggctaactccctccctggaatcctctcgtcgtcgtcgtcgccgccgattccctcgcaccaatccacacaccgccgccgccgccgcctcctctcccctccatttcagccaccaaccccggctagctccacctcgtcgtgcgccaactgcgagcgagggagtggagtgactccggaagccaagcgcggcgagaggg

SEQ ID NO: 6226 - DNA, 2000 bp, Oryza sativa
tgcagacacccccacattgctacagttgatcataatgattgatgttgatttacagtgtaccctacagtatatattgatttgcaatcatattacaacttgtaatctaatttatttttttctattctgacaagaatcctcctttttaaaatttatcatagaaagtttaatatgcactcatgattttagtatttctcgcaccctagattgacgtttctttattgtgtttgaaatataacaagaaattttgcatccagttgtatttaatgtggtattaaatgacatggttttcagcattacaatttataagcaaaactaaggcaatgttcatggtaggataaggtgcttgagtttagtctaccagccaaatatccgtgctgtgctacggattaaaacaaattaatagtgaggtttttgggacaattttgtacctgtagatgttatattgtataggtgaaatatgatagaatcatatatgtagagggattattttataacataaaagtacatgggctagttggtagaaaacatgatggagtagatggtaactaaaaaaaaatactacttggtgaggtggtggcagattcactgccaccaccattgccctcttttaagaagagtatagatccatgggtatgttggtaggaggctatctatccatgttttgccggtgtatctgtgagaaatttaggagattgggatgctgattttgttgaatattgcatacgtagtgtagaaatggttctctttgcatacatctttttgttaaagctgtagacactagaaaagtgatagcattgcccgtgataactcggccaaggctggaatttgtcagttggttttttcctgcagtatagtaaatttttcataactcttcaattgttctgtctctgattgtattcaatcttattttctcggatgctgacctaatatgatcatacgacttatcagtctagataatatctgtctgtcctgactcctgatacagggtcatattagaaatgctttgaaatgtttacttatgcctttttgtctttgttaggttgcatcacatatagaaactcacttatgtaccctgccggttttttttttttttttgctgatgctagggaagcggttctgtaacattagccgattggcgtccgctatctgcgacggattccaccatttgtcaataaattattgaccttgtagttgaggtgtgtatatcactgacacccccacattactacagttgatcataatgatggatgttgatttacagtattacctacagtatctgtagattcaccatgtatttaggaaactaataattataaatctaatataacctttttattctgaaaagaatcttcctttaaaatttcccatgtgaaatataatatgcacttgcgatgttagtatttcacacatccaagattgatgtttttgtttgtgtttgaaatataataagaaattgtgagttcagttgtatttaatgtgctgtttagattttgaatggcatgtttttcatcattataagcaaaactatgtcaatgaccatggtagggagcatgtgtcattgcacctctgtttaacagactgcaaaaggaactgtgccgatgcaggctctgcatgcatgtttatctggccatatacccatatgtagtattcaaggaatttctggcaacacagtgattgcgcatgactcagtccatttcaggatttgagcatttagattgttttatactttttttttagkttgkccggaaatttgtaaccttgatatacgattgtgtaaagtactgattggttccttcattttgcttatatttgccaggatcgtcaacctcaagttgtaaaacattgatttttaatgggtgatgttttattacattgaactcatttaagtacctcataagttatccaaggaagacagtaaagtttcgatgcatcaacataggatcactatgctatcttcctcagaaacatgtcaccttggttctagttcgaacaaccaagcc

SEQ ID NO: 6227 - DNA, 130 bp, Oryza sativa
ccgaagcgctgamrsktygtgaaggtycagygmwcgacgamgmsccctkgggagccaagaatcgmacggctgttccgcaaggtcaagaaggagcgggaggacgagctgctcgtcaaaagcgccgcytccg

SEQ ID NO: 6228 - DNA, 2000 bp, Oryza sativa
aaacmacaaattcgactgaaatttcatggaattggcattcgccggaggttaggatccggccctcaattgtaccgtgctatgctgctgctgggtgatgatttttggttgctgcagtttttgtgcaggcgtcgctgtcgatctgcttgccctactacgaaagtggaagcctgatgccgcattctgcaaagcagctcggctgccggtgttctcgccgttgctctgaagctttgccttttttttttcctcctctttttctttgaagtttttgctggctcgcgccacttccatgctgccatcgcattgcattcgtcaccccgtctttttcatcggtatccgtttggtgcgcgcatgcgcggtgtatctgaatcctgattttgcgtgtaatttccagagtgagtacattcattaaaattacatgtattatggtcaaagttagagaaatcatatgtattatgatatatgacacataattcaggtatgatggttttataaagttttacataatactacccttatgtattttgagatcgaatttacttaaaattctaaaacatagaatttatatgtaatttttaattattaagttgttgattaagattgacagtttaattctttattacttttaatttttaatatatatgctagaatttatcaagatttgaataaaagtgaggttttatgaaacattgagaccatgtaacttgaggttatattgccatacatcataataccagtggtttgttttatacctttaactatgaaataactggttttctaaagttttctccttcaggtatggatatttcattttatattagctagcagtaaatcagtaatttactttgggatttattttgaagtaaaggattgagaggtgatatttagtttttttttatcaaattattatatctcttggcagctatatatgtatcgtaggacatgcttcggatagtaagaatccacaataaacaatttgcaggaattgtagaatttgtgcacctaagcatttaaaactaggtgcattctattttggaagattgttagagcggccaattttttttagaaaaaaatatttatcaagaaactacgagcgtgctcggttatctgttgcagccactagctatggcagctgctgcagcccttccctttgctacggctgtgctgcacaattatagccagcacaaccgatcaccgcctatttcaccaaatgcttcaaaaatcagggtcattagaatgaacttcaagtagttttgtttccttatcatatatagaacacataccattttttatgtatacaaaattttctaccattaatttatactcgctccatcgaacaacagataaataaacccaaactgagttagctaaatgacgatacataaaacgagataagtcactagtacatgattaattgagtcttagtaattaaaaatagttcatttaattttctaaataaactttcatataaaagttattttttaaaaaatataccatttaacaatttaaaaaacatgatcacggtaatagagtatttgtagaagccaaacaacatctgaaactcagcctaaatatgaggttaattcaataaaaaaacatactaaatttatgataaagaaaacaaaacaaagaataatcatgggtcaaagttgtcaaactgccatatggccatatctatccatccaagacccaagataacattataaaaccaacccaatcccccaaaaagaagaaccacaccccacacatcaccccaccccaaaagaaaacaagaaaaatatcacatcttttttatgaccccaatatcacacacaatcccccttgtggccttgtgtgtagtgttctcaaaaccatagcaaacttgcaaaatacccccacctttccccttccctcctcccctcactccctctcactctcttgtctccactctcctctcctctcctcgccgcgagcgtgagctctcccctctcctctcttccaatccaagaagccaagaaacccca

SEQ ID NO: 6229 - DNA, 2000 bp, Oryza sativa
  misc_feature (1)...(2000): n = A,T,C or G
ggtggaaaaaaatgaacggtggagagttttgattggttgggaagagaatgttgatagagaagttgttatattttgggacaaatcttgagggctaaaagttattatattttgggatggagggaatacaaatatagacgcctcacgtcttctggaaggatgttttttaaaaatcgccttttctaaagacgttaagggatctaaatgtaaaatttttatttatgttcagacccttttcgttggtttcaatttctaaaaaaaaactaataatgcttatttgatgctctaaatgattttatatggaagagtaataaactataaagttgactttatagatctcgatgggatctacaacttttatataaagtttatcttcatcccaatgtcgtttaaaatgttttgaattttgttaagttgttaaagtttttaaatattttaataaaaaatgtaaaagtaaaaaaaaaatccaattngmggacgcaggtttcccagcactccgctatccattatcagacgatcttgctgaccataagctgtaccacactcccactcaaacggaggctcgtcatcagctttgggataagataacagaagtccacgatgagcggcggcggcgacgcagccgccatctgcgcccagatcgcggccgtcttctccggggaccccgccgcgcgccccgtcctcgtcgccgagctcgccgcggcggccgcgcgcgggggccgcgtgttccgtgcacggcgtcgggccggaagggcctcatgatgcgcgccctctgcatgcgcctcgcgcacctcggcctycccgsgcactgcgtcggggacgtcactgcgccgccggcctccccgggggacctcctcctcgcctccgccgggccgggcgcgttctccaccgtcgacgccatctgcggcgtggcccgcggcgccggggcgcacgtcgtgctgctcaccgccaagcccgagggggacttcccgcggcgccaggccgacgtcgtggctcacctccccgcgcagaccatggctgacgacgaggaggcgacgacggagagctcgccggcgaaggcgaagctgccgatggggagcctgtacgagggagccatgtttgtgctgttcgagatggtggtgctggagctcgctcgcgtcttgggccagagcccggcccagatgagggcgcgccacacaaacttggagtagcctagtttgtgttttggcccacttgtaacaacctgtatggctgtgttgtgcggatttgcagttgcctgataatgctttttcgtcaaattgcaagtacatccaacctaatgtgtgattcctctaattaaaagaacttccaacttatatgtgatcggaatgttgaattacaatgtacaccctgttataaaacgttttgactaagtttatagataaatatagtaatatttatattattaaattagttttatcaaatcaataattacatatatttttataacaatacttttttctacaaacttgtttaaacttaagcggtttgactttgtaacggagagagtagtcatgttttttcccatcgtcaagttcctctgaaaaggaatttcccaacttatatgtaatcgaaatattgaattgcaaaatgatcatggttttcccatctagaaatctgagaaatacgcaaggaaaatctggtggaaaataagtgtaaagcttagttctgggctggtcttgtcctcaaacctctaagatccgaagcccactcaatattttctagaaacgttaccacgtgtcggctcagaaaggccgggaaccttctagaatccgctggatgcttctcgccctatccctaacctatccccgttcccaaatcccccattctagacgcgctttccattctctggaagcaaattgcgctctctggatcttcttctccgtctcctccccggtctcgtgtgagcgctactcccggcccacaggttcttcatggcgtcgccggcggcggggacgccgccgttcttgacgaagacgtacgcg

SEQ ID NO: 6230 - DNA, 2000 bp, Oryza sativa
cctgtctctcatcgaaagatcaggacactaaccctcacgggtcatcatcattttacattctaaaactgatggagtagtcttttttttttggatgggggaggctagtattctaaaactaaatattattttgttgctattcataacttgtaaatatatagtgaaaaccctaacttgggttaaaactcttgtaaacctcaatcaaaaagatatctaaatccataaaagaatcacactaagatgatgtaacataagtacaaaaccatgtaaaaaaattgtccaaactcgacttcatttgggagaaaaataacaaatttcaaacaaaacttccctatggtttttttttcaaaatttaatattttttagatcttataaacgaagtcgagttcaaaaaagattttttatatagttgtgtaacatcatctcatctacatgtgttattgtttttttgtgaatttagattatttttttatcaggttacacaaatcttcacatgagttgagtttccactatatatttacccatataactctaattcaaaaacttctaaatcatgtaaaagaaataaaaaaatccacaacaatgccaaacaaatacttgtactacctccatgatcaaataatagatgatgtcctagaataattaattgatgaaaaaatattagatttgacatgagaaaatgatatatattttatgaacagttagaatttgacatgaaaaaaatacttttacggatagttaatttgttactatattttatagcatgggaaatatgtgcatgggaaacacaaaaaagtaaaacatgtgcacgggaaattggctcgctattaaaacgacaattcggaggtaatataaattagcagcattgctacacacttaactagaaaaccatcaccaattagagcaggtacaatagcaggctataagccagctataaacatattttaaaaagataaaagaagagagagaagagcagcgggctacagatctgtagccagctgcagcacggactttaagacgtaatgtgtgtatgacaagtgggaccagatattaatagtatagtaagcaactattgtatgaattggctattgcattggctatagatgatttggagctagtagtggactatactattaaacttgctcttaggaacctattttccatgcgcacacatctcaaaatgttaaacggattgtcttttgaaaaaaaatcaataggaaagttgttttaaaaatcttattaattattttttaaaaagtagctaacacttaattaattactgttaataaattgttttgttacgtgcgtgatagattatttctcaactcattaataacaacacagccttaattaaggtatgaacataactgatgcttcctaccctgtttaactcacgagaccatgaaccaacacgtgtcgtctgttgccacgttaacatcgccgcaatatccatttttcccatcacctatagcccctaccacacttcctctctgctccagcagttagcagcactaataagcccactaacctccctctctaatcgccatcaccaacaactccaaactccacacgtctccatctccatcgagcccagctccacgagccgagctgagccggcacagcgcgagccacctacccgcgccgcgaccgcgacccgcgaggccgccacgacccggtcccaccggtcatcctccctccccccacctaacctcacgggggccgcctccatgtggcgaaacgcgagcgcaactagcaaattactacaacgcgagctgagatgaaatccccaaactaccccttctcctcccccctctccccgttcaacaaccgctcaccaaccccggctgcctcaccggctccggccacctataaatacccctcccccctcctccaccttcctcctcaggagacaccacccgccgccgccgcctcctccattaccgagaagaagagaaacctctcttctactgttggatccaactactacctacccgcacgccgca

SEQ ID NO: 6231 - DNA, 1896 bp, Oryza sativa
tttccccccccsccccccccsgagtcccgagatccgaatagcttcgtagaaacccaaagcgagagcwtagaaactgacctggcgcgctccgcaccggcagatccgatcccattgccctccgaaagcgtggatctccccgacgagggctccccgctgtccttgagctccccaagcagctcccgcatggtgagcgcccgcgagggctcgccctctgcgcccagagccgcgttcgtctccgaatcgttcgcaattcccgattcctccccctcctccggagcctcccccgcgtcgggcgccaccaccgcatcctccgccatccccgcgccgttggggagctccccggagtcagcgggcgtcggccgcgcagaatcctccatgactcgagtctctcctcggattaggatctaactcggcgggagatctgggcgatgcgatgcgatgcgatgcgaggaggaagaggacgcgagccgagccgagccactagtggtcgctcccgctgtgaagcggatcgttcaactggaaagaaaagaaaaaaaagggtttacagtgtgcgaccactggggcccacccgtcagagtctcawtggtgtagttgggccggccgtgcaaacctgggccggccccaaaagtggaaggggtccgtaccttccagaggcttcttcgccaccaaatcccagagtccagactccagagcattccacggcctccctacaagttgcggccgcgccgccgtcgtccgccgctcatcgaatccagcggaagcggaagcctcgcaaaccctcgtgctgtctccggccaggccagccatggcggcgtcgctgcttctccgcgccgtgcgccggcgagacctcgcgtctcctctcgggaccgtacgctccttcccctcatttcatcacttccatagttgctgccctccttggcgtaataatcatctgcgtagcgtagcggtgcgcgcgttttttttcctttttttttacccttttatgctccgatccgtgccagcgtgatgtatattgctacccgattctgtgttaggttggttgaatcgaggttgattgtgtgtgcttatgcggaatttgtttgatccacggctgctttagtgtcccggatggcttgtgttagtgacggaattatgcaaacgtcgcggttccttctctagcggcctgaaatctgacgatttagagtccgattttctatgtctgttctatgatcggattggtgcctcactactgactgctgtagtggtggctggactaagctctccacttgtactgtttacatcatgatttggttcctgctgatgttgttcgtagtatgctttgtttcttgcttcaatttttagtaatatttcttgaaaacaatctgtaacctgctggagctgggaaatgatatgtgcactaccattcttaggcatctgtggaacagatcagcatcgaggagcagtagagataatggtggagtgtttttttttcccatctgctcttatcctttgtcaaagatctaaaacacatgcataaatgtgcggtagtactgactgtagaggtgtaggatcttttgagttagcattagatgcattgaagtactgataggcttggattctttgcaatcatgcccatggttgcatggaaagaaaaaaaaaagaactgaacaaatggaatattgaataacttcttttgtttgaaattttggattgtaatgagcttctgctacttgttatggccggagctacctgactttatgtgattatgtttgctggctctttggtgatcatgcttttgatgcttgtgcttawatcttccctccctggcaatctgcccttctggtgatgctctcattcgaacagatgatttccttttttcactatttttgataatgtcttcttttatgaacccataca

SEQ ID NO: 6232 - DNA, 2000 bp, Oryza sativa
ggtttttgaccaacccagcgaagatcagttctccagtagtgttggttagacggagatggacgattattggtaactaagtaatatgcgctaaacactacggtgtaattttatttgtctttaatgacatttaaaattttatgctagcaaaagttatttttctataatctatgcagttgagttttaattcaattaatgtcgtacatcaaatatacttcacgcaaaatagaataatatgacatagtgtaggcacaataacctcttttgatttccaccctaaaaaagttttgggacagtaatttccacccgttttggcccaattactgtgcttccaagcaggcgaatggtcggaagtaataaaaaaatcaaaccctaaaatttattaaaactaccaagcatcatatctgcgaattaagtaaattattgttctcataatcaattcacagagggaaggaaacattgaaaaaagtgcggactaaaaatcaaaatcaaattaggaataaattccaaccaagcacaaacaattgaatgcgagcatggtatggaagcagtatggtgcggcggagagtcggagaagcactggcggtagtggcggcacagggacagcgattacggcatcaccatcgctgttggcaccgcactgtggagagtcgagttgcggtggtggcaggtaggcactgcgagtccccctgatggtatggcgggtttaatcacacaatatttcatcttaatgatgttgtacaaaacaagagaacattggtgagtaacattccgatgagtattttcctatcttctagattatgttttcaaattaattttgatcttacgaacctacatttgctcaccagtcaagaacgtctttatacatgatattcctattgctcttccctgtgggtatacttctttctttggcttggcaaaaatcgttgttgttttccttgacacacctcttgacaatgcaacagctaaccatgtgaaaaaatggaccctggaagatagatcccaacatttgggatggtttgtacttgtgatttattaatggtcattaccaaactaagacgtgttggaaattgtttcctcttaaatttgaaaggaagagatatatcgtctgagagagataaagggattcgtgggatgaacacccttttgctagcatgttgtccaccaacaaactcagcatcaattgaattatcttgaaatgctcttaccattagtctagttccattgcacaacccataattaggatcaagattgcaaagaagaatcacaggacaattgattttactttgagctcgtgtggtgggagaccatttggagtatagctgttgtggaggtcatcatcaacagagttaaagttgtgataaacattagcttgcctcggaaatctgtcgattatatttttagtggatagaatcatataagctgcaaagtttgcattattttcatcataaagcgagggaaacacatgattaatttatttattaaatcatcgcaatccccataagcaatcacaatttcatcaagcgcgcgcacgtaatcatctctgatagtgttttcagggccatttccaatcctaaggagataatccgaaaaccatggatcagattgagccctcatgttacgcgacaaccatatctttctaatattttcccataaatacgatatccgcaatgtaacaacagttatctgggcccttgtcccacgtgtcaccacgggaaaaacctgtctgaaatcaccgccagacaataacatttcctccaaatggcaatgaaaaaccataatgtcttgaagaaacctatcaagtttctcaagagcttgacgctttgtccttacagctatcccaaataattaaggatgccatgtgaagcaattccgcggtgccactttgcttcgtgaagttgcacatgctgttgtgagcaatcttaataggaattttgaatctcatgcgtgtaatacatcctccgagcaatatcgatgctgctataccagacatcatagttgca

SEQ ID NO: 6233 - DNA, 2000 bp, Oryza sativa
agtgggccggttccatcatatggaatctaactaattgagctacacttatttcgtgattttggatttttatttgcctgttttccaaacttataaacgttgtttttgtaaatttatttttgttgtaatatttttcgaaagcaaattttcaactctgtaatggttcatttatccgtatgtactttctaatagctataaaaaaatcagattatacattatcaatttcagttatccaaaatacagcctaaaagtactcatggcctccaataatcctctcattgcagttgattatattcatgttcttcgcttgctcggcctattactatcttccaagggagttgtaccaggagcttttttttcggttgcccacgacaacaaaaaaatccttacctcgtgcatatcgcgaatcaatcaatgttactttgtcgttcttacctgccaactactccgctaactgatatgcgagattctccatcgctaccatcgacccatcgtgccagtggagtgtggagtgctgacgttggcatggggagctaagtaataatggtattctataagcgtatataaaggagagagagaaaaaaatcaggtcctatgacttagttcttcacatacttaaatgtagatgcaccaaatataatagaggagaggaagcgagatgagaaaaaagagatacaccattgtagctcatctattatgtaccctctctgtcccaataaaaaaaccaatccttccaggctcgtagctagaaattctttttttttacgtagtagtatatattagttgtaaaatgcgcttataccggctcctgagctgccaccgacctcgttaagcttgcgagttgcaactcggcctcgtcgagcttcgacctgccacttcgagagtaccaccggcctcgtagagctccctcgctacaccccgatcacatcaaagctcctaacctgccacccaaagccatcaccggtctcatagagctagaggaagttgacgagggataggaaataagaagatactccctccgtctcatagtataagaagttttagagttggacacggttattaagaaatgtaggtagaagtgaatgatgaagcattgtgattggatgaatagtggaggtaggtgggaaaagtgaatgttggaggtttgtgattggttgggaggagaatgttggtagagaagttgttatattttgggacaaatcctaagagctaaaaattattatattttgggacaaatgaagtaataactagtatgagcatttttggtccatatagaaatacggtatgaaaaaaactggtttaacaacacctcaaacacatataatggcataattcaaatttttaaaaataccattgacacggagccggtacaataaataataatgtttttttttcattacggtaaatttgtataccatgaatccgatcaacccaaatatattttgttttctggattattacatgacatgaacatgcatcggtagattttactaatgaatactttaattgtagtggaaattctattgagttaccatgcatttgcagctaaaacaataacaataaatgtttgtatctaaacaaccaaattgcaaattaaacaaaatagtatgattttgcggagtactacccaaatcagtagccaagaccgcactgtcagtctgtcgccctccaatccgttactcgtttattcgtatctcctcccaattattctacacgtttctttcaaattaaaatctccctaaactctgtcaaattcacggtgttttctggaaagggtggaacgctagttccgcaaaccagccaagcaagcaaacgtgtgcctctcacggcgcccatctcccgtccttaaataaacgcgtgcgccgaagctgcttctccccacaaaattttgtgtgtcctcatcccccatctcctctccaatactcgccactaatttcttctctctttctctctctctccgcgccctcgcatcgcacgtgaggcagtcgagggatagcggcgca

SEQ ID NO: 6234 - DNA, 2000 bp, Oryza sativa
ataagagaggtgatgaggtggcatcctaatacgtggggcccacgtgggtcccacgctgactcaaccgccacgtagactaaaaccagggtcaaaaccgccgaaggacctcgggtgactggttttgtatagttaagggaccccgaatatctggttttgtggtttgaggacgttttttatcccgatgacaagttgagggaccttcggtgtacttttccccaatagaaaaatctgcgttgaatgggctagtgtaagcctaatttcactcgaaggaaaagagatgcacttgggcctagactctgggcttgcgagccaaggttagcaaaaaggtgggccggctggcgtcttggcgagcagctccggtcgaagtcctaccctcctgtgagctgtcgatcgtgattcgtgcaccaaaccattcgtcggattgtcggaaggtagcaaaaggaggcacagaccacaggtagctactccctccgtcccataatataacaatctaggatcgtatgtgatgtatcatagtactataaatttggacatgtctcctgtccagatttgtagtactgggatacgtcccatccgattctaagttgctatattttggaacggagggagtacagtgaacggataggttgccctccgtacgcccatgtggcagtcacgaagcgtacagggtgttactctttcccgttgcaagaacgaaaaattgctgtcaatttttgggaccagcaatccctttctcaaataatatgcacgagcaactctaagcgagatctttcattagcttatgcaggcaaaattgctgcgtccgcataggttagccggtgtgaggttgtgctgattggcaattgaccaacgcagcattcacagattcactatcatcatggcacaccgaacatcacatctcagcgaacgggtgctccaccaatgcaccaactaatgcacgcacaaatgcatagcgcaccaatgcaccaactaatgccggtagtttgatcagatatcccagatgtgatcttgccgatgggttatccccaccagtatagaagtgtttagtcacactgaagtttggatgtttggttgaaattagaatgatgtgactgaaaaattatgtgtatgaaaagtttgatgtgatggaaagttggaagtttggaaaaaaactttagaactaaataggacctatgactacaactatctctcggttgtcacgaagaccccgacgtgttgtcacgaagatcccaacgtgaacgtgacggagaagagtataaaaaaaaacacgatccgcgctgaccgccgcgccgccaaccggcaactctcgcactcgcacgccgggcacgcgtttcacgtgtcgaagcgaagcgactgcacctgcacgacgacgacggaccggtctcgcggtctcctccggtcgcgccaccccgttccgactcccgtcctcaccgtccccgaccctccgcccaccactccctcggtcacttcccccaccccacccacccaccacgccgccgcgactcccccaccgttccacgcgcacgcgaccacaccactgctctgcacgcgacccgggattacactacacggtacacagccgcgcgcgcggactactggccagataacgcatcgcagattcgcgggaacacccctcgtggcgcacgacaactattcagtagtcaagtactagcgccagccaaagccaacacgagtttgcacgggcacgactccgcgccgcggcggccgtctcgtcctctctccacatcatccccgttccctcgcacaccacagcgcgcgcccgcccgccagccatcccgctgccgtgccgtctccatcttctatccctcctcctgctgctgctgctgctgctacttaccccgcgatttctcttcctcttattactcttcctctcggctctcgctcgctcgctccccgcgcgatttctccacgccgcacgccgctcgcgagttagggatcgatctcgtcgggggcgggcgggagagggagagggaggagag

SEQ ID NO: 6235 - DNA, 2000 bp, Oryza sativa
attcacgtacacatcgcgcgccgcgcgcgcgcgcgccaccgcacggtttcagacgcccgcgsaaamgccgcgcgcgttacagcgttcgttcgtgatacgagtagtttattgtgagagttgtggttagctagctcgaggcgcggacgcggtgttatgggcgttgccgtgcactggcggagggcgggcgattcgcttcacatggggggcgagccgcgcgcgcgcgcggaggcggcctgggcggctgcgttgcctgccgcgttggttgcgctggtgcgcgacacggctacatacacacggtaggggtgcaccgccaccgccacggccactgtgcccgcgggtgctttttcttgaggctggcaccggtgcacgagttgtgtgtgatgacgtgttcgattggatatacattatattcacacacctcaggccgggctggctttgacctgctcagaaatccgtgacgaaagcgggcataactatccttgtacccacgcagagctcacctattttgacaaatagcagagatcagtttccttgtacggactcgctcactgttcgtgcttcgtttcgttgtttttttaggggtgtttgtggagcgggagctggacacacagcgctactacgctacgacccctcgctgaacattaaatagaatttcagggttttctccacgcgaaatccctgtcccaaaacagtggtagcacgtaccaccatgcacttcaaacacaacagcaaaaatggcctttgggcttggggtggtatgcgtatgatgcacttttgcatgattgcccacccgagctctaaatttttttgctgagagcgaggaatagtagcagaccaaacggtcttaggtctcctgtcattgtgatcccttttcatgattagatttcctgtactttctcctcctgttgcagggaaaaggaaaacgatgaagagactggagaggggaagaagaagaagagaacaccacctcccgtttcccgatgccccccctgacgcgcagaatgatgcaccgtctccgaatggaaacgccacggggccccacctgccagcttgacccctgctgctgctgctgcactgcacatgttattccccctccgcctccggtgtcacgcacgcacgcgacgcgacgcgatgccgaggcgtccgtaccaccaccgccagcatcagcggccgtcagctcgagatcggacggcacgggacagatggcagcaggcgtcacgctggcgtgtgccgcccccccgccgctaagggccccacgtgccagcgatggaggcaggcgccgtggggtggtcaaagggggcscggggacggacacgtgtcggtcgccgcaacgtctgaatgttcgaccggtgcgcggcggtttgacccacgtgaccggctaccgccggtgcacgccgctgactcagcgcacccgtgaccgtggaccgtgttcccacacacacacccccaccgtttactgtagcggttgcaattatcagtacggccacctacaggggctaatcactgttctgacagtctcgccgagatctaagcaagggattattttgagattagaagaaggaagaaaaaccaaacaagctaagccaaggagtgggcgtctcatttggggcataaataatcaacttgttcctctcaaaaaaagctgaaatcaatttaatcgaaaagccaamcaaaagtgtgagagaaaaaaaaatcctctcacccaaccatcctctcctccatccctctatctatctatatccatctctctcccttgcctcatcaccctagttatagctaagctaatagcctctcamacctctcgctctctcactamccctccactaccatactagtagcatccataaatcccttggctcttgcacgcttgcttcctcctctgtccatctccatctcgatcctggaagcgcgagagagagagggtgcgtgcgtgcgtgcgtgctagagccaagaaccacgagcacggccagcgtcggcgagaggcggcggtggatccggct

SEQ ID NO: 6236 - DNA, 2000 bp, Oryza sativa
tatatattaagagtgtaagatggaccttttccagctgatgtatatgttggtaaaaatagtccaacatatagttccacccactttttttttcaaattattgtgcataagtattacgcaaatatgggtatgattccaacaatattttaatgaggtccaagatttatcaccagtctttgtccgttttggcgtctgttaatgtacgtgggtgtgggattgtgtgtatgcatcttgtgtgtaaagaaaaaaattgagggcaaaagcaagtaatatgtgggggttaagaaacaccaaaacaacttccaggctgttttatcaatagttgagataagagagtgatttatttactaggaccgttgaaattcgaacttgccaaaactttaaattttggtttagtctttttttttctaaaaatttatgttgagatgtatattagcacaaacccattataattttcttttgtttcgggtagcggcaggagggatatgctgcagaaggataaatttaacatttacagagaccatgtttggtyctttttttttcagaagttgccaaggtcatttcgaaaaaaaaaaaggataaatccgccgaagcgatattgtgataggtggaaaggctgaaagctatgttgccgtcccctaatctgttgagagatgccaattagtctacgttgatcaccaatagtataagtggtcagtagattatactctctccatattttaatgtatgacgctgttgactttgtaaccaatatttgaccattcgtcttattcaaattttttatgcaaatacaaaaatacttatgtcatgcttaaagcacatttgatgataaatcaagtcacaataaaataaatgataattacataaattttttgaataagacgaaatgtcgaacgtttgttaaaaagtcaacgggggagtattagttgccatgtgttgggaaagcgatcaagaggaaataattcaaatggctgcccggttgagactcgacgaagtaggggaaggattttaggtgcataaatgtgagattgtgactctgaagacaccttagcatatcaacatctccactccatcactcttgaaaaagaaaaatgacaaataaatcaattaatcatgttgtgtttatccaccattgtcgactggaagtggttcctctgatgtaaagtcaaagggacatatatcactaacatatagtgcccatcctatcctagagtccatccttatgggcatatatatcaagagacataggttactctattgtaccgataaatatgtttgttaaccgttccaccaaagagtatccaatgcaataggagtagttgagatgctattgctgaagtatttatgctgcaacttagcttctgttttgtcggcacattagctgggtgttagtcaaagatgtagggtatatctcgaattaatacttttttagtcacgtttagtaccgaacgccatgaatcttttaagacttagccaattcgtcttccatctcctcagctttccaagttcttcgctttcctttgcaccattccgtattcaaagatccactgccctttctctttaactgacgggaagacacaaggaagccatcttgacagctctaagatcggacctgctggctgctgctgtgatttttgggtgagagcttgttgattcaaattggaattgttatgattcgagtaggaagttcatggttctaatacaaattttagatactcgagttccaagttagaggcttttgcatagaaacgtttggatattttagttcaaagttatgatttttgtgtgataagtttggggactcgaactgaaagttcaagacaacgagtagaaatattcgaggattttgagtcaaagtttcgatgtccagcttgaaaagtgtgtttttcttttctttcttgctccagatggaccagatgtagggatctccaaagaagcaatcagccctcttgatttacgctgcctcttgccacggtgtgcactgtgcagttgcagagtagagc

SEQ ID NO: 6237 - DNA, 155 bp, Oryza sativa
ttttttccccccccccccccccccggcgtccaagactggactctcctctttataaccggtctcccttctcatctttttctccacagtcgcctcctcccctgccaaaccagtctcccccaaatctcctttggcgtcctctcgattcctcagcgacc

SEQ ID NO: 6238 - DNA, 2000 bp, Oryza sativa
gaggctgctttggaagagtcaatttgttactctgagagaatagatgcagcacgtgcaactatagatcaagtaaaggtggaaggtgtggatgcaaatcttgccctcatgcaggtactttggtgataaatcaacttaaattgttcttattggtttgggattgaatggtttctagagtgcagcaagaaaagatagcacgtttcactagttatttggtgcaatttcatgaactttagtgtcacccagatgtctactacaatatcatgcacctttgttgtgacttgagttctgatggatcgcgcttatattccaggagttacttttcccattcactcaagtagtcaaactcacttactcattgaccaagtgggaagatcctctgaaatcatttctgttcttagcttttaccctgtatgttattcaaaggtaatttctttgtgacttttggatcttagaaagtatgcttagaaatatctcattgcctaacatattcctttttgttatgtaggggatttattgcttacatgttgccctcattttttttggcatttgctgttgttatgctctggcataagtacaatggaagggagcaattattgggagtgcttgaagtaagaactcctccaagtaaaaatcctgttgagcaaatcttgaccttgcaggatgctatatccaagttggaagaaactctacagtctgtaaatattgttcttctaaagttcagagctgtcttgtttgcagctgttccaaaggtatctcttttgttgtttagtatatttgctttccttcggttcaaaaatttctttacatctaagatgcacttcctatagtttgttgtccaatttgacacaaatgatgaactatcatttgattcatcagacatgaactgtttaagaacttgttcctgaagctctgacctttgaaatttatttgtaccttctcaaccgtttttacggattactccacagcgttgtaaatgaagtagttttgaattttacaggagattaatccaccaactgctaatctccttttgttttatgcagacaactgaaatggtcgcagtggcatttcttgctgcatctgcatttcttatctttgtaccttggagacatctgctcctgattgcagtcctggaggtgtacacaagagagatgccgctaaggaaacagaacactgaaaagttccgccggcggattagagagtggtgggcccgcattccagccgctcctgtgcagatgatcaaacccaacgaaagcaagaaaaagagatgacaatgtgctccgtgctgttgcaaagagctcacaattttccctgtttcccattcctatttttcacctgaccagctaacctgtacatatctcaaaccctcttgcctcattgttacagagatattcttactgatcaaagctagccaaactagtaatcaattcaatgcatagtgccattgctatgagtgtwcactgtacaaatatatgatcgraaaccaaattaatgctgtattttctttcgttgattgtgtaactttttgctgtgcatgcaagttcctgagttctgtgaacaaatctgggtgataaacatggacataatcagtttaaaaaggaaaaaaaatgaagttaatcttattgtattgatcatgaattaatgatgcgtccttcagtattgatattacaatccaatcttaagtgataaaaaagtggtgctgctttggttcatctggataggggaacactctggatgctaaattgctggtttccaagtgatctccaggtgctctggagaagccattgcacaatgatgttacagaggctgttttgagtcttcacaatgctggcgggtagcaactgtggtaggtagtgggagttcctacctacccctccctgtcttcctactaatttggtggtgcgcatcatgggttcaaggagcaatccggcggtttgacttctccgtccgcacctactctagcctttgttcagtggtacgaggcgccgcgcgagcctgccgga

SEQ ID NO: 6239 - DNA, 2000 bp, Oryza sativa
atatatgattataaacacgtaaaaaatatagaaataatcgtttaattcaactgtgataaaaaaacacaagaattagatgagggagaatgactaaaagggaacttttcatgtggttggacctctaggttaaaaatcctataaaacttgtatggattgaggattccttaggaatttcatactgatgatagagggctatccaaaatcgtagtactacgatacatctaggatatgtctcattcagttctaggttgctatattctgagatggatgtagtagtatttaatatacttttcaatcctttgaaaagggctatatagaaaaaaaatcatgtagaattaaaattctacaaaattcttatgtttttcattcaaatcaaagggggtctgcatttgagagaagaggaaaagagaagattgagaagatacgtaaaatgaggtgagccattaacacataattaattgagtattaactattttaaatttgaaaaaaggattaatatgattttttaaagcaactttcctatagatttttttggcaaaaacaccacaccatttagtagttcaggatgcctgcacgaggagaatgagagaaatcctcagctgtcgaacacaacctaagactaatttaggcctcctttggaatgcatgattctcaaacatacaggaaacatgaaaaatgcacgattaaagtggcatagaaactcaaatcctatggattgaaaaatgcttgtaaacaataggaatgaccgagcgcgggaaaacgcaggaatcagagaagaaagatatacacgaatgatttattttaagaggtttaagttcatgttagaactcctgcaaatttctatattttaataggaattttgataggattgaatttctcctagagttctttgttagagaaaatcttttatataagatttgtgggaacgataataaattaaaacgtaatctctcagttccatagaaacctgacctaatactccctccatctatttttgatagttatattttcaaatctgaaaattctatttttgataggcatatttcaattcaacaacctatcatcttaatgactttctcggatttaatgcataactctccattcttccacacaagattggctacttgagcatcgtgaaatgtaaatattaatgaatcgcttgtttacgaggaatgactagtagcatgtttaaatggatgataagtagaattacttatcattgatctgtgtgccaagatgaaatatgactatcaaaggtagatggagggagtattagataggatataattcaatacttcatctgtcccaaaatgtagttacctagtacagtatatgacattacctagtactatgaatttggacaggactgtactaggtaatgccacatcccgtactaggtagttatattttgggagaaggaagtattagattaagttataggcctgtttggcacagctccactcgtggagctcagccaaacagattcagctccaccaaaactgggagtggagctggatggagctctctcacaaaatgaaatttagacagcttcacaactccactctaaacccaactcctaaagttaaatttaggagttggagctataacaaacaggccctatctatatatattttggaatggagatccattcctgatcttcgataacttgtgtggaccaatgcaccgtccacccgaaagcgggagctggatgagttgcacgagtggtaagcgaataagccgcggacatgtgggccatggtcgcggcggagccccacatgtccacgtctcagcgcgtccacatctcaactctcaggcagcaaaagtgaagaagcgagcgagttgattgggcctttcgagacggagacgccgcctgcctaatctcctcgactcgatctttccttcccaggaggcggaggagggaggaggaagaggagctatcgcctctctcgctgacgcccgcaccacgacacggcgatagagacagaggtgggagatcggag

SEQ ID NO: 6240 - DNA, 2000 bp, Oryza sativa
ctttgacgcactattatacatgcattggaaactgtcagatttcgagcatactgttgtgttgttttcagtctccctccacacgactgaagatcaggcacgcagatgttcagaaatgcagaagcagcttgacctcctctccaattggtaagtgcaaaattttaggtttgtacttattgagttgcacacgtaaggattggttcaactaaaaagcttaaactgatagaggaagacaagcaatttaccaaatactagtgctattagaagatacagttttaagaagaagatgaaagcacacaaatttctgtagtaaaatatcggcgaaacgcagtgcgtaactagctatagatagctcctcttttccatagtggtggcactatggactgattgaagcaggtcaaaagaaatgaaatgaaagggccagacctcaccttaatttgctgtgcatttccactaccaaaatttagagtcagtgatccagctgagtggatgcactagtatctcttcgcaagcagctgtacacgtgtcatacttctatcagatatacggagatgtgtatgtatgggttgatgagatacacacacatgtcgtgtcaagatggagtatgtcccatgtgtatgggtaattgtcatgttaagtagggtaggtcatcccacgaggccgaccggccgaccacgccattcgcctgcgaagaaagaaaatgcctgaatattcaaccacgccacaagtgctgcccacaattttattagcaataactcgttttagtttgtgcgacacatccataggcggcccactaaatctcccatttattcttccccctccttccaagtactgcactgcaatttaattactcacccaacaaaaatactactccctccatcccaaaacatgagagactgcttcacaatatttcaaagcccggaataacctaataattgcattgagtatttgctagaaaaaaatatttttttatcatacattagcattaaatttctactggatggttcgtcgggtggtggttccactactggtcgtaaggccgtaatatctcaaagcaaacaatatatctagttctatcattttacataccaattgattataacttataacacttattaatgtcttaaaaaaatttaaataaaacttttaatatactagaaaaaaaatactcgtgcgttgcaacgggtgaaggctattttaatcttattattgtttactgtgaaattttctgtaagaattcgcttgaatatatatttttcaagaaaataatgtcaagttagcatataagttttttaaagagatttctaatacggtatttttaaaaacgaacaaacttacggatatgtatttccaaaagcgaacaaacttaaaactgacttatacacagatggcgtaccaaagtactggtaaaaacatcttcagtttttataatagtagagattttataaacgacttaaaattcaatgatggaaaataaattataatgagaaaaacaatcaaaacaactctaaaattaagttttaaaacttaaattcggttgtggctgataagccaaagaacaaacgatgaagcataggagataagtatttaacccataaggaaagccagtaacatacgaatgtacgaagaatattataaatttgaccgagtttgaataaaatttatgcaagtgatgaatatgaaataaataaagtacggtacagtgatagagagggcatttcgtcctcacgttttgtttttgttttttcttttcttttctgttgggagtggcattcggaagaagaagagagaagtccatctccctcaaggagcatcggctgctggcgctgcagtccataggagtctcagattcccatctcgtcgtcttatccctccactccgctccacacaatcttcttcttcctcctctcctctgtttatatacaactccttccctcccccattcgcccgcttctgcatcccgaccagacgtcgagtcgagcattaactcagtcagggtggcc

SEQ ID NO: 6241 - DNA, 2000 bp, Oryza sativa
ggggccgaccaaagtggcttaaactgtggtggcggctggtgggagcgtggtaggggccgaacgtgctgcgggtgagttcactgtttgccatgccaccgcaccttgacttgctcctccaacggccagggttggtgaaggcacgactaccaaggtggcagttgtgcgttgtggggaggactcgagcttagctacttaatgaaagcttgaaactgggcttggatgacagaggtcgcatttggtgtggaatgggacgccgaggcttgggccaagtgagccgaaggtggtgtcggctaagcaggttgcaagcgaacctgaacctgtggtgatgcaaccggtgttggcacaggcgtaggcagtggaggcactggcacgggtagcatggacacagacgttgcaggaggttgggcgatcggtcttgttgttgcggcggatcttgcatgcatggccgccttctgtagctgttgttgttgctgcatctgccgaagccatgcattcatcaacatacaaattccacatatccattcatcaacaaatacacaatatcatagccacattcattcacattctgttggaggcaggccatgaggacctttcgccatatagatatcggtttttgttacaaattgacacctatagtttttgccacgtgttcaggctggtcaacaactgacacctatatgctatttataggcgccaattgttttaaagaaccaacacctatatgaacagccatgtggcactttagtttagaaccgacacctataatataataccatataggtgtcggttcttttctaaaaactggcacctatatgtcttataggtactggttctacaaccggcaccgatgactgaagtcatcagtaccacctgctgggtgccggtgtgaaaatctggcaactatgatcgattctcaattagcaccaaagtcaatttatgtagtagtgacaaggtgtaggaaaaagtaaataagtgaccatcattaatataaaagttactactattggggaatgatagcaaagaggtgggcgtagcatgactatgaagtagatttttacgtggatagcggaattgctcacttagagcatctccaacagcatggctatcccactctccaagccaaaatttggcgattttgagccaaaggtggccaagccatccagctggccaaacttagctagctaaagttggatggccaatcgtcggtccaaccattatctccctctcccacatctccacttcatccttcacacaatcatacctgactactgttattgcctcctctctagtctccagcgccaatcgatgcctcctccgaccacccgtccgtcccgacctcctctacagtgttgcctcccctaggcctcctttctagcaatagccatctcgcctccatcattgcttccaccgccgccaagggcacgctccttgctcgcgtgttcggcgcagtacatgttgtcattggggagacgagccatcgaccaccccgacttcctctctcgatcgtcaccaccggggacacgtccttctcaccgtcgaccgccctgacgtggaggttctttggatttggaggacggaaattttaaagtttttttttaaaaaagttaattgtttcgaataaaaattctgtaaattctagttgcgtgggtcgaaacaaaagttgagaatgggggctcataaattggcaaccatccagcaacgcgacagaggcagcatctatattttatatacataaaggcattgtagagtgaataaatgcaggcgcctcagatgcagctgagtaaaaccttcttttgatctcactagcgactctcactccttgcagctaatcatactctcagttagtacgatcacattgattgtgctccatgccgctaattaatccaaattacccgccgccgcccttatatatatttggtacatgatgggagcagggcggtcaccttaataagtgatcgggcggcgaggcgaggcgaggtgagtaacagatcgatcgatcc

SEQ ID NO: 6242 - DNA, 2000 bp, Oryza sativa
aacgaatctgaacacgaggagtacgatgcttcctcgaggacctgtgatccgccccctttgttaaagttggctccactgttttgtcagctcccacatttagttaagctatccggataagcacttaattaagcaggcttgccttctacaaagaaaatgagattaactgttgtccaactttctctcgtaatactaccaattacgaattatagatagcagggaacatttctaatgtgcaacagagaaatggtttgttaagattgctctagaagagtaacttgaaaatagctctctgtttcaaagaaaaaacataacaccacaaactatggtaatcttatttattttgaagctagtatcgagctgagggttatttattttactttaggtgatctagcacctatagaatgatgcaacataacttatatactcaatctgttctaaaatataacaactcctggcctttaaagtttgtttcaaaatataataacttcaccaccaacattttcttttcaatcaaatacaatcccccaccattcaatttcctcacctaccatcacttttcaaccaatcataacaattataaccacttttttaataccgtgtccaaccctacaaatccttatattatgtaacaaagggatctttttttaagttagctggtcacaaattaaagtaaactagatgggtaccccgtgcgttgctacgggagaattttgtgataatatagtagatatgagttctaaaattttctttcttacctattaaaccatttatttcatgtgtttatgtatttttgtatcttcatcaattttagctaaggttataaatgatttttgttgtatggtgtgtcttttgggaggagagatgcaatttacatctttaatgaaccatccaaagactaaaaataattgagatgatgtggcttcatgagagaagagagaattagcattaattacatcttagtggggatgaattttatagatatataggattaggggtttgtcccaaccttttttttcatatttgaattagaacattttctatgtgtgattaataggagaggctgacgatggaaatcatatttattatgtagaaaaattcatactttcttcgtttcacaatataagttattttagcatttccacatttatattgatggtaatgaatctagatagatatgtctagattcattatctagattcattaccatcaatataaatataaaaaatgttagaatgatttacattgtgaaacggagtaagttcctaataaccagcatcagtcattcgagtaaactacgagtaccatcgatctgattacttcagttgatcagctggtacgtgtgtgcgcgcgatattcaccccactgaccaaagcgcatacataatccatacccgtagcttttgcagcaaattaaaatggttatcaataaaacacttggcgcacgattgatacaaataaattacaaaccgccacagtgggggatgtttgacaatcagaatctctatgatcagctgttgatcactcacgcacctttcttatgctcgcgtcattgcttggtcatgctgctggagactcctcaaaccacacctcgtgtattgtttgttattatatgaaaacaaaaaagaaacgcctctggatatggtaatagtcgataaagtaataatagacgtatttccattcgtcagagagacagtggctgctacgtgagacgaagaaagtgacatgagaacggggtcagaaatatcgtgcagggaaccattgaaaatgggaaactctgcatgcacatggatgattggttgcatgattggtcaatgacaaagtgcgccgagccgccggtcccacttcaagcacggacacctataaatagaactcccgactaaatgcagttcatcacaaccaaaagcgttcatcaagaagtcaagcagagcaaagttcagaagcaagcaagagagaggcagaagcgttgagaaaggccgaggcgagatggtcaaccaagccgcg

SEQ ID NO: 6243 - DNA, 643 bp, Oryza sativa
ttttatttatactatcaataataatagcccgtgggttactactactagtaaaattgtattagatgcagtgttgtatatattttatatacatgttcttaacgatctaagagaaaaaagcaaaagataaaaaataaactgcgatgacaaaaaaaaatctcaaaatcaactctacatttaaggttgaaattttaattttgactaataaatataaatataagcgaaaaggtgaagccgataatgcaagaaacctatacgttaaaaaaaaaagaactaacagctcagtgcatctcttactcttgttgattgacaccggtcatcagtagttcagcaccagacggctgttgcattaaagaatgtttagaaaattagaaccacgcattcccccacacgaggaaaatcagtgcgctctcccaggtaaggagagactttcctaccgaccagacgatgacggagagggtgacgcaggaaagatccgatggaatagcagtgcgcacatttccgtcaagccgccagggtcccactcagacgctataaatgaaagagcatcatcaacccccttggaccatcggactcggagcaaaacacaatagaggagcagagcagagcacagtgagctagtagcagaggccacactagcgttgag

SEQ ID NO: 6244 - DNA, 2000 bp, Oryza sativa
ggttgattcaatattccaaacaacttttctggggggtttgcattggctagtctcatctgtttcgcgatctgcaggaaattgttgcgttgtcaggagctcatacacttggtcgagctagaccagagcgtagtggatggggtaaaccagaaacaaaatacactgtatgtaacttacagcagttggtattgttctgattttaagaacaccttgtccattgatgcattttcgagtattgcatgctatttagttattactatttttagattagcacaccttcatgaagttcttctgatggtgaatttgttcttctgatggtgaatttgttatctggctaattgattatttttcttgactggcaaaggaaaatgggcctggtgctcctggagggcaatcttggacatctgagtggctcaagtttgacaacagctacttcaaggtaggatgcacaattttctatattaatactaagcattatagcagtaatagaacttatgcaagtctgcatacatattcaggaaatcaaagaacgccgagatgaggatcttctagttctccctactgatgctgtgctctttgaggactcatcattcaaggttagtgaagttgctcatcagctagtgttgtaaagaattgcaaatcaaaagtgatgctctaaattttttcctttttttgcttgcttgtcatgcctgaagatccatgctgaaaagtatgctgaggatcaggatgcatttttcgaagactatgctgaagctcatgccaaactgagcaatcttggggcaaagtttgatcctccaaaggtaaatggagattaaagacttcctcacttccattattggaatggagaaaatgtccagtcaacttgacttgcttattatcgctgaaatggcacagggtatttcacttgaatagctggcgtcagctgccgatagaactgcattttggcgagtgataaacaagataataccttgttkgttcttgctactatagagcatattctggttttactacccatccagaaatttaacttattgtaaatgtgatgctggtgctgtgtattgagctgtgttactgcttgccatcttatctattgtactatattataaagatagctcgaaaaagagcaaccaaatttgttcaggtcaacaattagatgcatcacaacctcagttagataatactaggtttttatataacgaagatagtaatgtgaattgtgagttcctacattatttctaacatacttatttagcattaagatcaaactatagttgcgagttgtgagttgtgacacccaacatgctagcacgggttccttcggtttctcatggaggaggaagatttgtattgtacgcgaaatgagaaagctcattagtatatgattaattatcttaaaaaaattaaatattaactattataaacttgaaaaaatagatttatttgttttttaaacaacttccatatatataattatttttttaaaagaaagtaacatttaaccgtttgaaaaacgtgctaataaaaacgagaaaattgaagtttgaacttaagaaaaagaagaggcctaaataactcaacctaaatactccctccttgacgccgttgacttttttaaatatgtttgaccattcgtcttattcaaaaacttctgtgaaatgtgtaaaactatatgtatacataaaaatatatttaacaataaatcaaatgacgggaaaagaattaataattacttaatttttttaaataagattaatggttaaatatttttaaaaaagtcaacggtgtcgaaaattttgggatggagggagtatgtgtcttccactcttctcccccccaatcaaacgaactagttaaagaattccaaaaaaaaaacacacacacacacacacacaaaaagagagtgaaattttgctattggtagattcctcccctgaccacggagcagcgaaccactcccaaaacgccaccaaaaccctcctctccccacctccgccgccgccgac

SEQ ID NO: 6245 - DNA, 2000 bp, Oryza sativa
tgccaaccccgcacgccgcacggtcagaaacaggctaaccctctcgtctcggtgtgtggtggtgtacgtacgcgatcggttgcacgcgcgcgcgcgcgcgaaggcggacgcggtgcagccaacccaacgacgagatcggcggtctcgcgcgcgcgcggcgsamcaagccacgctcamgcaacgcactctgcattattcgacccggcccgtaatcaatcatgcagaagcgagggcggcaaccgcgcgggagtgggcggtgcacgtcaaaaccacctgctgcttgcgcgcacgagccgcgtgcgcggggggcgccggccggcaggcaggcaggcgggggcctgatcagccgacggggtatcttctcgaacgacagggcggcgagaggcgggagccatgccatattccattgcgcagttgcgaataaaaatgtgcgggccagggcggtgattcgaagtttcctttaacgcgaaccggatcccggccggatcatgcagcacacacacacaacctcgcgcggcgagtgagcgagtgattggcacaaagaatatctgactgactgccatcccatcccatcccacccatccaggcaggcaggcagggatggccagtcccgtcgacctatcatctcctctccccccctgaccatgttacaacttgcgacggcttcacgtggccgccagcccgtaacctgaggtgaactctagtctaatccctctcccagcacacggccggcgctcgctctctcactagctagctaacctcccccaaccacaaagattcattgaatgcggctgcctcgctcgctcgctcgctytygccgcccgccggccaggttagccgcgcacgcgcgccatcagcggctggcgcgcggccgttccgtgattccgtcgcgatcggttgggtgcgcgcgcccgtcgcgtcccaagggaaagtttggtatcgcctttcccgaatcagccgagctcgtggcccgcttacgtacgtgcgcctgtgacctgtctgcccgcgccgtgtgcgctgcatctatccatcggtcggctcgatccgtcctccgtttcgcgtggtagtatgcccgtggcgcacggaattccgtgtcgagctaaaagcggctcgacaaaggcttgcgcgcgagaaagtcggggataaggcctggctttcactcgctcgctcggccagtattagctggctgcctaagctcctccctctccccttgcaaacgaaacggacaggccatgttcgagaagaggcaggcaaagaggcgacagggattttgccttcgattcagcagttcgcagaggcgcgggctctgctaaattcgggcagcgtttctgccgtgctcgcctctgcctctctctctctcatcagagaatctatcgccgatagcaacgcgaaacagatcaagcccgatactagtaatttgttaatcgcgtccgttagtctacgcttccggccgaccttacaccaacccgacgaccaagttgcacgagacatacaccgtccacgcatctgtcaatgaactactactagtaactactaccgcgtggtgaagtgaaagggtgaaactgctcgggtcggcttggcttggcttcggccagctagccgccacgtctccgccggttttaagtgtgagatccgacgtggaggccccggccgcccccaccgtgccggccgttgtccacctcccgacgggacaccgggccccgccgttgccgcgccgtggaccgacagccactgacgtcaccccatgtccttcttctcggctagctcttctcctcctcgcccgtgaccagcagctcgcctcgccctctataaatacccggccattcgaaggcgttccgactcaggccacacaccaccaacacaaaacatttccttgtccctcgccttcctcgcctcgcctcggctctcacacgacgcctcttcctctcgctactactagctcaagctaagctagcaagagcattccttgggctttttttcttgttcggggttgagaggca

SEQ ID NO: 6246 - DNA, 2000 bp, Oryza sativa
tttggcacgcgaaactagcggaggattccatgaaaccgcgaaccccttcgatctctcccatccatcgccttatcatcgtcatcttcccaaatcccaactaccagatggatccggcgcgtctctctggatcggtttggggtcgcgaggacgaactggccgccggttgcttggcgatcctgcgtccgtccactttattggccgccttccctttccatcccctcctgcctgcgtacgtccagcccatctcgtcgcgttcccagtaaattccaggcaactgggggaggcaagggaccatgactactgacggcgccactgcatgaccaccgcccgatctgccgatcgtgggatatgcttcatgtctgcaagaaacaaagaactgtgtttagtttaagctaaaattaaaaagtttggttgaaattgaaacgtgtgacgaaaaaattaaaagtttatatgtgtaaaaatgttttgatgtaatgggaaagttggaagtttgaaaaaaaaaagtttgtaactaaacatggtgtagctacttcctccgttccataaaaaaccaaccagatactaaaatactaaaagatactaaaagtgacacatcataatataataaatttagatatacatctatacaatttattgtactatgaatatattatattcagwgtctatattaattttttttagacggaaggagtagtcaccagctgctgctttgggccagtttgctaccactctcgtgaagggaaatcgtgattagctttggcacggctgaaagctccgtttgtacgaacagatgcatactgctagtgcttttaatataatcgcctcgtgaaacacctcgcttttcgctgcagcgcggcctttaaaacgacacgatacggtaaactctctctttcaccgtgatgcatcaccgatcgtaattcaaccggggcgcaattaactatcgcagcttaaacaggagcaaaaaaacataacagtcaaaatcttgcagctccacgtaacctctctcgtcacctccttctacatgtctcgattgacacggtaccccaatcttccaaataaacaacccactataattgcctaggctacaggctagatagactaatacaggaagatgtcaccgtatttactagtaattattttttcgtgacaaacaacatatcgttgataagaatatgtttataatgattccgttttaaaatatggcagcccagtttccagaggtgctacgtagtgtgtacgtgtggaatctttataaggtcattttcaatgagagttttattttcattgaatagggtatcatgtcaatatttttgttaatatgataagtaattaataaagaaagagatgaaatgagtttacactgtttttaatgtgacttgtctctacatgtgttgcttataagattaaaaaaataaaaatgtgtcgtatgggctattttagcaatcgattaagtgttttgtttgtgtgcaacactttttgaaaaataaaaatgaaacctctcattagaggggatggacgtgcaaatgtgattagaaccagttttataaaaagatataggttgctatgatttttttcagtacaataaatctgggcagtaatatgtccagattcattgtacttagaaacatctcatttaatattagattgggtttttaagtacggagataatattagtttgggttttttttctagaggagagagtatgtgttttaaaaaatagattaagttgaaattaaccccaacccaatccaacctgtccacctcagtggcacctttattaaacgatcccaatacaaattcgaaaccaaaaaaaaaaaatwtcctactggtggtcgactagattaatattggaagaaaattgcccgawtttaatggaatctgggcccaccaytcgtcctctccaattctataaagcgacccccgataccaccatcaaatccatactactctctactacctctcctcctctctcttctggtcgtcttctcctagtcgccaag

SEQ ID NO: 6247 - DNA, 2000 bp, Oryza sativa
tttagtgagggaggccggcggcaggcggagcagcgcgtgcggatgcgggtggcgcagcagagggcaagcgcggcagcggagcggcggcaggcgcaagcgcagcgggccgagcagtggagcgcaagcatggccgcgggcaaagaagcagagggcgagcgcggcggcgggtggagcggcggagggcgagcatggcagcggagcgraggtgggcgagcgcggaggcgcatccagcctacccaaccgaccaaagcacgccctttgccctcgaccataagcccccgccgccaagtcgccgtcgccgtcgccgtcctccccgtcgtcgtcgagcggcagcgatgacttcgcggtgctcctcgacgcggagctcgagctcacctccgccgctgactcggcctccgccggagacacctccgccgtcaacaacgactatgaggaagacccctcccaaccttccctccttcctcctcgagctccctcatgccggcgccggcgcctgcagggatgggaagccgacagtgctggccgttgtggtcagctcgcttgccgcggcaacgctggtcccggcgctaaccggctgatgcgtctgcggatcgatgccctggctcatgagcttgcgcttgatgtgcgtgttccacctgcagaaccaatcaatcagcaccaagaacacaagaagagctaaccggagcagatgacaacacgttgaaatttgttttgcttacttgttgccgagaagggcgtggaggttgatggtgagctcgtcgtcgtcgtcggtgaagttgctgcacttgaggtcggggctgaggtagttcatccagtggaggcagcagctctttcggcagcggagcaaccccatcgccttggggagggagagagggtcgacggggagagcgcgtcgctcgcccggcgggcggcgacggggcccgtggtcgagcacccggcacgttcgaacatctccgacgcagagctcgccgtcgcgccggcctccacctctcctcctctcccgccgccgccgtcgcgtcgaccgcctctctctccctctcccgcgccgccgccatctccgctccgccaccggccacctttctccccctcggtcgccgtgcctgctcgagagactcgagagatttccggagagaagagaagagaaaaagaaaaaaaacmgagaaatkttgggacccacaccattgtctcacttacatgtgggccacacatattaaatttttttttgctgactaggatgccacgtcagcaaaaccactcgtatatactgcctagggaccttgagtgaacggttttgtatagtttaggggtggagatttctagatttgtggttaagggatctcaaaaaatctcggtgtaaagttgagggacggcggtgaacttattccatattatttcatggtttcggaagctacgtattgttgggccatagcccaaactgctgatgttcacactcaaatttcgcatcaaatctcttgtaatttaggaaaattcggaaatctaatggcaaagttttgcggcggtgctcccgaagcttttcgtacacgccacagcaggttactgtagtagcagctatcacatcgttctctgacgtgtcgtcagctctgcacgccgcgaaggccacgtgtacgcgcccggatcgacacgtgtacagccacgcactagaccatctcgaactcccaaagtcccaagctctacgcaaaacgcaaaagcatggacgaatcaaaaaaaatccaaactcttaaaactcgcgtcgaattcaacctggtccagcaaaaacaaagtctcgatcgaactctgatgaagaaaataggaatgtctctggacaaatcgtgacgcgacccagcactcgcatttgcatacaaaaacctgaggcacgctgatgccaggcaaacctgacgaagattagatacagcagcagatcgattctacggcgaggacagcgagaagtcgatagccgcccatacgcggccgccggcggcgagcgagcgagcgagcgcgcc

SEQ ID NO: 6248 - DNA, 2000 bp, Oryza sativa
gttcctgctgccaaagcacatctcaactctctgaaaaaaagcaccgatgtatacgcatcggcaatagctaccaggagtacccaagcctatagagtttgcagagacaccatccaaccatcaatggccaaggcacaagaatttgcagatcactattggcaggtagcaatgcacacacccagcagccttttcatctcattctgtggttaacctactaaagtctcgctcaatcactctgaatctgaatctgaatgattttatccttctaggaatccaagaagttcaccacaccatacatcaccaaggttgtcgcagcatctgaacctcgtctgtcaagagtatgtgccgtcctcgaaccttacacgaggcctgtcatatctgcttggagaaagcttgttatgtcagcaagtgtaccccatcgccaggtaagcctttctaaccagttaaccctctcacaattcttttgctcatataactcagggatcttgtcgatgatgctacacaggttcagaaaggaatcaaacacttcgtaaacgataacgggctgctgaaatctgattcggccgacaggttcgcatggttcacggtaagcttcttcggtagtgtaatctccctcctcaattacgcatcctttggaacacatgaattttacacagaattttgttcataccatataaaaactctcaataatccccccattccggggggcttttgccatgatatgcaactctcctgcgcattcttggaaaaacaaaaaaacaaacagaaattagtttctcatgctcttccagatctcaccgttttgagctgtttacactatgcaggcatcagctttggtcgctctaccgatgttctacacctacaagatgctctcagctgctatatggtgagatgagacctaacctaattgtcagtgccttcctaactgaaccaacattctggagtggtgattcgactggttgccggtttagctaactgatggcgctgatttgcaggaggaaagctgtggcagcacagggcagtggcggcacaagatcaaaaaaagcctcgaaccgcaggcgcacacagagagtggacagctagacttctagaagtgttctcaagttgagacattagtactgggacatgcgtttctaaaggcataccgcaaaatcctttatattttgatatgaatatataataggaaactacggatagactgaaatgcacgcataaatcctgtacatatgacgttcatgtgtcatggttgctgttaatatggtctgacatggtgtatatatggatttgattttttttttaaaaaaaacacactgtacgcagccgccgtatgtatcatatatacgcataaacacgtatgaacgtacataacatatgtaccactatgtttttgaagattcgactcatatattttaagataatgaaattatcgtatttatctcgttgtcgatgtatatcatctatcactatcactggaaaaatacggatttggatttttctctgtctatgataataaggttttggtttgtttctaagtttgggctcgattggaaatcgatcaaatcgaagaagagccggcctcacgcgcgcaactacacaagaccaaggacgacgacggggtcaaatgcgttctgttttggtgaaaacggaggggatgatggagacaataagaatggatttattggtaggaatacgtgacgtgatattatagggaaactttgagattgtctgttgggaggtcgtttgttttttttttcctttcttgggtttttttccagtcaaaaacagttttctatttttagaaaagaatatagataaaaaagaattaggaaatatagataaaaaagaattaggaattaaaggatgcgtacgggaggatgggttatattttttcatagggtaaattggaaccatgccaattataattttgcaaaagtttgagatatgtcatcggtatctcaatgacatgtagaacccacatgagtcaatgacatgtagaacccaca

SEQ ID NO: 6249 - DNA, 2000 bp, Oryza sativa
tatcctaaaccctagccctcctaaccgtttttctctttcttgctattttatggcgtttattgaatttggttcttcctcttcttcagtagagtctattatatttggatggtaacctgtggtatttcgagcatcggataatcaggttgcctatctcggatttatttgcgctggagcaagacaagttattattcctctcctttgagcataaatgccctatattctatatctttattctatgcattagtcattcatgatttcgaatgcataacctgaacataggaaatcagatatgatagcttttgcttagccctgcctaactagactgcataaaatataatgaacttagattggaacagtatggtagaaaatggttgatttccgggtggctagtactgtttcaaccgacataagactgcccaaatacttatgaagaacgaacggatacgaccacagctctaagtgtgggtatagatctagtattatgttattaacaaggtggtacctatatatagtggttctttttaagtccttgcgcaggaggaaaacttatgccgagcagggcaatattgtgatatttaccgaggcgtaggtaaatatttgtttgagataatttatgatgactagtctgtttgtgaaccctgattgcgatgacatggtgtcatacaatcagtcctctctaaataccccgggaatgccagagctcctctcgctgctgataacgtcacgttcagagcgtatggggactagagttcatggaacaggtaccacaattgttagtaatctaatactaggccatgatgaaactgatgattatcagcaagtcgtgggctatgggtaaagcgtacatttactgcaataaagtataaatgaatctatttgaatagccgtactcacggattgagtatcgagactcatattgtatttggttagaaacttaattccaaactttattaaataatgttgcatctaaaacattacaggctttcttcctctatattctcagccttctgcaagtaaacttaattctactcatatattaccattccattcattcattattgattaatataatagcttgttgagtacgttgtactcacccttacttcaaccccctttttcatagtccatttgatgttcttgccgaagccgggagttcaatcatataagttagtctcattctaacttagttctcaagcatatattagatagatggtttaagtctatagcaaaacattagagttggctcatcctgtagcttctactgtgatagttagccacaatcatgtaaatatcctattattttataattacatctcctttggagccttatcaaaatgtatgcaatgaagatccagattgttgaacctatatcaatctactgatccagggcttgatacagtctaaacatgttggttaccgaatcattagttttgggacccgacactgaaccacagactacaagatataatatgcgtatgacatgtggggcaaggtactatttgtgtagcatatgtttatatgtaactattatataaattggctattaaattgtctataaatgatttagagctagtagttggctatactattaaacttgctcttagaatatactttctctatccaaaaatctaagacttatttcttttttcaccaagactaaagagcaattaatttattcaccatgataaaactaatgaacatgaaaaccattaagtactaaactgactttttggttccaataaaaaaataattttttatttagatttttggaaaaatcaaaaggatgaaacaagtgatagacttttggatggatggagtacggcacaccatcagccgcccatcaattattagtaatctgctcatcgtggcggctgcgcgcgagtttcctaatctagtcatctgccgagtaaacaaacgcttgcacagttgcagcagtggacttaatttgctgcagcctgcagctgacgctgcatacggaggtgcagtggtggcaacgggag

SEQ ID NO: 6250 - DNA, 2000 bp, Oryza sativa
cttgtacgctgactaaattagttttggatttttggttgcaatccaggacgccctgatgttatgaacaacaatttttggcccatagtggatgtccgtgatgtcactgattctttacttctagtgtatcatgtatgacaagtcagggccatgtgagaggtacatatgtgctcaagaccaaatggacatgaaggatttggtggatttgatgaagagcatgtaccctaactgcagctactcgtttaagtaactgcagctacttgccaaattttgccaaaacctcaggccatacaccacctaactttaacttaccaaaatttggtattaccatagttttgtaagttgtttttttctcaacgaagggaacaagccctaagtgttttgtgctcaaaacatgaacacgatttgagcagctcctctctctctgttttttttttccttggtcagattggttgatgtgggcaacaaggtcgaattgacatcggagaaaccgacaaagttgggctggaaacctaggaaacttgaggagacgctcgccgacagcgtcgaatcctacaagaaggcaggccttgtagacgatgaaccttgccggcttccccatgtttaccgtatgcctgatacccaggagtgaacactgaacttgtcactgaaacacattttttcagtaaatgtgttttctgtcctcattctcagctgctctgctccattcaggattcagatgcagctttgtgctcagtgtatatgcatccgtttcaggctttcatctcaacctgttgatccgtggaaaactgcttgtgatttatagcagtcatttctgatgctctatgcagcagcaggtagcacttcttcaagagaagtgttaattcctatggtcttaaaactccagcacggtaactaacggatggagagtttatttctgagaaacagtttgataaatagcttatgagattttgaaagagctagtttctagttcattttctgaattctatagctgcagagtaatttgggtgagatttgcttctatccaacmaaaggtacctcgaggtaccaaatcgttttcgatcgttggatctaacaatgtcctgtccaggtagatccaatgatcggaaacgatttattagcgtgaggtaccgtatctcgagatattttttattggaccagagcaaatcttgtttggaaaagcttctaacaatcacaacttctttcataatcttcagctttccaaacagaccctcgaatgctggtaaacaaaaattcagttagagaagagagggtttggaggcctcagaaagcagaggttcatctcgtgtgccttgcaagtgagcacaagaaagtcggccatagtgagatggatcatggaatttatgggccaaatgttgagctgggcctaggagatttaatgggctgcattgcttgaaatcttcatcattgggcaaatgtaatagagctcggaattttcatgctattcgattcggtgagagcatccaaaaaaaatgtattttttttcaaaaaaaaaaatcaactttctaccgatctgaccctaagcggctagacccgaattcggtataacctgatcagggtattctttcagttcttccgtaatatctgcggattgaaatcaaacttcgctagatgcatttgatttgttttgttgcattcttcatcaagaaaaacactactaccagtattccttcgcaagaagaaaaaacaaattcaaacaattattctgacttcgccacctatcgagagctaagatgcggtctagaaccttctccccacgacccccgacccccgggcccaccgtcagtcacacaacccgaccccaccgaaatgacggaaatgcccctggccgcgcctttctttcccctcctgcaagccagagccgcatcccgcgaggggtttaagagcgaagccctcgccgccaccccgcctagggtttttccggatctcgccgccgcctcctcctcctcctctccacctccgccgccaccaccgccgccgcc

SEQ ID NO: 6251 - DNA, 2000 bp, Oryza sativa
tactatctttgtctctaaataatataattttagtccaataacttaagtttctcattttctcttcgtattacatatatatagtattttttaatctctttcttaatataactttgactagctaaaaacggaaggagtaataataagacgcaaatggacaaacctcatatgaaaaaaagtcaacaatatcaatactaataaaagacaaaacatgacaagatatcaagataataatcacctgtatcagataagccgaaccctccttgagtcaccggcacgcatacacggcacgtttctgcggagatcgatcccacacttcaagacaagcttcgacgactttgaactcgaacgagcaatatatatataatcttcagtgagaaaagcctcagaaccacaccctcgagagcccgagctggagaagaagagaagaaaaggcggccacggaatcgtcggccgccgccacctccgccgccggcgcagagctccgccggtatcggccaggtggctcttctcctctctcggaatcgaaggcgagcgcgcgcttaatttcttcatctccctccatcttcttcattggcggcggcggcggcggttttgcggcggcgcgtgcaggccagcaagaacgaagctaaggtacgcgttccaagccctcctcccgtcgtcgacctcctcctcggccgcatgatcccggaggagatctcgattccgacgtgtgcccgcgcgcgttgctatctcctatctgcatctgttttttttttaaaaaaaaaaagaagaagaagaagaagaaaaattgttcttcagtcaaagctatagtactctccctattggagtktgctcattcgatcagtcatcagtcagagctagatgattggcaratgtaagctacagtttagtttgtcagtaaatagtatagtacagtgcaagctccatcgtcggcgacgatcagatcaggctactgatggcatttgctgcacggctgtgcgaatgagctgcatgcacttggagttgatgttagagtttgttaaaattaagtttccatatgaattaggctaggaatttaggattcctccctattctcccgattctgtttctgtaagtcgtttagagataaggtagtcgagctctagtattttgtacagttgactgactccttggagttgttttgatcttgcgctttgcattgactcagttcaaagctgttttgatcttgcactttgcatggatgagcatatcgatataggggtggatcgaaaccatgtgaagtctgaaactctgaagctcatttcacatgctcctgtagtgttcttctcctttgggagaatctcagttacctgctctttttaaaagctaatcttgtgatacttcgctgcatcaacttcttgtagcctagtggttgcagtgacctgagcagtaccttaaggttttgagttcaaatctccatagaagcgaatttcagattgggttgaatttcagattaagttgtttgcggggttaagttcctaatttaaatggccgcatatatccggttggatgtagatgccgggtaaaaaatacccttctctaaaaaataaaaaaaaaatcaacttcttagtttatttatcctctagcccttagtttttcttccttgtggtagactggtagttcgcccttcttcttgtttggtttcgcatgtagtagaatccttggagacaaggaagaagtaaaacttgtttggtttcgcatgtagtagaattattggagacaaggaagaagtaaaacagttgtacaatttgcaatctctgtaccatggacatgacatttggtccaataatggtcctttctcatcattgtagcaaaaaaaaacgttttttattttagaagtttatcttttagacgatcaaatacgcatttctcgacatgaaacatgagaactattattagttgcgatgcacttagcatgtttgatggttttacttttcaggacagggaacagtgactgcttgttgaactaagctacaacaatc

SEQ ID NO: 6252 - DNA, 2000 bp, Oryza sativa
agtgtaaattccaacacctaggggtgtgtttggaaaataggttaggagaggtgggatgggaaatagaaatgaatggagggatatgataaaatggagtgagatgaatggatggctaatattgaagcttaccttttaagaggtgggaaatcatatcccaaaccaattttccaaacacagcatatgtccttctccctctctctcaacaccatgctggaacgcctcctagctataaaacgctcaaccactaatagtcttcggtacctctcagaatttcttccctcacgccgtgttaacacttaatggtgtgacaattgtgatgccacaagacggactcgccaagcaagccgtagactctcgctgttgttttaccggtgaattcatgaattcatgaagatttgcagtatttgcaccggaattccttgccttccagctcacgtggctagaaaagaaaaaaaaaactacactcggaaaacaccctgtagccgtgcgtgtgcatcttctccgcacctccgcccattcgtacacatgtaaacgtctcatttttctcatctgtcaagtgccaagtttgttcttgtccattttctccacccaaaagcatggaaacacaggtcaaattaatccggcagcaaaaagaagtcgacaaagaacacggatagataacccaccatcagataaatcgtctcaaagtctaaaagattgcaaccactgagtggtaagcaaagtgcttaatcttttcctgccactgaaaattgaactctcaccttaatttcttcatcacaagaagaaaagaatggctgacgattgagctactcgccaactaacccctctgtaacagtaagactgtagtaactgctgcaacaaccctgatctcacctttaattccaacgtaaccccaccacggtccgattttcatcagatgatcaagatcccatttatggttgccgtcagactgtcagtcattccaccgtttttttttttgcagttatgttttctcatcagtttagagaagattcatcagttatgtcaaagattcagctactccttcatcagtagctagtggctttgggaattattcagcgtatttgtgcagtttgagacagctgaaatttacgaactgatggaatttcttttttttatagttatttgaaggtataagtggataaattaatgctacaaggtaaaaaaaattgcttttcagaaaacgcacagcctagtactcctagattgggaagtgtgaaatctaaaattagaaaagaaatcagatactccctaacataatatggacatcagtctggtgtgcagaatgggaaattaaggaaatggatctttgcattgccctcaaagaccggagaaacctttgcatgatcaacttcgaatcccctaatccaaatcacagtgattaaactagtacctcattttttaggtattgcaggtgattatttaagcttaatcccaacccaaccataaaagcgatggttagaattaggaagcctaccacccaacgccttctagaacacggacatttgtacggacactcgaaatcaatttccttttcttctcaaaaacaaaaaaaaagagagaaaaacatcttttcccccttcgatgcgtgccgggtcgtcgccgccagccacctgtccttcaggataggctcggtgggacccatctcacagtgacccagccagtgacgtggacccacgcggcagcacgaaccgcgacccgccacgtgtgccgcccccccgctccacgtgccaggtcacgtgctcccgtggcttcgtcttcgtcgcgggttaaaaagagaaaaaaaaggggaaaaatagaggagaaaaagggaaaaaaaaatctgcagcctcgcagcgcctaagtcctaacgaacgcgacgcgacgcgcaccggggcactctccgccactactcgccttcgtcgtcgtcgtcgtcttcgcgggctcggcggcgaaccggaggcggcgggttggggttgggaggaggaggagggggttcggcg

SEQ ID NO: 6253 - DNA, 2000 bp, Oryza sativa
ttggctacccaagaacaaataatcaatcaactaactactcttactttaagataagtgcaaatggggggatttaacacctataaaacaaaataatccatgcataactagtagaaaacaaactaaatctaggtaagccttaatgccttatatacaataaaaatgaagaaaataaaaaaatattttttctgtaaatctttgcaagaaaaacctgagtattggagaattaatatgttttattttttttactatatatgcacttttaaatgactgatgaaagctaacaaaaaaaatatttggatgaaaaatgataaaaaaaactgctttagcaaaatttaacacgttgcataaaagtagggtggttggcgggaaggtctggagaaggatcttgtgggcaatgtcgagtggaatcagaaacaggtgaatcggacagggagcaacgcagtcgtactaggctagctattttgacttgaaaaaaaaacgagcccgtgtggtcaaatacgtgaagcgaattagaacgttttctgaaaacgacgtacgcctcaaaggtccaaaacaagatctcatgagacgaggaaacggaaaccccatgacttgaaccttaattaatttgttctagtactgcactgctacttcttgagttcttatactgcgtagtagctcatctgttgaatgatgatgcgtgtacaacctctgttcctccgttaaaaaaatattaatttttaaggtataaatttatacaagtatttattcagatttatctttaaaagctggttggagtaaaagagtagtcaactaccgaaggttagatttaactagtcctacaaaactatggttggtctcctcccttaggtgaaaacccagtctagctatgggcaggtgtcggcaggagcttctgtcgttgttcacctctttggaggcttcgtcttgaaggtcttgctactctctcggttacttatgtggttcgtagttttgtcacaggttttctgtgtcttctgtgtaaggttttgtcggttttctcttagcaaaccgtgcagttgtatggttttcgatcccggtttcccttataaatagagtcaactctcttcttctaatatatccagtagaacttctaccgtatactgtttcaacaaaaaaacaaaactatggttactagtgattgtagtttcatatgatctggattcaacaaaaaaaaataatgatctggattcaacaaatgattcatgaattgttgattcgtatggaccaacagaccgtcggaccatgcatgtcgctctcattatgcataatgaaattaaatttcattatattagttttgggctagttgatcgatcagaaagctagatcacctaattaatgaatgatgtgcaatcaaatgctgagcaagtttcagtcctttcataatattattacacttatatgccatttctcatgtactttcttcaatgtgaatgtgaaaaatgttagaataacttacattgtgaaacggatggagtatatgtgtaaatatacaatttagtgatcaaattaatatactactagttataaaaaaaatcctccggaaagcaataattttttccattattttacgatctgaggagtataaaatgaaatgattgtcctatagtctattatagtttaaacacaatatatctccacaaatgatacttcaaaggttcattgtattacccaaaattctttaaacacaaatacacaatatctccacaaatgatacttcaaatgagggtattttgggtagtgaagtttgttgtacctgtccaaaataccctcatgcctctttaggctgtgttcgcataaggtggataggaacatattccctccgcacggaaaacggagcgattcattagcgtatgattaattaaatataagctaattttttttaaaaaaatagattaatttgattttttaaaacaactttcatatataaatttttttaaaaaacacaccgtttagcaatttgaaaagcgtgcgcgcgaaaaacg

SEQ ID NO: 6254 - DNA, 665 bp, Oryza sativa
gttactytcgagagctcgagatccggsgaattcgacgacgaatttggcgttaggtttgcttgcscgggttttaggatgtagttgttgatacgtttcgggtttgcaaaatttgatttatccatgtgaatgtcagagaattgggatgggcccgwcaacagctattgggggtgttgtgatggaatttaataggcccccatcggttggcatatatgcgaattatacgccttacagcgtattagcaaaagaataatgttttgtgggtaaaactatagatatgagatatgtttttagcgatttaaaagctaatgctgaaaaataaacttcgatgaaaaaactttaaaattaagccttaatattcaaattcttggcagcggctgatttcttataatgaaaacgatgggggcctatggttcctgctcttcatgccagattgtcagttcagtgatgcgaattttgagtcttcaagttgtgctaggaatttggaacccgctgataatgttatcagtgctatttgcagctgggttttatattgaattgtctgaaatgtgtggattagttacagtcagttccttttcttctttgctattattggttaggaggtgatgaatcatttcgacccattctatttagctgtgccatcgatttattatgaattacgaagcaca

SEQ ID NO: 6255 - DNA, 2000 bp, Oryza sativa
gcactattttttttatttgcatggccctgttttttttttggttttttwatttgcatggccctgtttgattatctttagccacgtaacttttgctgcactaaagttacgatctattaccaaccgggactaaagatccgggggggcctgacaagccctgacagcatttgaaccgggacaaaagatgatcttaccaaccgggactaaagatcaaatatgcacgttaccctttttaacctctttagtcccggtttttgttgcaaccgggactattgtggaattaggccgaccgacgaaagatggtttctccaccagtgattgtaaatttcttttattttttcgaagcaacttaaatttccttcacctagcttgctaggtttccggctttccgcactatcatgcgtgttacgcatatggaagaagctcgatccttgttgaaagttacgcagcacggaaaaattctatatgtgttaccatcgacaagtgatcaattctacaaaatgctataacaaaagggtgtttcttccttttccttaatcccatgccaaaagtctaatttacctctatgatatatgatgtactctttatgctgatattatacacttctaggggtaaaatagactttttaatgcgttaacagagctcaattataacagctgtcacctgacagttatggcagaatgggaagaaacatgcttgtgtggtggcattttgtagaactcatgtttggtattacctcagtactaatatacttgtcatcctagattatttagcaaaaattaatgtttaggaaaaatggctatagcaccctctattaaattaatgttacatgattggtaggtagagagtagaatggagaaattttgaattgaagatgattgatatgataaaatatactttaaattgacaagttcttcagaacaaattttgaatcgtaagtgacatctattttgagacggatggagcacttcgtaccattgatcactttgtcgatggccaaattataaaatttctttatcctaagattccatttataatttttgcagttaccatgaattacctttttacatataaaataacacattcggtatcaaactatacacagagtagcatataagttaaaattttgtcatctatctgttttaataatttatttgttttttcgccaggccttaataatttatttgttgctcggatcggataagacaatacagttatttgtgttatcaccaatcatgacaaacaacggcaccacgcaactaagaaaaaacctgcattttcatacaccacacacaggagatcatgatctcctaaaaactacaaagcccacctattctctccgggaacaatgatctacaaggcagaccagaatggaaatgccatggcaagcaagctttgcatgcatgagatcgagctagctagctcaagctcaagatatagttttgattgctcttaatttggaccttaattaattacgtgctagtgtacgctattcactacttcatgtgacgcatgcatagaatgatggacatcaaccttcgctaatgcaatagtgggtgacgtcgtcgtgccaatctcattgttatttcttgatacttgcatgtagatatgagcctaactgtcgaaatgacctaactcaaactattaatcgattgattgatagcatatgaagctgcatgggcctaactgttggatgatcagataattaattaactaagctagcttagggcatagtaattgtgtacaagtcctacactctttgctaattagctagtttgccccaacacaccacacactacacatgcacatacacagttaagcttgatatctctctctcgctcatcgatcacactataaatacgttgccctagccatggcaattttgcatcacaagatcatcaactaagcgaagaacacacacacaaacacaaacagaaaaacacaacacattaagctagctagaagaagagagaaattaaagaagctaggagctaacgatcagg

SEQ ID NO: 6256 - DNA, 599 bp, Oryza sativa
atttctttctttattattattttcttttttccgccagattatctagttttgttagtggagcgatgctgccaagtttgcaacgatgcaatgcaagcgcgctcgttcaaaatcctgttaatttagttacttacgagattcaagcgcacgaactcgcactataatctctctaagtttccgcggcgcaaaaaaaaaaaagttaattatactttggtccaccttttattmccaaagaaactttgagccaccctytaactaatattttcactttagactaggtaagattatctttgttgcggtttggaccactccaaattacttttctagttgtatctaccctctaatcttgcgaagaatagtctacatttaagtcgggaagattattggtttatgggtcccgatgtggttaaagtcatttatgtgctaaaaaagtttttgggtggttcaaagtgaaacaaatcaaaagtgaaaagatggttttaaaggtagtctaaagtaaaactttggtgataaaaggtggccctaaacgcaatttacttaaaaaaaatgcagtcttttatttttcttttttaaaaaatgtttgggtttcgcaggtccaagaa

SEQ ID NO: 6257 - DNA, 2000 bp, Oryza sativa
aagctcgtgcatcccccggagtcaggtttcggaagaaaatcacgtgatcattattaggccatggcaagcccgtgcagataagcaaggtcttcactggcgtgacgctgctgcaaaagtcaagaaatggcgagttgataatctttatctgcccacggcacactgaacctaagcaacaccatgtgtggatttccaaccgttcatctcgactgtcggtagataactagtgtaaagttctgagctacactatttcagtgctttaagattttcggagacaaaactagtatatgaactgaaattagaaatgatgtgatatgagaaattaagtgaacgaaaaaattaaatacagaatagttgtgattagttgagacgagagattatatggaaagtgttatattttaaaataaattttaaatgtggtaagttgttatattagggactaggagattgaatcttttatcgtaccagagaggataactctaacacgatctgaaaaaaaacattttactgtagctgttggactatttttaactataccaattgtgattttttttagaaccaataatatcctctcccatttccctgtacaaaaccatgctctacttctctgataaacatgtttttagaccaccacgatccaaacaaatgccgatttggcatcttcgttttcttttcgggttgaaaatgtgacaacaacgtcacctacgaccttaacattatttcgcatgtccagcatgccatattgcagtacgagacagccgcattattgccccgcaacatatcgatgtgtttgtcactcaatcgagcacattctattctcctcataggatagaattagattgatagaaaacgcctaattaatttcgcaaagaaaattttgccatggaaacgctaactacagcatgcggggctgcactgctgcaggtcgccggttgtccgtttctgctttaaaatcgcacgctgctttctcgtaagctcgggcccaacaaatggcgtctttaaccccttgtgcscgagcgcaaktagtggcaaaaacgggtccaggggccatgcaccagcatgacttttacgctattttttcctccgatagcmaaattcggtggccgctggccamatgggtttcgtacgggtcccttgtttttttttttttgccagtgaaaattcggcatccagttactgtagttaattctgctagtacgaatacactcataccagtagtacaagttacaagttacaactagcctgtcgtttacagaaacgcaaggggattattcaatggctggtgtgatagtttaagcaacttgcattctgcaatagtgatagcgctttaggcctttagccatcaacaagacagagataagtatgcagccttatggtagacggaaaaacgcagtcattcacctgatgacctgaatgttccggaggatatccccaaagtaagcacaagttggactggaccatctagagagcagataataatcaatcgcaccaacagcgctagctagctgctctgctgccgcctacacgatcctgccttgcaggcttcagcctgcagcgcccacaaaccggctcgagcgagcgaccacgaggcgtgccgggccacacactgctcccctcgagaggccgagagagccgagctaacgacctcatcgctgacgccaccgcacggggcgaccccaacaaaagaaatggttatctcaacctcctccccaaaacgcccaactaaacaagcatcagctactcgacccacctatctggcctggctcactctttctccgtttattttttatttactcttcgtaactaaaaatgccatttccaccacgtgggtgagtgcgcgcgcgggaggaaagttcaacgaagcgtcgaagcgagcccgtccacctatataaagctcgccccgtctccgcctcggcttaccattcaactcgaacacaccacacactgaagtgtgtaaccaagtttgagacagaggcgaggtcgggtcagcaaggaagacggcg

SEQ ID NO: 6258 - DNA, 1379 bp, Oryza sativa
  misc_feature (1)...(1379): n = A,T,C or G
ccggrtttcngggcccccyaaacccggaanntccasggramccyttttttnkrrgcccaanttwtyccmmctgggatyytnwtttncnaaccccwttwttccgnrannaaaattcccccyttaaarkncmnawtttkaaaawatyccsggttttyaaaaaaaaamcccccaawntwaacccmaaaaaaattkcccccwaaaamcccsggggggccctttttccccccmmawaaammccccttttaccccsccynaaaaacccntttwncccsgkaacmaaaaaggggaaaccccggraamccccsraaacccmaaawttttcaaaaaaawtttkrcaaaawattcycawawttaaamyccamwwtbytwaaacacsgynttttttwttwaaaaammmccttntwtttncccccattacccctaaaaamccyttttcccccccggaaaaaagcgggggggctggcagctaattggcgcgcgcgccagatacggaactggcacgcgtgccaacaccgctccatgtgggcttttttttctttagcgattctttccgtgtgattttttcgtgattttttctttttttcacgatttttttcctcagcgtaatttccatttttttttgcattctttttgatttttttaaatttgaaagttttcaaatctgagttgaaagtttttgaatatggacttgaaagttttcaatctcgagttgaaagttttcaaatatggacttgaaagttttcaatttcaagttgaaagtttttaaatctcgagttgaaaattttcaaatcttagttgaaagttttcaaatatggacttgaaagttttcaatctcgagttgaaagttttcaaacctgagttgaaagttttcaaatctgagttgagttgaaaatttaaatttcaagttaaaaattttcgaagattgagttgaaagtttttcaaaatttggcttcaaagtttaaatcttaattcaaaatatttcaaaatctaacttgaaagttcaaatttcaagttgaaaaaattttaaaaattgagtttagagtttcatattttaagttgaaagttttaaattttacgtgaaagtttttttcatgtatagatttattttcaatctactaataaaaaaaattctgaaaaaagaaaatatttccttaattatcatcattatcctaaactaatcaagttagttacattctcctaaacttaatcggttagttacgttctccgaatcggttagctttctcgccttttccgccctccccgtgagacttttctcccttgtttgcttcgcctcggccccttccccgtcctcctcctcctcctcctcctccgccgccgccgccgccgacgacgacgaggtctaccctccgctgaccacg

SEQ ID NO: 6259 - DNA, 2000 bp, Oryza sativa
cgatggtgtagagatcagatcaaggactgtttaattgctttcatactcttttttggacgaaggatgtatatacagttgtaccacactgtactaatgtgtgtcatcaaagatcttattgacgtagacagatgacacctaaaacatttaattaaccatcagcataaagaagttttaccgtgtgaacgcatttcttccccccctccaaaaatacatttacttacctcctactctttctgtaccaaaatatagtaatttagaaaactagacacattataataatataaatttggatatagggcttgtttagattcatatcattatgatttgtccatcttagtcttaggtttactatattttgaaatggagagggtagctaatcctattttttaaatggaaaataacaatgatagtttatagaatgagatatactttgaaccatctttattaacaaaagtttaacagtaaactaaacgtaagactaactttcaacgtaacactacgtataattaaaaatgtttagacttcatgcttacttcaaagttcatcccaatccatgaaacatagtgcgagataaaagatcgatcggtatgatgacaattgggtgttgcattatgtgcgagataaaagatcaagcaacgatttattcttgctttgtattttttttccaaaagcttgcataaaaaatagaatatttttatattttggtattttgatagtaagggctttgatggcggtggaagctcttatatagattctcataatttatgaccacaaaaatacaaaatttgtagcacaatctatattgctattgggtcaaagccaacatgataagctattttaatcatcaactaaatgccttgttactcatgtggcatccttggaaacagtgatgtaacattctaatgtgacattactcaggtggcatttaattgaacattcttaggccattttataagaatgttcatattttgggcatgtttatatttcgggaccagagaatttctaattatgccgcaatttataatctgaactgtgatgtaactaatccacatgtgcaagagaaggtttggatgaattagttgcagcagacaggtttattgcgttgtctatcacggtatacatatgcaacaatcaattttttagtgcacttaggataatgatctagtacatacattctacaccaacacgcaaaaatgcataagcgttcctattacaatctcaatgatcatgacacagacattaattatatatgtacgctgactccttttcgattgaaacgaaacgtggaatgtgttccattagtctaacccgtccaagcactgaacttatgctgcatacatgagcgagagagcgtttgtttttcctttttttgaaaaagttttgtgccaaagttgacaccacataccatagacttggttgactcactgctgcaatccacctttgaccacccatgcataccaaacgtactactgtattgccacgtatacaataccgtacgtacgtgctaaactaaactatcttaattagcagtgagaaagacgcatcgtgcaacatccgataattccacaaatccacacaaacctacggctttcacacacatgcattagatcgatcgaacgctaattcctggaatataatcgccaaggcgcaaaattacagttgtaaccstcggttaaaccacgagttaaaagcggggcggcgtcgcacgccaaattcacacgtgacagctaccgtcttctcgtctgacccgagtccgagtcgaccgcaccgcgtcgtccccttcggttccmcggcgcgcgaaaccccccacgcgcttcacggcggcccggtccggtccgtggctggcaatggcagtataaaaatcgtggacttctcttaatcccttacaccactatcggcacagcaaggcccatccgcgaacgcagagcagaaaaatcagaaaggaaatccgtgtaagccgtcaggggcagcggctgctaccgtcggtggcggcggaggcg

SEQ ID NO: 6260 - DNA, 2000 bp, Oryza sativa
ccggcgactcttcccagggcgtcgcagccagccaggtcctcccctggtcgcggccggtcgaaggtctscaggtccggcgtgcaccatagccggtcatgtcctccccgtgtgcgtggctgccgacgagctttttctccgtagccggccatcctcccacaagtcggtccctcccctgtcttgctcgcgcggctgccgatgagcttctcctccgcagccagccatcctctcgcccatttgtccctcccctgcatcttgctcgcgcggccgccaacgagcttcttctccgtagccggcccacctcccactcgtcgttccttcccctgcctcgtgctcgcttggcttcacgtcgtcctccccgaaactcgccggctctacatcgcgtccccctcccccgctgtggcggtgacgcccctttctgctgcgggcacgggcacggcgaggggtggctccagcggccgcacgctcgtccaccgccaccgccagccaccgtcctcgccatttgtgagagaaagagagagataggagatagagctgacatgtgggcccaagggcatttttgacatttcacgcggtttctctctcctccccaaccggaaagtattattttaatcggcgcggtgttcactggcaaattaccacgtttatggagtgttttcccccaaaaataagtttgggcagtgtcttagtgctaaaatcacacataacaagtgtcatgtagcaaaattttccctagaaaaaagtctagaagattttcgttcacgaaaataccatcaaggagtcgcaccaaaatactagaaggatttaccatgtgagaaatttaccaaacaaattgcctgcagacatgagcgaagcagagcgttgcgacagtgatgaacgccggctgagagctaccgaaatagggcaacaacggcaatagtgctaaagttagcgaaggatcgatgcgatacaagattgaaacgtaataaaaatcacgaatattttcctaataccaagtttacccctaactgtagtcctaacatagtactaatatgcccttggaaatcgacggtttggattatttctacttgtagtatatactacaagtagaaagcaccggagcgtcgcccaagaagatatattctccacactttattctcctatatctaaagagcacaggaacgggagaatcaagtcacgttgttcaggggacgaatcaccgtggttaattactcctgcaaccttgctagcagacactctgttctgctaaatataccacacacacacaggttctctttatccgccgctgcttctgaatttttgcccgatccgacatccaacatgatatactaccgatggccaaggcaggaactgggcctaacgacatggacaagctccatgtacatccaaggctccagccaatcgttttgtcttgacgcacacttcacttctgccgcgccatttttgtcaccccaggtttgctgcctctgagacggactaggacactacgctacgtgcaaactgcaaacataaacgtacccggcgaattccacagattccatattgatgcgaacacgaattccaaaaccaaaccttttcccctgtacgtctaccgtctacgtgcaccatggggcaaagccgcgaaggcaacgaatccaaatatatgaggctcaggttccaatcttagctacgcgaactagtacaaagatgatctgcaaaacccctcacgtgaactgccccgtgcgctgataaaaaaaaaatcaatccatcggtttggtgataatattcttctccacgagctgctgctaatcggttaatcgcttccttgcttggatcgcacagcaaaataattagggcagctatattgccttttctcttgcttgcgacagcaggaattgtaggacgattaatcttggctaagctggtctcgtgatcgattcataatcgtcagcgtacggcggtataaagcggccsggggaaaggccggcttcgcctcccctttcctccaattctcatcgccatcg

SEQ ID NO: 6261 - DNA, 2000 bp, Oryza sativa
tttgaaactgaagtccctatgatatgagatgagctctatttgaattcttaggaaataaacatgagatcttcacctaagagcatctccaacagcatacccaaatcaaactctccatctccacatttggcaagttgataaaaaaaatttcctctccatatttcatttgtgctccaacctctccatctacaccctccgttgagtttgtgacagtgggacctatatgttgtgcttgagagggatgggggagggaagagagaaggtgggggaggtgtgccccatcggtcggcctaatgagtcaaaacaaaagccaaaatttgaattttttaacttgattttaagatattttcaacgtaatttctttttatattaacttaaatcgctacgaacaaatgtataaaaattttacctttaaattaatttttattccctagtaagccaaaacgacttactagggatatggacaaccgatgaggctatcaacttgttagatttggccatccaagtgagaattttggccactcatttggcttggcaagtttgttcgaggattttttaatctaagtttgtcaaattttgcttcgaagagtaagatagatagtttgttggagttacgcttatgcttctctcttaccgtatggcatctaaacagttgatctagagcattcctttagagcttctttgaattgtaggaatggaaaaacggagggataggaaaaacacaaaattatggtaggaatacaagtgcaaaacataagattctgataggattgttcattctatagaaattttaaaggatatgatatgattcaatcctttgtttcaaaggtcataggaaatttctccatagggttgaaatcctccaaaattattatggtttcctccaaataaaagggccattagttctaattcctcgagaacttttggttttatacttggacaaatgcttgtccacctacataacccaaaagtaactatatttgagattgtgataatataaggtaagatgatatgaaattggtttgctgcactattcataatagtatttgttctattaattatcacccattcaaatgttttctcatcttatcttagtattcataatactaaagttttctttcttaatcttagttttaattaaataatttaaaaaatattatattttagaacgaagctaataatagtaagatataagaaagctccaatattttgtagggaggtagttcctctctttcgccactcctctcggctgtttccgaacgttagccgatctcaccgtgaccgtcgattccccatccaacgtgagcgcacgctccagcctcccaggtaaggtgcggctcacgcgtcacgcaccagacatcatggtcccaccaccactccccccgtcggctccctcccaacgcgaatccaacggcttccgtcccatgcacccggtccacccaaacctcccctacccccacgcctcctctgctctcccactccctggggcccacctgcagtcctcctctgcaaccctggccccacatgcagtgacccggctcacacatcccggtgcaccaacacccggtccacgcagcgttcgtcatcaccaccaccctcctcgcgaagcttacataggcctcgctttcaaaatccgctggtactaaaaaaaatttttccttcgatttctctcgcctccgcttctccactctccggtagatcccaccctccaccgccgccgccgccgccgtgctccggtgagccgccggtgagccggagactacagcgacgtcgcgcagarccgttgggcgggtaggcgkttggggctttgcccgagatggcgacgatgggagcctgatcgggctggtgaaccggatccagcgggcgtgcaccgtcctcggcgaccacgggggcggcggcraggggggttccctctgggaggcgctgccctccgtcgccgtcgtcggaggccaggtacgcgtgctcgccaccaccctgcgtacctacctctcagatccaaagcc

SEQ ID NO: 6262 - DNA, 2000 bp, Oryza sativa
cgctcgcctcgtcgcctcgattcgactgtagggtgtgagacggacttcgcttccgatggacggggcttgtatggccgaacagaactggaatccgttatcttaatgagtttgaattgcgtccatgaaccgtgatatataggctgtttttatactgggataaagttttggcgtgtcacattaaatatacggacacatatttaaagtattaaacatagactaataacaaaataaatcacagaatctgcttgtaaactacgagacgaattttattaagcctaattaatccgtcattagcaaatgtttactgtagcaccacattgtcagatcatggagcaattaggcttaaaagattcgtcttgcaatttacacgcaatctgtataattagttatttttttcgtttatttaatactctatgcatatgtccaaatattcgatgtgacatggtgaaaaattttgccagatgatctaaacaaggctatagtataacacggacacccaacttataataagttgccaagcagagcttctagaaagtatatagttctaggttttagctgacatgacaagtcaatatgaaactcaacatgaaccacacatatcagctttctcctctaatcttctctcccattccagctttcttcctcctctttccccctcgctctctttctagtcttcaagggagcggaccagcgggataagggggaggggcaggggagctcgatcctcttctcgcagacgaagaagatagggttcttggtgagacaggtgtaatatggaacgaaacctctggttgagagaacggtacgagtacctacgagtaccgacatacagctgatagcggaatgtgcaagccgcagcacctggggtttgccaaccatggcccccaacaccatggccacagcgtccgctccatcctcacctcgctttttcttttttcaaatttaagttaactctagaatcctagaaagttttaaattttgagttaaaagtttcaaaatttgtgttggaagttttaaaattaaattgaaagcttcaaattaaatataccttttgaagctgaatagatatttctctattagaaatactcatggttggaagttttcaaaatcaagctaaacatttttaaatttccaatagaaactaagtaacaaattagaaattaaatctactatatgacttgattaaacccaaaaaaaaagaaaggtgacttcatgcatgcaggatacgatatcgctaattagcaatcaggcacgcccaccacctcccgcctgatcactatccgtacggtaagaaatacgcgtccaaacgtataaaatatactccctccgtcccaaaaaaaaaaaagcaaaccctaagtttccgtgccaacgtttgactgtccgtcttatatgaaatttttttataattagtatgttcattgttgttagatgataaaatatgattaatactttatgtgtgacttatctttttaatttttttcataattttttcaaataagacggacggtcaaacgttagacacggaaaccagggtttgtcttgttttttggaacggagggagtatatataaacattttacgtacatgtataaagtttgtacgactatatatttaaaaaattatatgtcaaaaatgtatacttgtacgaataaatttataatacataaaaattgtaaagatgtgtaaagtttatacataaatgaaaacttggtatataattttgtgtacttatgtatgtataactatgtatatgtacatataaactttgcatttatccaagtataaatacaaagtatataaatacgtgtacatgactgaggaaccgatcccgcgggtgcagctctagttgtcccccctccggaacttgcctctatagtaaaaaaactcgcgctacttgcattgatattaacgagttgttgcttcctcctcgagagagctcaacggcgacgaagcagcgcgacgcgacgcgacgccctgcggtggcgtggcaacaccgcaaca

SEQ ID NO: 6263 - DNA, 2000 bp, Oryza sativa
ggcccatataaaagcatccgaacgagactgaaagcctggaatgaaacggccggtcgccggctctgacttacggatgaaaccggactgaaatgatctcatttttttattcttttcaaaaacggtatatgtgcggtcagaaattttctatatttaaatttaattatttaaaaaataaaaaaactaaattttacattcagaaacaaccggaaacaaaatattttttttcttaaaatagtaccgatacggttggaaacgtaccgttttcatcctatttgcgaacgttttcatccttactttcaccaccgccccactgggcgaaaacgtcgaatcaccgtattagatacgtgtccatatgattgacaatgaatggcaaagagcaacgatgacaggaaaaatatataaaaaaagagagagcaacgatctctatgcaaagagtccactcgagggaaaggaagatactccctccattccaaaatatataccctccgtcccaaaaaaagataaatcctagattttcgtgtccaattttgactgtctgtcttatatgaatattttttataatttgtattttcattgttgttagatgataaaacatgattaatattttatacgtgacttgtctttttaattttttttataattttttcaaataagacggatggtcaaacgttggacacggaaaccagggtttgtctttttttgggacggagggagtaagacacaactactttttaaaggtgtttcataatataaggcgtgcatgcatacatgtcaattaatttgcacctcttttctcctaaattactattttttaaatcatacactcataagatgtttaattctattgggtgcatgtattgtattagttggattgattcaaacaaagaggtgataataattgtttattggtctttgggtcaagggtggttatgtcttatattttggaatggatggagtaaataagggcacccacaatggttatctataggctctctacaagaaatccatatcagcatattttcatacttggaaaagattaaatgaagagagagagcaaagctatctactaacctgtagatagtctatagaaaaaaagaggtaatggattatagagttatagatacccatgtagacatactattgaagtggtttactattaatctagtctattgctgagatgtacatgttttatagatagcaccttactttaccactgcgggtgctctaataggtgcgactttttttcaggggaaaaaatgtggcattcaattcccaagaggccttgttttcttctagaggcctggagtatcaaatttcctatatatatggtcaagatcaaccctgaaccaataattgataatgatacagaaactgtgacgggaattgagatattctcaccctgacactggtgatgtaggggctgtttggttcactccctcactatgccaaactttgccacactttctaggatacatgtttgcttcactttcaaagttgtggcatgccaaagttttttaattcaaaggcccacatgtcatacacccatcttttagccaaaagttgcctaaggtgtggccatcaatttataagccacaaatttggctatgtttggcatggaggtttggcaatgtttaggagtgaaccaaacaaccccgtagtcctgttccttgaggtgtttttctttcacctatttgacaattttgtgtcatgtggttactgctgtttcttcttaataaattcggccggctgccgctgcctggtcaaaaaatattctcagcctttgaccagtgaggcatccagaaaaacgagacttcttgcggtaacaacgacttccaacgtaaataaatatactccagatagcagttgtactggatagcaattgtaccaaaccagctgattgaagggctagtacmtattctgccccagatagcagaagctgcacatagtttctgtagttcagattcctgtactgtgagctggtagctaataagattttgttc

SEQ ID NO: 6264 - DNA, 2000 bp, Oryza sativa
cagaattccaaatttcctctttttgacaagcaggtacacactcctgactccagcagatattggattgctgattcttacgaagagagattcagttctggtcttgagcctgaaaatgttgacaaggtagactgctcctgaaactatacatgtggcagcgttatgccttaaacttattatgcttttaatttacaatggaattgctgaagatgtgattttattttcaccaggagttcttaagactctggttcaagaacaattgcaatccatacgaagatgcggtataccatttttccttaaaccacttaagcattttccatagtaagcaaatgttgataattagtgaaatatgagatgtccatgaataggtccacgtataaattccatgtccattgactgcatgtttgtttgtcttttgaaggctctttgtttttgtgaaaactcatttcatgtttatctgttactttaaaatactcaggttctgcctgaagctccagaagaactagtttgtgaactagcttggcggtatgtctatttctctgagtttgttctagtacttctcatttcagagcatgttcaaccaacaactttatgtgcttctctatgtacatgaatctcgtacaaacatgatatcatattggttgaattatagtttgcttaaatatccaccacaggtacattttcctgtttgagacaattacaaacacaaagttcgagatccccaaaactcaggtatgtgacgacagtttggtgaatttgctgtaactgacaaccatatacttaaaacatttttgttaaatgcaggagccgattcacgaaagaatatcaaggaatgttgcacaagccttgcagaacctttgattgtggataaggaagaggatttccagaacaaaaacttgcttgctgatgagaataagaggtgcacttctggacttctggtaccggcattactaataataatatcagcgtacgttcatgccgtctatcattcaaagtatacgtgtgctccgagatgtaatatggttggaaacaactatagccagaatcgcctggcaatactctctgcccttaatagtttccctgttgtgagggtcagtgagtgatagagcgccatacacggtatgcatgattgcgtgctaatatttttttcaccctgtgatgtaacattttctggggttcacatcgtttatcatgatgacactaccattatactccctccgttctaaaatataatcatttttagctatgaatctagcatgtccagattcatagctaaaaatacttacattttgggacggagggagtagatattattaacgtgtgggataataggagggatggtgagacctgcatactagtgaccataatgataatgatattatattatactccctccgttctaaaatataagcatttttagctatgaatctagcatgtccagattcatagctaaaaatacttacattttgggacggagggagtagatattaacgtgtgggataataggagggatggtgagacccgcatactagtgaccataatgataatgatattatggtaatgataatgacattatggtagagtattctcaccccattttctgtgtaacaaacaaataatatcgaagaggctgagttcaagtttgctccgcctctagtgaaagtgtgatcctatacttcagaacacttcagtttagaaacaaacaatttctaatgatgccaagtcgtttgttattactagcaccgggcaatattttctccattttgtcaaactcccacaaaatccgtacagatggaccattcattttagaaagtctctcttgtcagtgtcactgatcgatatatcgatagaggaaagggaagaagaatcagccgcttaaaatgtagagtactcccaagcaacgttgacttgacttcccaactcccaactcccaacttcccaagcctttttaatcccaaagaggggatcagcagctgcaagtgcatcagcagcgagttccagcc

SEQ ID NO: 6265 - DNA, 1143 bp, Oryza sativa
tgtttggatcacccttcaatgccgcctgcacgaacggcggggtcaccagcacgccggtgtgcagcgcggcggtgtagtacagggtgttgaaggtcttggcggccgagtcggcctggcggaagtcgaagctgctgtcgcccttgcgcgccatggtcacgctccaccagccggtggggtagcacggctgcgggaacggcagggtcttgaacgaaccgaagccggccttgcccatctcggtgcgcatttcgttgatcagctccagctgcatcagcggcgactcggactgctgcaccaggatgccgtcgtccttcagggccttgaagcagctctcgtagaaggccttgttgaacaggccttcgccggggccgaccgggtcggtcgaatcgacgatcaccacgtccacgctgccggccgggcagttggccatgtaggccacgccgtcrtcgaacagcagctcggcgcgggcgtcrtcrttggagtcgcacagttccgggaagtgcttgcgcgccatcacggtgacctgctcgtcgatatcgcactgggtcacgctctccacgccggtgtgcttgagcacttcgcgcagggtgccgcagtcgccgccaccgatgatcaccacgcgcttgggcgcggcgtgggtgaacagcaccgggtggctgatcatctcgtggtagaagaagttgtccttgctggtcagcatgatggccccgtcgatggtcatcaggttgccccagtcggtggtctggaagatctcgatcttctggaacggcgactgcacctcgtccagcttgccggtgatgcggtagccgatggccgagccggtgcgctcgaagtgttcgatgtaccagttgttgctgtcagtcatkggaaaacagtcctgttcggaggggtggagccgggctggcgggcggggccgcgtggcacagatgccacatccggacggatcggcccgttcaggttggaacctgtcacgggcgcgggcgcgcatgataacgaacctgtgggcatataggcgttatcatgcccccccttttattgccaacaaggccgactgaaatgaccgattggtccctcgaccaagcccgcaagacctactcgatcccgcattgggcggacggttacttcgacgtggatcaggccgggcac

SEQ ID NO: 6266 - DNA, 376 bp, Oryza sativa
tttycccccccccccccccccgaagatcacagcctttttttccactggttcttgctggtcttggaagtggggaaaaaaaattctcatcacctcgtcgatggagaagcttacgacgcttgctcggtagatttgatttttctttttcttcttcttccgggggaagcgtaattgcgaaacagcgaaagaagaagtgttggtgagttggcgaaactgagaaagcgatggtttttgggaaggcgctgtgatttggcctaaaaaggaggaatctttccttcgttctctccttccttccccagcttcgtgcacgctcttatattgcatttcagatcggtcttgtgattggtcttttggagagagagagagagagagaagaaaa

SEQ ID NO: 6267 - DNA, 2000 bp, Oryza sativa
gcataccctttacccttcgatatacgttacatatcggtatggcatacccacgcgcatacggatactttccgcgtacactaaggaaatccttcacgaagtctacagatgggaagagtcttactcggacaagactgtgtcatcaatgtatcgtatagggtctgctatctccgagttctacttggaaaccgcctgacttgcgatataaaagggaccccccgaggaggacctgaggcatcgaatctcagagccaacacaaccctcacagcctacgaagtcggagcttgcaaggagccaaatcgccggggatctagtcgaaccaactcgaccacgatctcgccggatccgtcaagttccattgttccctttgtaacctgtgttttccaccatataatcccacatcaactggattagggctattacctaccaaggggcctgaaccagtataatcctcgtcttttgtctgtttgtgtcgtattacgtagatccttgtaccaacgtaccccaataccctctatatctggtctacgggtaccactcgtcgacacaatcgactaatggttatgcaataaaacaatagtaatatccagtagaaaccaatcagctaacagtaatatgatagaataagcactgatccagatccgcggaggagcagcagtgctcatcaacatccagatccgcgaccatctcttccgcgcaccacctccttcgctagggtagcctgtagaarggtggaaatgagggagaggaggagctggcgggggcgcgctatcatcttcctccttcttggccgctccatgttgaagcgcgctgcgcgtggccgctctgactcgagcccacgtcgtcgacgctctgccttgggccacaccggtggctagctcctagcccgccgaagccgtctaccgccgcctcccctcatcccgctcaagcttgtcgtcttcgttgccgtgcgcccgtctgcctagtgcattggataagttggagcggaaaggggagtaattaaaaggaaatagtatgcgacactaacgtgcaagtccacactatatgactcagcaggttgcaccacgtcagcgaaatcggccttcaaaaccgttgagagagtcaaattgctctagttttaatagctgaggggttaagctatagttgagggagtcaaagtggacttattcccattagcaaacaccaaatcgagcccaccaccaccgsgctagctgtagccctgccaccgsgccacctgccccggccaccgcaccaccccaccgtamgccttgccccgcgcaaaaagagggaaatccaccgtaagccgcgcgccccgcctcctccctcgctcgcgggcgcggctgccatggccatcgcggcatcgccctccggccgccacggtagccgacgcccccgcgaccgcccgcgcgttaaagccggtgtaatttccgcctctctcgcgcgagcgtccatccatcctcccccacccgcccatccgccccccgcgcgcgtcgcgcccagccgcccgccggcttaaccatgcccacgcctcctawttcgcgatgccatcaccaccaccaccaataccccaactcgcccttctctcctccggccgcctcgccgtctcgmcaccacgcaacctcgsctcgtgccgtacsggcgcgccgcgggagccaccaccccacgtccgtcgcgtcgcgtcgcgcggcacgcctcgccgagagagcgggtggtggtggtagtagtagtagcagtagaaggaggggggktcgggcgktcgcggcgcggcgcggcgtgaccccggccggctatgcttcagcgcgcggcgagcaacgcctactcctggtggtgggcgtcgcacatccgcaccacccagtccaagtggctcgacaccaccctccacggtactcgtctcgttcaccccccgcatgttcggcgaaatgcgcgttgcagaatcttccggtcatgttggtgacgtgcgtgtttgggttaatttgtttctctctgtgtgtgtgtatgcagag

SEQ ID NO: 6268 - DNA, 2000 bp, Oryza sativa
gtagaccctttgcaaacggattctaatgaagcagaagagaataacgtattcatatgatgttatgtacgtccgaccgcataaaaaaaaacagcctcccgtctaccacgtcagcacgtcaagtggagaggagacggcgcggtgtccatcggcaaatatccacgattatgggatgtcttcccccaaaagttcactttcgcggtgtcctgagctaaatacacacagttacaatgtcctgtagcaaaatttgcctaaaatatatggcaagttcagtgaggtcaaaaacctcacttcaagttagagccgattttttttagagtgaaatacatggccagtctttaaacttgaggggtggtatcacttaggtccatgaacttaaaaattacacgtttagatctgtgaacttggtttaatgtaccacccctggtccaatcgtcctttgaccatgtttgactgccaacgtgacgtgccacgtagacaacacttttgtgctcagccccctccacatatactttcgcacataacttgctatgaccagtgtgcatttcaacccaaatccctcaaaatatccctaaatcggctagggtttcgacggtgaggttaggggaaggaggccgagaggtagcagctgtggtggcctcggcggtgcgattagtggcaggaggcagcgcagtgcagtggggttagcggtagcacaaggcggccgtattagcggcggaaggcagtgcaatacggcttgcgcgctaggcatcccatggattctccaagctcgtcctcgtcttgaagtcgctggaagaaagtgttgttaatcatgtgcccgttgcgcaaggataaggttattttggagtgcagagcaatggcaattgctaatcagaaccgcattttctatacatgcaaggagaagaatgagatggaagaacgatgtgagaatttttttgggattctggtgtcactatataactataagaagatatatgcgacgtgttgtgatgtggagggggctgagagcaaaagtgttgcctaggtggcatgccacgttagcgatcaaacgcagtcaaaggacgtttggaccgggtggtacattaaaccaaattcacagacctaaacgtgtaaattttcaagttcacggacctaggtataccactacacaactttagggaccagtcatgtatttcactcttttcttatgtacgaccaattcatttacttttttttcatatgatgcaacacacgatactaaacacacacgcctgctccgctaaagcacatcgtcgccaagttaaacagaaaacgtgacgaaaatgaaaacaaaaatttttatcaaggtattatttgtaaagttctttttcctttcacgatgaagcattacatagcattgcctcctccccctcgtgtgagacttgatttgtcggcgtctttcaacggcgctcaacctatttagtttatttttcaagtaaagcaatacctttaaaacatagtaccgtgtacgttttcttgctctccgtaaatcggtccaaacaatatattgtcgacgagttaaaccgaaagacacaaccgacatagacggaagcggtaaagcactttcataactaaacggcacattgtattacaaaatcagagaacaaccttgagttggaaagagggatgaagttgaaaatgtttaccaaaccaaaaccacataccaaagccaaaaaccatagaaaccagagaaaaagtcctaaaaaagctacacaaagggggtaaaaaggggaccaaaacagggcaaaaaattcccaaaataaaaagggcaagaacagcgagagacccaggaaggaacgaagcaaggcgcttaggcgcacgcacgcacgcacatctctcgagcccctcaccctccccttcttcctcctccttccgccgcattgctcgtcgccggcggcgaccaaccctacccctctctctccctctcgagcggcggcggaggcggtttccggtagtggcggcggcggcggggacaggaagaagcc

SEQ ID NO: 6269 - DNA, 2000 bp, Oryza sativa
accaattttgccaaatgctcgattactccgatccgctgttcggatgaggacctggagctggtccactcttgcttcccctgctcgatttctgattttccttgcacctacctcggcattccgctgtccgtttgcaagttgccgaaggcggctcttcagccactggtgaacagggtcgtgcatcgtctactacctttggaaaggggcgtctcacactcttgctggtcgctccgtgctagtccagtctgttctctcctccattccagtccatgtgtctatggcaaatcggccttcctgcctgggttgttaaggccattgacaagaagcgacgcgccttcttgtggacgggtacagattcggttcatgggggacagtgccgagtgtcctggacgaatgtctgtcgtcctaaggccttaggtgggttagaaattcctaaccttaggttggcagggttcaccttgcgcgttcgctagctttggcttcagcgttccggtcatcctatgggatggcttgaaggccctagtcgagcagtctgtctctgacatgttcgaggcgtccaccttcttcgtgccgggggatggtgaatctatgctcttctggactgaccattggattgatggaggccgctcagtggcctccttggctcctgacctcctctttgctgtgccacagcgcctccgttcgcgcacggttgcttctggcctggcgaacaactcttgggtttcggacatccacggggccctcactgtccctgtcatctcccagtttcttcttatctgggatgctgcgcttcgaattcagctctcgccgggtgtcagagaccgtcttgtttggcgttggacgagcgaccagctctactatgcgcgttcagcgtaccaggccttcttttttggccagcactcctttgcctgtgctgatcttctctggcacgcgaagggccctgctaaatgaaagttcttcctctggtttgcatttcagcggcgctgctggacggccgacctcctcctaaagcgcggcttggatagtcattcggcctgccctttctgcggtcaagagcttgagactgcgaaccacatcctcctcgattgcgtgttcgctcggcaagtttggctccgtgtgctgtcgcctcttggttggactgccctctctcctccccggggtagctgtctccaagattggtggccttcttctagggtttgcttgccggggcatctccgggccagtttcgattctatggtcctcctagtctcttggcaactgtggaaagagcggaactccagagttttcgactctgcattgtcatcggtctcggaggtccttgagtccatcctctctswgaggscaccttggtcttagctggtatcgctaatttgggttctcctggaaggtagtggctctgccccctcccagctatttggagttgtgtgtgccgtgacagtagtatttcgtctcttcttatttatctttttttctcccctttcttggcataagtcggtctgactgattgcgtcgtgtaacaaacattctattcttctaatatattgacgtgcaatccttttgcgcgttcgagaaaaatgaggtgtttataggttgtaattcttgtgcatatacaaatagcagtatttctgaagatttactgtatgcatatacaacaggtagctattgaatatgtacaccacagatagaggaattatagagtcgttcgcagatcagaattcagatattggagaaaggaactactactactaggtagcactgatgatgggcaggctgaattgatgttgtcagggataaatgggcccaagttgatgtagaagagaaaggcaaggcccacttggttacgagggcctttgggctgaggcagagggatgtatggactagtcgttcgtcgtcttctccgttgaattattaattaaggggagtatataattcgcctttataactaacggaagaagaaggaaagaaaaagagaaaaaccaacaagatgacaatcctatcatacg

SEQ ID NO: 6270 - DNA, 2000 bp, Oryza sativa
acttgataatttttactcctgaagttattcgactagccccaataaagatattttcaaaacatattttgtgcgtacgtattttaggtcttatacaaggcatgagatcacgtatacatagatcagcatgcatatggcttgtggtgatttagaggatgcaaattttgtacacaacaattgtgtttgaagctaaggattgggaaccattttccttcaacatgcaaaacggagcatgattaattaagtatttaatacaaaacttaaaaatgtattgatacgattttctaaagccacactatttagcacctatttagaaagcgtgcacatctacaacgagggaatataagttgaaaagagagagtaaaaaacacacttcgatagtcattagtcaccccagttttactgaagccaaagtttcacaggacctactgcacccaaattccaaacatcatcttctttaacccataatccaatagcatacatacatttcacttaaaattcacacgctgctcagtatagcgagtaagtgtaacatggataataacaactaaaaataataatcaatcttaaaatatatcaatccagtctctcgaagatgctcaggcgaatataaattattggggtgagtgtctgtgtttctacttcctctatcctaaaagaacctcaatgaacgatcctttgttcggatttattatactaggttattagggcacctccaacgctaagtacatgcttaaggaggtgcttaaaaatatgattaaactaagcacttcactcaagagcctgatggtccaatgctagggagttggactgatgcctgaaataataggttccatctgtagcacccgtgcaaacacctcccaagcgtcggcgccgcacgaagcagcggcttcctgcgctaagcgtctcattgatcctatgtggtaataaaaaaaaccccggtttttcttataagcgcctccttttagctgcgcgctggaggtgtccttatgtcacacctacactcaggttgggttattcggggatagattgaatacgttataccgtgtttcccaaaaaaaaaaacrgaaaacctagacaacggtattccgttggaacgggatacccttctatgagacagtacttgatacctgttgtggtaccagctgcatgatacccgatacctgtgatacctaggacctggtactcgtgatactcgtgcaagagaatagttaatatgcctatcctgttgccaacgggatcccgttttgtagccgccctcttttttctttaaaaaaaaaactgccaaaggaaaagggaataaaaataagagaagaaactgcaacaaagagaggcacgcgtcctcggagggggcgatccgcaaaaccgccacggagagagagagagagaaacgaaacgcaaacgccgccctcttcaaccccccgcgacacgcgcaccaccaccaccccccacccacctccgccgcgtttcaaaattcccaaaccccccctcccctccccttctctcctccgctgcgacggcggttagcgagccacccccggagtcggcgcgggcggcgtgctcctcctcctcctccatccatccaaatagtaccccccccccaatctcctccccgctaagcaaacccccctaatccttccttaaccccacccttcttgcttgcttcgctgctgctgcttcgcttggttggttggttatatttagtagtccgcgaaaaaagtggagttgtgactaggtgtgtgcttaccactgggaggaggaggaggaggaggagttgtggactataacgagcgggaatcgagattccttcgtgttggtgttgttgttgttggtggtggtggtggtgcgttggttgattggtcggcggcgggagggatccggttcttgcggattctttaccgttcttggtgaatccgtggagaaggcggcgggccaagattgctcggaggtgctcggccgtggcggagcggtggtccgtctatggaacttgccgccgcggcgcc

SEQ ID NO: 6271 - DNA, 2000 bp, Oryza sativa
caaaacgttttcggttgggggcgtttgggttgggccacaagaaaattcctcgctcgccatgaaggactaacagaaaacgccaacctctcccgtcccccaccggctcattgcacacgtcaggcatctcgcgcctatgtgtcgagcggtcgagccgagcacgccgctcgtgtcgggaggttgggattctctcacgacgaaacctggttcattgctttaccgatgcttccttataaaattaatcaatctaaagatcgcaacgaacaatacgtatggtggaacgatcatactcgtgtgactggagggcagaaattttacctaggtaaaatcaaggtttataaaatcatgtggttatcgtatacaataacctttttaatttttaaaatcacagtatatctcgtagtaattgtgtaattttcacgatatccgtgaggtacagtaatctcatcctaaacactttagtaaatcataggtgaaataatatgtttataatttacttgtgcctctttttagctgaagagaaagggtacgtgcagtagatagtacacctttgagcttttctgtagcgaaaggctacaaatattcggccgcggcagccgaagcgggttgcctttgcccccactagatttcaggagccccgcccctcgtccgcgtccgtccgtcgccgcacgcgccagccgtccgatcgcgctcgcctcgcctacgtggccactcgccccgccgtccgtcccttccgtgcggccggccgccgcgaccgccaaaagagcagggccgccgccgccgccgccgccgcctcctcctccccttccctccggcagccgcaaagccggagctgagcaggctagggttccggcgagagccccgccccgcccccggtcgagctggaggacacgacgcgtagccccgggttcttctgcggcgacctgtggtgcggcctcatggagcccaagggcgagcagcagcgccactgtatccttctcactcgttctacggagcgcgccgaatccccsgccctctgctatttgaggggggtggatctgatgtgtgtgcttgctggtgttccggtgcatgttttcgctgtcgatcaatgggatttctcgatgtttttggagctactttagattttgaatggtggtgagtttggtggttctgatcccattgttccttcctctagagtttgctgatacatggggaagtactagtacttttttgttggatcgaaattctcgatttkgtctttaactcttgttcagtaaaagttatggttatgatgatcggcgcgtgcttcttttctcgctgttttttttttagaaatatcggcgtggcatctactagttctagttgtgttcatcccagctttgttagtcgaaaaaaactttgggttttactcaagtttccaatttctttttgttgaaaaaaaaactttgcctcatccaaaggttattattatttcttaatcgcgatcactatttagaaaaatattatatcgaatttatcacgggattatagtcgcttccataggctttgatcaaaactttgatccatttcaatctcgatattattgagttttgccggcctatcatgtgcctctattattaggattttgagagatggtgagagccgagccaactcccatttacgcggcaggtggtacaccaattatttggtttctctgtgtccatggacttgcttagtctcaacggttaggcctggacgtctggtgtggtgctgcaggccgcacctcctaatctccccttaatctcaactccttggccagcctcgtgttcgtgcttaatcaaatgatccctgtttatttttcagatctgttaatctcatgagttcttgaaagggcaattattagctgagcatgattgaactagggaattgtttatttgtcattctggcgtggttggcttactttattgctcactcatggacaacgacctttttcaatttgttttgcgatccttgactttgtctatcatctagctatgcaagaagca

SEQ ID NO: 6272 - DNA, 1334 bp, Oryza sativa
ggagatagagagagagagggctacgcatgcgcttgtgcgtgggctggtgcgtacgctttattcccggttgatattatcaaccgggagtaaagatccctgggatctttagtcccggttggtaacaccaaccgggatwcaaagatcctatctttagtcccggttggtgttatcaaccgggactaaagwtwtcggggggcctgacaaggcctaacagatttagaaccgggactaaagatcatttttagtcccggttggtaacaccaaccgagactaaagatcaaatatgcccgctgtagccaccaaccgggactaaagatcatctttagtcccggtttttagtggaaccgagactattgtggatttcgggcgaccgaccaaagatggtttctccaccagtgtgtgtactctggttcatttttgtgccagttgtaaacgatgttggttcaaatgttcctgtcgaaaacaagatgaaatttaaagaaaacagtagtactatctatactgtgcctcatcctacatttaaagtgctgtttgtaactactactaattcacatatactaacagtactagcacttggggagtatttttcccctgaagtagctgtcgcatattctagtagctgtccctgaagtatcggtgaaaaaaaaatgagttttggtgataataatctcacaggattggcataaaacacgcaataaatgattgtcttgagccaccgtctttttggatagagcataacctgcatatggcatccaagtggttatttaagggatctgatactatgttgcctgacttgtctatcagtaacactaactttttgcgaccactccagctaatggagccagctaattcgtaaacattatactctcacaaatgctacacctagtgtttgtttgaattctaagtcatcaccgtaactggtatcgtctgagctaattaaatcatatactctaaatgaaaatgagtacacaaaggccttgtagacggcacacttaaccagttccaattcatccagatcctcactggcgtactgttcgctgctaatcagtaccaacctcttaatttcctgagcaataggtgaaaatgattgttacgattcactaaacaagaatgctgaaaacgcccttcttaagctatcattgaaggaggagtacatcgtttgattggaaaggctaagctactgtcgtagatctcgacttctctgaaatgaaccagtggagaggaacaagttgtttccatctttgcaagcatggttcttttcgtcccaactgccaactgaactgcgaaccattttctggggtctcaacatgtgaattctagtttggtctacagta

SEQ ID NO: 6273 - DNA, 2000 bp, Oryza sativa
aatccctaagacgaaggtattatatattcacttcgtatcaaaatataatcatgtcttatttactcctagtttattatattttgagatagaagaagtgatatgtatcccccatgatagtacatagtaataaacatccacataccgatgcatctatacacaaggttgtcaggatcgggatactaggtagtatcgttttgctcaaagtaatatcgtatcgtagtatcgggatactatgagattttttttaagtttaattaatatttatattaattatatatagccattctatatataaaaaaaatatgtagtaatgatatatgtcatgcaaatggagacatttatcaagagaaaccacgttggttttgatatatctaactgatttttatataaatttgagcatatttagttacgttattttcaaaccaagttattttaaataatattttgtagtatcgtagggatcgtagaatcgggataccacctaagatttcgtaggatcgtgtattaatgaatagtaggatcgaaatactatgaaaattaggatactaggtggaatcgttatcgtttcggcttgataggatcgtagtatcgtaagatattaggatacaaatcgggataatgacaaccttgcctatacatatgattacctcagttattaaatatgagaaattctagttagtacataatatatgtccacgtactgccgcacctctacttctgaccgttattttctatgtccttaaatataagaaattttaataaaaatatgaacgaatttataactaaaattcctaatatttatagacgaagagaatacttctaccattttttcgatcaaatatccaaaaatctgattgtcgcaggcaatatgacgaagatctcgtagagcatcccgacccacatccccgatgattggtgtttcatttgtctcatataactaaaccaagtataaatgtgacatattttaatagtacaaatttaaatagatagttgctcagatttttagttctaaaacataccatatctgtattactctccattccaaaacaaacccagcctaattggaaatgtgacattaactagtccaacaaatctaaatatatgcatgtctaagtttattggattaggtaatattttatctctaattagattaaggccctgtttagatcacacctcaaaatttttcaccctgtcacatcggacgtttgaacacctgtatgaagtattaaatataggctaaaaaaaactaattacatagattgcaactaatttgcgagacgaatcttttaagcctaattgctccatgatttgacaatgtgatgctacagtaaacatttgctaatgacggattaattaggcttaataaattcatctagttgtttactaatggattctgtaattagttttttttattagtacccgaacacccgcatatgataccctatgtaatacccgatgtgatacagcaaaactttaccctcagatctaaacacccacggtccacggacggagggactggraaaaaaaagataaaacctaggtttccgtgtccaacgtttgactgtccgtcttatatgaaatttttttataattagtatttttattattgttaaatgataaaacatgatcaatactttatgtatgacttgtctttttaatttttttataatttttttaaataagacgaacggttaaacgttggattttttttttccgacggagggtgtactacgtttacgcacgcattcaacgctcgcgtgcgtgcagtgccgtgtgtggaccggtcctctcagtagtcctcacaccaacgacgctcccccgctggccgctgcatccgcggctcatcaatcgcactcctccaacctaccactgtccgccattacattacaaaccacactgcgcgccatcaattctccgatcccatctcgctctcgccatctgctgcttgccaccaccacatcgtcgccggcggcgagagtggcctggagagatcgtcggcg

SEQ ID NO: 6274 - DNA, 1740 bp, Oryza sativa
acggtctctaaatacaatatagacgtataaaaaaatactatctaccaatagtgatcttaaaagataagaaaaaaattatagaattattttctttttcttctcagtccctcccataggtgcatttcttaacaaaataacaaataatagaatgactctatacttctttaacatattttcatgcgtatattttccttttatattgtatacttaattgcttatatataattaagtcttgcaaagttttattgtgcccacgtaatatcataatattgcactttatataaaatatattttatacacgatatgaatttaattaaagtttaaatgcacaaatcatataaaaatattattttggtaacatgaaattttaaaaaataattaaagacatatagaattgcaccgtagcgtttagcacgggcatattactagtactgaagttgcacttttatataccgaaagtcgcacgtctttcaacaaatttatttacagagagctatacaacattttgatagaaaatctaacaaaaatgtttttcctagaatttatatcgaaataaatatagcatgccacttgcacaaatgtaagagcaaaatctgacggatttttccaagaaaatatgtcgaaagaaagatagcgtataagagcaaatataagggtacattatctgacagattctttcacaagaatttttgtcacaagaaatatagcaattctgatttatttaaggtacccattattataatctccaatgaaacgttgccataaaaaactgggtaatcaattctcaaaaaaaaaaaactgggtaatcgtgcttgaaaagaaaagcatcacacgtttccaaaacaacwtaaaaaaaccctatagcsccattgttacmcrggctgcgttctttcttcttctcaacagtgattacggaaaacggagcgatccattagcccatgattaattaagtatctgctattcttttttaaaaaaatggactaatatgatttttttaagtaactttcgtatagaaactttttacagaaaaatgcaccgtttagtagtttgaaaagcgtgctaacggaaaacgaggaggactaccctgaaaagaacgcagccacagtagtgctggtacagctgggccgccgccgcagcaaagctggccccactcccctcccatctcctcaaccccaaccttcaggtacgaccaaaaaaagatctcgctttctttcttgtctcacaagccaaaagacccgtctcgcgaacatcgcgccgtccacgtggacagcctcggacaaggtgcaccgctcgatcgtgtccaaggtgtgaacgcgttcgccgcgactgaacaaggaaggaaatgaaacgcagttattacgcagtacgaaactgtcatttgtctgtcttgctgatctccccctgtaaaacatttaattgttaatcgtatccctacccaacattccagagtcaaatctccggggtttaaaagcaaatcggtcaacctatgaggggttaaagtggaaaagctccacggcccacgcagacaaaattctctctctcctctcctgtggttttgtttataattaggcttttctccgggaggccaggaggcacgtcgccctcgtccgccgccgcgtgttcgcaagcgagcaaaccgctcctcctccgccgccgcctccgcgcctcgcctcgtctcctcctcctcctcctccctgctccgtcccacaccacccgtagtaggggccgtggccggatcgc

SEQ ID NO: 6275 - DNA, 2000 bp, Oryza sativa
cccgcaacttgagcgcccaggagaagagccagtttgcatggctgcgaccgatcaacgccagcgcgccgccggaccttcggatcgtccccttgacgtacagtggcccgccggtcgtctaggccggccggctcgccggcgggctggccggccgccgccggccgccgatcgaatgaacggtggccaccgcgcgcgcgctagctcgatcgtgtgtcgcttactgttgacgaacgaataaattggtgtgatatgatcgatggtttgcgacgatgattattagtattggagcgagtactcgatccgcttgttatcttagcagtactttgcgttgcagcaacttgctctcttcgtgtgcagcaataataaacaataatgaccatccccagatgttttaattactttgagtgtccttagtgtaatttgttggtgtgaatttctcaatcctgtgtgatgtggtgctcatgcgtatgaagtgattgtcaggttgtgtatgcaaagagtttactgaggctgaggacgaacttatgcagatcaagacagaatattatgctctgcaaatgcagtgcacaaggatactacaattaatttggttgggagtatatgcgatgtacagccagcatgtgcaaaccagcaagcaacgctcaccgcgagagtggcatggtgacagcgacgaactgatcgagacttaatagtatcactagtgcagaagcaacggcaacatatcgatcgtagtactactaattactaccaggacacgtgtaatcactaccccagatgcaacaagagaagggtggcgtttcttcccagtagccacattttccctttgtctaacttatgaatcaagtatgcactaacactacagtccataaatcccaagtgttccttacctgtaaaactgaaacaccctgctcaaagccaagcaactaactgagtttctaagcagcataaaaaccgaagcaagcaattaacccataattaattaattattaattattataaatttgataagttggtccatttgaatcctttagaaaacttctatatttttttttaaaaaaacactttttaacagtttgagaaatgttctaacgaaaaacgagaaaagttgaagtttagagttagagtctagaacaaagcataatcatcttactttcatccccttctcatcatgtgtttctcataggtgtgtaactatataggatccaatacattcttcccaatttataattatatatggtttagcccatgttttattctcaattcactcatccagtcaattcctaattatatggtttagtccgttgcatgttactataagaaaggaaaagaaactattataaaaggaactattgtaaagcttcgactccaggtattcctagtctcctggtagctgtggaaggaacgaaactccagggttttcgactctgcgctcgcttcggtcgcagtggttctggagtccatccgctcggagggccagctgtggtctttagtcggcgttgctttttttggggatttattgggagtgtagcgtggctttgccccctcccgctgtttggaattacgtttttaaccgtcgtagtagttcctagcttcaagtcccccctttaggcataagccaatctggctgattgctttgtgtaacaaaaactcttttcctactaatatattgacgtgcaattcttttgcgcgttcgaaaaaaaaaactattgtaaagcacatgcatataatagttaaaaaaaccttgcaaaatagtactagtacatactactagtagtttaaaagagagagagagagaaaggatgattgctcacactgacttgtgggccacctccacctcttaacatccgtacttaactcgcaggccccctcccttctaaaatcctcgctcgttaatcgttatccagactccgcgacggcgagccggcaaggcgagcaccgcagttgacgacgcctctccactccgctcccctcccctcccctcccctcgtctcgctaccgccgca

SEQ ID NO: 6276 - DNA, 2000 bp, Oryza sativa
ttggttggtcatgtccagggggaggcactgcactatttcatcagcaatcatccacggaaagtggtggtgacagaccgactggcagaatcgtgccctcaccgaaagccacaatataatgcggtttgcggccaggaacagaatcttcgttcccagcataccatatcccgatcatgtaggcaaggtaccctccttgccttgcctagctgctcccatccaccatgatttgtacttttccttcatccttaccgtttatataaataataaaaaaaacggcatatattaatcagataaccaccaaatttcatgccaaataggctcctctaagatgtcacgtaaaactgccatggactgatgggcgcatacaaaatccatatcctttttctcccatattataactcaatctcatccttattagtctttgctccataaacagtcatactgaaaaaaaagggcgcataatatgatcgttcccggtaagattatacaatgtttcacaatataacaccagactgccagcatatatagtcttccaaacgtaatatcttcttgctccaaagctttctgaatattgtattgtaatacatcttgtattcccacaacaaaatcaatattgcaatacattttgtattgggaagttatttatgttttgccttgcattatgataggatctttttttttaaaaaaaaacttatggatggtaactaatttgttcgtctgtatcactgtatggtacaaatgattaagaactaaacattgccaaccagagctttatgacctgaataacttcttgccccaaaaggcttttcaatgttgtaatacattttgtattggaagtaaattttgtttcatctggcatgcaatgaaatcactcaattttccctactaaattagtgatgatttattaggctacattggtaaaatcatagaaaattagtaactattatatagccgcataacaaatttacaatgtcacatcgtgatgccatcacaatggctttacagtcataataacttcttgcgccaaaaggcttctcaattgtaatacattttgtattggaaaagtgatttacattttgtgtgcactatgatggaatcgcttttttttactacttatggacaatattttattcggctaccttgagaaaataccgctgaaattagtaaacatttcataaccgcatcactgccgttagagagctttacgaccggaataacttcttgcccaaaagctttttcatattgttatgttttatcatcgggatataattatgttccaagtggcattacgatggttcttttctacctatagacaacttttttttttcatttgcattggcaaaatcctattaaagttagcaaataatactcactctgtttcatattagtataggatgttttgaatctttttctagttaaactttttaaagtataagtttgaccaactttacagaaaagcataagaacattttcaacgcaaattaaatgtaatatcaaaatacatatatttaatattaaagtttgccttatagaaaaaaaagataaaaacatcttataatatggataaaacggaggtggtacatatgatcccaaaaatgatggaaccaaacaatcatatgagacacacaggtccatcacatgagacacaatggcaaagcctgttccaacctgcggagccgtacacgtgtaccacaggccgtggaatcaaccatcctgaaaaagaagagaaaggaaaaaggaaagcgagagggaataatgtaagaaaaaaaaraaaaaaaaagctttggaatgaggaggaggagtggcgtgcagatccgctccaccaccggcgtcgcctcgccgtggcctcttcctcttcctcttcctccgcgtataaatagattcccctcttggggccttgcctttcgctgtcagcctcagccaaactcttctcttctcttctgcctactttcccacgcaaccccaaccctcgccgccgattccgattccgattgcgctcgccc

SEQ ID NO: 6277 - DNA, 2000 bp, Oryza sativa
ttgttttgagatgctaaagtgaaagagcgtcgtagactaataacaatggaaaataattcggtagcaatctgagtagcacttgaagatatgcaccatgcactaacattcaagaaccttaagaaaaagttaaacaacaccatgcatgcaaatataactaattaagggtatgtttggtttgttactaaaataaacttactaaattttggctagacagcaaaataaaatatatgaagcaatcacaaccataccttgatttggcaactttggaagtttctactcttaaaggtccatcaaaatctattcggggtttgtaaattcgactataactacccgacaattatcattatttcaattgatatggtctgaatccgtagaactttattcgatgaacgttgatagattctgatgaaattcaagtcataaccaggcaattgtcaaaaagatcggggatggatctcgcacctccttctagcatggcaaatggctgatggatgaacctttggctcacaaatttcaagctccgtttacacactcaagtaaacctgaaggatgaaacgaagtcatcttctaaacctgccaccctcagtttcccgcttactgcgcagctgctcggaaacggctggattatggtcacatcgcttcaaacagacccactggcacgttgcctccacttgaaaggcgctattcgcctcccctatacattttttctaatcttcatgtgtttctcctcgatgttttcttcctcttatttatggttcggctgatttagttttaaacttttgtggagttcttttaaattttaattaattcaggtgagaagactctgcctggaaatggctagattatagtcacatcgcttcaaacagatctactggcacgttgcctccacctgaaaggcgctattcgccttccctctacatttgttctaatcttcatgtatttctcctcgatgttttcttcctcttcttcctggttcggctgatctagttttaaacttttgtgcagttattttaaatttcaattaattcaggtgaggagactctgccccggtgtcccttaaaaaaagatttatgcagtcgaacttgattggagatattagcggtcattttattagtccagtgtttgttttaataatgaattaaaactcaacatctatatattcaaaggatgtacacaaccaaatgcatgagatttctcatgtgtttaacttataaaattttgttaatatcattttttttgcattacaaaaaattgatatgttcatcttcaacaaatcaaacatgccttgaagacacatgaatcatacaaagatttctgccacaggacatcttggaaaccgtccaaaaccagagttcccggcccacctcagctcctcctcctgcgtccttttattaatacgcgatccatggcttcttgcatcagctgtttgccccgtccactgacctctctctctgctctccgcctctcacctccgtcctccaaaggacgaatcggcactctgcccagttcatctccacgatcactgctcgattctcgaagcaggggaggccattgccaccgaccaacaaaagttgaaggggtacacacatctgcatgcaatttctgtcctctggttgctagctgccgcttctttcaagtttcaacactccttgcaaccctccactcgtaggatcatctccatttccaatcctccttcagttttgtaaataatgaagaggcccaccagcagcagccgaaaatccaaaaaacaaggtgtgtttgctgcgagatctttttcgtttgtgtagactacttgtggagtgcgtcatggctgcaaatctgtttgaagcttaaatacaagtgcaaactgtacaatccatctgcatttgcggtagtaatatgtttcgatccagtgtaattgaagcaagaataatacaaacacaaagttaaaagtgtacgcatatttttttgcaggagaggacctggcgttctctgaggagggcagcttgcccgcggtgacc

SEQ ID NO: 6278 - DNA, 2000 bp, Oryza sativa
  misc_feature (1)...(2000): n = A,T,C or G
gggggggaaaaagctaattaggatcaggttaacaatgatgagccgtgaggggaatggcaaagcttaactgctgggacgctgctgttgcgccatgtggatggatcgattgacttgggaatttgtccccgtcggagcgggcatctcttgcctttacacgtggtgctttcttgtggtgctgatcttttcacagtgaaatggttgcaaatttgactcgtatttagtacgcgacacatcattagaacagatacaataacagattattagctagctataaatatattttaatgagataaatgatgagagagaagagcagcgggctataaatctgtagccagctgtagtacagattccaagacgcaatatgtgtatgacagataggaacatatattaatagtatagtaagtatctattatatgaattggctataaatgaattaaagttagtaatggactatactattaaacttgcttttatgcgatacgtacatgatctacatactccctctgtcccagattgagagaaatccatcgaattcttcctaggacaaacaataatcgagttgtatggcccagctgtagtctaaaagttgcgcctgtctgtcctaatcnwgttgcatatcctgttctttcttttttttctttcttcattcttatcctatgcctctgtctgtcctaatcttcatgtttttcatcctctccattattttcaaccacttcacccgactattaccgtgaattatttgctttagcgatttcttatacaatttgttctaatttattttataaaaaatatttatttatctctataatcaatagataatccacaagcaaatgcagtttagactgatctgtcgagagtataactctcgtttctttttctcgggagcacatgacgaatgggatcggggtgagtagttagagcgatagggacggacaggctgcaaaatttgtataaaaatcatgtgaagtctcaagcatgtgaagaggcttgggattttcatcttgcgagcattggaagcaaaatgccacgctggttgctgtgacaagtcggccggggacaaccgctcacaatgcgctgcagattgtatggagccgtccatttcggtacggtcactcggtattctttgggtgtgtttggctgcaagtttctaacagctgctgctgctgcactgcgtgtatgcggctgcggcgcacagccaaatagcactagccacagctacagctgcagccaaaaaatggctgccgaacacatcttttttttttccttttgccgaaataaatgtgtgctttcgtaggattgtgcagaagtaagcaaacctatggcaaatatcaccatgaaaataacctttgccaaccagttgtggatttaacatgggggccgaccatggagacccccctaagcccccactattttttttcatagatgcataagatataggggctgaaggctctcctagtttgtttagccccactattatttttttctggatccgcctctgttgccaacaattaaatatatatattccaagacaaatttacatggataatttgtggcctgtcattctgtcaataacaagcactgctacaggcacttaaaagaagtcctacaaactcttacaaacaaagccttaaccatttaattaattgtatgaaataaaatcttgatttactcacagcatgttacatcaacatttgtaagagtccataagaaaaatttatatatatagccttttccatcaacaacatcggagggaaagttttgggagaccaacaatatgccactgggaattttaagtgtagtaagaaacacatttgtctgtatgttcaaagtatttaaccttttttttttctccaaaatgggttgcagatacaattcaacgccattttgttttcttgtccatttcctttctcctaatttcgtctcccctaacgccacataaaagtgcagggggcagaggacgaggcaggatcagcgaggccaaccccactcgggcgacaaag

SEQ ID NO: 6279 - DNA, 2000 bp, Oryza sativa
cggccagagcacccaaggtacgcatgctccgtccatttcctgctcaaaatttgttcttctttgtctactagtgagccaacccagccagctggagttttacggttactcctccatggccgctacaccgtccatccctcagctcgcaaacctcgtcagcaaaagaaaagccccaaccttttacccccgatctctgcggttgatttggggattcgtgaacacaccttggcccacagattcctaccggtctagatactactgctactcccaggtagaaagtacacgcatgcttgcaacctgcaagcaaggcaaccaggcaaagcatatagccttgtgtttgcccatccggtgtacactgtttacggtgcccacagcatatatggccatcaaggtcaaactggacaaaagttagcagcaactggcctgtccaagttgcctggccaaagttatataagaggatgaacagcttgtcgccggcctgttaggccggggctggctgatcagttatatacgaggatatgataagtacaaccaagattataaaaagagagagggagattagattagattagaatgctccatttggcaggcgtacgcagcgcaatcttaattagtagctcgggtattggtaggccaggcaaagaagctgctgtagtagtggaaatccttcctcataatgcacgcacccaccaccgaagaagacgaggctcgcacctagtaacatgcaggatttcttcaccgtcccccatgtgcttgcccatgttgtgtttccgccgagatgtcgccttcctcgtatagggtttagcatccatcatcactactgttttccttttgatttcttcgttgcgtccagcttaattttagaatagtaagagcaagtttaatagtacagccaactactaactccaattcatatatagctaatctagaaactcattcatacaatagttacatactacactactaatacctgatcccacctgtcatacacacactgtgtcttggagtccgtgctagagctggctacaaatttatagcccactgcttttctctctttttatttagcttcttaaaatatgtttacagctagcttatagcatgctattgtacatgctctaataagctaattaggtcgtcgatcgaggctagggtctcctggcagcgcctcggtctaaattggcgtacgtcgtcctaacatttgggtacaaaaatttggaccggccggcaacctcgctgtacgtgttgatgaatttcaaagttcatttggacacggccattctcatggggatactgcaatgatgcccaaattaatttgggcgatatcatcgtctttgctgaccccacacaagctagaacgtaccgtgaaccacaagttctcttttgtttatagcaacggagaagaaagaaacagtggataaagccttgcagcttgatatactccatactatagctgtagctaagcaaaagtatttcctgtacgacatggcccggaggacatcacataattgtgggcccagcaatcacgcatttgtttgcacgtccaactcaacagcctttaacgaaagtttaggcgcatatccaaccttttgcttacactacattttggcatctgcctcgctatacagtaacttggattggccagccacacgcattgatgagcaggtgcaaaagtccagcagtttgcattacaacatgcgtacatatatactttattaatatcaaatctcctctcccggaaaatgatggcccccatccaaaaacattaatctacgccgcaactgactgcctgctgctgctgctgccgtaagcccgtaatcgatcggccccggcaatttgctaaagggtggggcctgatcgccatgagcatgctttggatgcgtcagctcgcgtcttaatctaatgctcggttatttggccgtttttgtctccgtcggcgttgtcgccagtgggatcgttagttcattaggattagtactaatcagcgcaacagttatatgcccccc

SEQ ID NO: 6280 - DNA, 400 bp, Oryza sativa
  misc_feature (1)...(400): n = A,T,C or G
cccgggnaaggggggggggattccccacctgaattttcattaaaaaggagggctacaaagtttgttacacattcgtcagagtttgaagtggagccgaaaagataagcttccaagaagttattacagagcgatgctcaaatttgaggcgttctagccaaagaccacattcctccatacatttgcgaagaaccgattgcagagacggggacatgttcctgaagacaacgtcatggcgatgtttccacaaggaccaaaaacatagcagatagaacaccctgaagtgcaattcaggcagattcccatcgggtttaagattggccatatcagtaaccatgtgtattcgagggcttaaacctattgcctcccagaagccttgagcgaaggggcaatttagacaaaa

SEQ ID NO: 6281 - DNA, 2000 bp, Oryza sativa
tggtggctcatctgttgatttcttttgttatttttacttggcatatacggttatacggtgatgatttcttgaatttatcaagaaaactgaggattgaagagcataaatttaacagtcttaatgcacactttaagtaccaagagaaattggggttgatcgatatgctggctgctgtggctgcgcagcaagcacagttgagcacaccctttggtgaactgtaacaacgtatttggaataggtgcatcaaactcatctatcatttacaatacatattgaatttggaaacttaaaatgttgtcttgatgaggtaagatctccccagtctagtgatgaccacaaccttgtaggactgatagaaggaacttaggatccagtacatatccatgacttaagcatattataaaaccaatagatataatagtaaactatttaaattgactggaccagggacatcgagtcacctagactttataatacaggcctgagttttggtatatacttctaactgttgcattttctatttcaagtgcttttcctttgcttaaaactatggtgacattttgtatgtctttcacttctgtgttcattatatatttgaactcaacatagagtcagaactattaacttgtgctggcctgccacgaccagaaaggtaaaatatgtgttcacaaagttagcattgaagttgacccttcctgttgctacactattactacgaagtttgacatatgagtaattaggctgcgttcgttcgggtaacattgagggagataacatctcgttttccgcgcgcacgctttccaaattactaaatggtgcgttttttgtaaaaatttcctataggaaagttgcttttaaaaatcatattaatccatttttgaaatttaaaataattaatactcaattaatcatgagctaatggctcacctcgttttacgtatcttcccaatctcctcaatcaccttctcctcaaactcacccttagtcttgctgatcaagtgattctgccactgttggtttacatgacatatatgtaatacagattacatgagaaaaagggtagtgtttgaaataaaacatgccaattccaggcattgcttctttgttaaacacatgacatggttgtaattctctcttgttttgttgttacagactgttggaaacaagtgctttgccaagtgcgtgacaaagccaggatcaagcttgagcgggagcgagagcagttgcatatcacgctgtgttgatcgttacattgaggcaactggtattgtcagccgagctctgttcagttccacacgctgagcgacgatgtgtagccttcagttgctgcttaaatcagaattggggaaaaatgtttttcctagactcgttatttttgcctttctaatctgtgagaaagagagcaacctttatattaattaagtggcaactattagctaagctggttttcagctgttaaaagccgcaaattctgccttgcagtttctcttaactgtttgtttcttttgttccccatggggcactaccctatcctgatggtagtagcatcgtttgcattgcttgagaggactgacctgtcctgccggttgctcaagaactcatgagaggctggttgagtaaatgagtacatcctgtttaagttaaactgattccagtcgaaagtcgaaaccagctttgactataagtcactgacggtctggccccaccgttgaatcagcttcaggcggccaccaactgcagcagcccggcggccgcatgcccgcatcgtcgcccgttcaaccctcgtgccgagctgacgtttaccggccggttgccgtggcacgcgcgcgttgacgcgcctcctccttcgccgtccctcctacctgctcggcctggctgctcgcgttttttactctgaactccccgacccgatcaaccaccgcggcgcgtgagtccattcatccccaaatccacccgagaaagaaaggaagcaaagcgaagcgaatccaacgatttttccc

SEQ ID NO: 6282 - DNA, 2000 bp, Oryza sativa
tacttgacgaggtttaatactatattttttagagtaaatttcacaatactacaaatactttgaacaaattatcacaaaactacagatttaacatcaaatttatcacaaaactacaaatttatgactaagtattgcaaaactatagagttagtagcatagttatcacaaaactacagattttgggatttaaatccttagcactattgttatatttgagttttaaacgcctaaggtttgagattattttggatctaaacttgtaattttgtgataactctattaataaatctatagttttgcgatatttaatcataaatctatagttttgtgataaatttgatgttaaatctgtagttttatgacacatcattttaaatttagttttgtaataatttggtcaatgtatatatagttttgtgaaatttactctattttttatctttcattttttgaacaaatccactcctcctacactctcggctcgtaaccttagttctcctaacccaagcccaccaaaccctagtcacatgacacctacaattgttgagtgaatacataaccaataaatcatgcatccaccactagcagcatcatcgccacctcgccaccctatcgcacaaccacccattccctggcttccacttgcccataaaggtatccctctaaaaccgtctccttcatccaatattccacagtattaagggttcaaatatgcaattttaacatgggtgaatatccagtgaaaataattgaataagtgaaaaccgttaaaaactggacctaaaagttttctaaatttataaaagaaaactataagaggtaggtattagcatgaactacattaccactaaatcttaaactcaacttaacttggaaggaaaaaaaaatcaggtgactagtgtaatgttactatttgtccaaaattagttttttttccacatgtcaccatcagttgacatgtgagggccatagaacaacgatgcaaatggagtgatcatttttaaagctgtggtgaaaagggagaaaatatacttatttactaatgtaaaaggggagtcaccttacagcgatcccctcctcccaccgtacatgcacaacgctagagaaaccgagcaaccaaacggttcggtcctccccatgtccatttcagtctgctccttttttttacattacatcctagttagccctacgtatgggtttggttagctgtaatgtacaaatatatgttattagttttataggtaaatgggtattgattagcaagaaatagtagtatggattttggccatgtttaggccttgtttagttctcaaaatttttgtccaaaaacatcatatcaaatctttggacacatgcatggagcattaaaatataaattaaaaaaactaattgcatactttgcatggaaatcgcgagacaaatcttttgagcctaattagtccgtgattagccatacgtgctacagtacccccacatgtgctcagggattaaatagtctccaaaagatcccgtatcgcgaatttccatgtaagctgtgcaattagttttttaattttatccaaatttaatgctccatgtatatattccaagattcgatgtgaaatttttgaggaaaaaaaaaaggaacgaaacaaggcctaattgaggatgcaagagatatcctaaaaggtaaggcagcatgcatacataggctaagcgtgtggtgtggtgatgaaatgggaagaaaggagcagagcaaaggaggcctataaatagatagcaaagcaacgcaaagggggcagaaggcaacacaggaggaggaggagcttggtttctgggttgggttgggtttggttgcgttgcggcccatccatcgcattcgcgttcgcaggcacaaaccaaacacctcccctcaaatttctctttcttgtctcttctccctttccgcctcgcctcgcctcgctgcctgcgcttcacaaatcacaaatcggaatcagatccaccacgacacggcggcggca

SEQ ID NO: 6283 - DNA, 1806 bp, Oryza sativa
  misc_feature (1)...(1806): n = A,T,C or G
aagaatttttrgggggttataggsgggggggaagscccccgggggcccwttygktrcccggtgncggmcgggkwtmcccangttaagggggttttcccgggggggccccnttttakgggtttgttgggcccttgkwtgaawtggscwttccckgggccakgggggwttkgggccccccggkkwkkgscccamacccgstyttcmggggggggaccgttwycyyymccccgggcccstmcmntmcmmkgaamamyyytacscsggkaaawmcccyawwwtaccccaccccggtttaaacsgggggaamaactataawaktggggnaaattttttnawggnccataaaawwttwttaccccttttccamagktttaaacaaggggggttaccaaagnttttatakggggcctttayccaaactttkgwaamcsgtgttntacggamytttgtatrmcbktttaktttwwwamyyttwtatmcctacggytttwwaaaaattttraaaaccgggaattgscrtmacgkttwccaartttgcaaammcttttacaaamtttgnaaacgggtttwcmcaactttggaaaantttsggatatcmaawtttkkattymaaaattttaaaaaccccgaaaaaaaaaaccggaggggaaacccgaaaacaaagggaaaaccaatctgaacagaaaccaaaacaagggaaaaaaacagccaaccgaacagaaacggaaaacatggaaaaaggaaaaaaaagggaaaagtcagtctcccgcgcggtgcgtccgccgccctctctccacacgcgacacgtgtccagtcacgcgtcgcgcggagaggagcgcgcgcgactgatcgcccaatagccttctcggctagtagtgggctatactattaaacttgctcgtagagcaggtaaaatagcagactataagccagctgtaaacatattttaagaagataaatgaggagagagaaaagcaacgggctacagatttgtagcctgctgtagcacgaactccaagacgtagtgtgtgtatgacaggtgggaccaggtattaatagtgtagtatgtaactattgtatgaatgagctattagattggttatagataaattggagttagtggtgggctatactattagacgtccattgatcagctgattacctcactgcatccgtatgattcgacttttttttcacgttgattttatattcacaacatggctcgtgggctcgtggctttccggtgcagtgaatatatttctcccgatgaaacgaagtcgacgaatggggaaaggaagtccatcccaaagggaaaagtgaagggaaaaagaggagtcacttacggcacgcatagcctaagcttatccaccacggacacaagattagcgtgcagttaatcttcgaagcagattccgtgctcacctgaaccgctgaacgaatatgcgcataggagtaagccaattggacgatccgtgacgcatcgatcggtcggtcggtcagtccgcgcgtccgaaacggagggtgatcctgcccatctaccgcgcccgccgtggcgccaggatttgaccaatcctccgggcgcaggcgcagcagcggctgcgatctcgtcaagccgtcgcctaggcgttgacgggcgcgagcgagcggccttcctactgcgcgcgcgattaccacgcgacgcgctcgctcgctctcttcccgcacgtgttgcacgagacgcgggtggaggcagaggcagcagccaccaatacaaatacctgataacctccaagaccttcgaaagctcgaacacagcaagtgagatcg

SEQ ID NO: 6284 - DNA, 2000 bp, Oryza sativa
ttcaaaacggtaactctgattgttcagtagtgttctttgctctaacatctttctttttccaaccagtctaccgatagcggattttaagctctcaaagtaacgtttttcgttgtttgtatatcacttaaatagttataaaaaaatttaaaaataaattagagtaaattgcacccacggtgtatcaattgtcaggtgggtgtgcaatttgatgcaataacttgagaaataagcgttctaatgtaataacttggcacgtatgtgcaatttagtataagagtttttataagtgatcgcataaaatacagcaacttgcaagatatgtgcaaatttgatataataaattaagaagttatgcgacaacttaattatttggagcacttttttttatacatattcaatttttaagtacttattttgacgatatacttgtggatttgtataagcacattcatattttttatcctcataactaatgactaaaagtgaattaaacatctaattattatagttcggttgagatttagaaaggtgaaggaaacagaaattcttaaaggtaattagatgtgcggtataattcttaaagattaaattcaatatgataaagtaatatccgtaggattgctatgtaatggcatattgacatcgtaaagaaaactcacatagcatatgtttagccaagttgatgcacaaaaatactaaattgtcaagtttttgtactagaacgcatccatttgtcaagttgttgcactcggacgttcaagtctcaagttcttgcactttatcgcacccacatgccaagttgttatatggtgggtgtaatttacacaataaattaagatgtattaacatgtgatatattactataccaacatctaacttaaaattcaatttctacatattaaaaaaataaatttgactattaatatacgttaactaattgttattwaattwatttttttcgttacaacatgtagaagttgaattttaagttgcatgtttgtgaagattatcacatatcagtacgcctacttaatgttttttcaaattttttcataattgtttaagtgatatacaaacaacaagcgaatatcccctcgagaatttwgaataatttcccccagtytaccctmaatcccatctcccctatattcttccccaatccgggcgactgagctcagaggcagttgcacatcactacgtcacctcccaaaatgatcctagtaatttcctaatccatttggctattggtgcggccgcctagtcctgcagttttattaggaatagcaattccgtttattaaactcccccgcacgagtgacgagatgccgctgcgccttgcttctccgtgaaacaacccccggcatgactccccagcgatacgtccacacacacataccacaagtagagttccaaacttgccatatttcccggttgctgatcatcaatcatcacttcatcagcgcatacgtccgggacgtggatgggaatttgaagcttcgctacattccaccctgtttctcgcctcttgtcccctgcatcaacgcgacgacacgcccaaatctctatctgctaacgcgatgctactcctcccgttctcctgaactcatcaggccagggccagccacgcatgtgagttgcagccgccagtcaagcccaggtttcggctgcactgcatggatcgagcccgactgccgcaagcaatctcctgaccaacactaccacatgccgacttcgccgcaaaccgccccggctagctagtagtaacatggtgtcacgttcgcgatgggagctagtggctgcgactttggacttcgttactgcaatctcgccaggattctggggaaatccgttacgtgacagttgacacgcaccgcaacctagcacgcacagttcacattcagttgcacctcgagctctataaatggcgtgatgcagcgaagcgaaatatgtcagtagctagcagcgatccgataagtgataatttagtggtgttttcacgc

SEQ ID NO: 6285 - DNA, 2000 bp, Oryza sativa
cagaaagaattaatggtccaacatttaacattgctgctaaaatctgctaataagaatcagagaagtacactagaaggttgtcaacatctgaaaacaacaatttgaagggaaaagacactggtaaaatgccaaccatccttgctgactagtagctagctccatgactgagatttgcatagaagaattaagggaccccaagaattaaagaggtacactagaagattgtcaacatctgataacagcaacttgaaggttaaagagagtggtaaaattaatgccaaaccatccattgctgactggtagctccatgactctgaacttatcttatgaaaagcgccgcatgcaatcaggaattaaataaatcactgctaatagcaacatacttttcagggttcatatagtatatggacgcctctttggggagatggattatttttttgcatatggttcgcacatcattctcctgtagctttctaccatttgtttttccccggcatgtagctttccatcatgaagtacacatccgtgcttatccctttctattattttttacatcctgtcacacaaatcagcagccagacaagttatcggaagaaagaaatgctaataactacgtggacacatttactgtattttaaagtatagaaaagaaaaaggaaattaaagctcccatcagaaagatctcaagacccatttgggaaaatgtacaaaatacttcgatatcttttagcagaaaaagcataattaagtttttgcatttcaaatgaggccttggtaaaagaacggagaaacactcgagagtctatttgatattagattctttccttatattcgtgtttttttatttgacgaaaaatatcctgaccatatttccagagggcttaaagagttagcaatgaggagtaatgttcgaaaaagaagattaactaaactatatgaaaatttactatatctttagatctcaatgtgaaattacgattttatgaacacatattcgggaaagagaaaataccaagaaataaaaatctgccaagaaaaaagggtcacttggattggatctctccttctatatatactacctttgttttgtagtctttaacttttacatgtgctaattttcaacttgacagttgatgatggatacatccttgtacgtttatctcaacaaggcagcgtatttctgggtgactttttgactacacatgatacaacatcggcttcaaacctaaacctgtacacgtaatccccttgtccagtgctaaataagtccaacaaaaaagttaagcagaaaagcagctggtttggggtctgaaaggcacaatatcacactgattaaaaggcacaaccacgtatcaaccaaaccaaaacccgctccggtataccaccccccacgcgtccaacaccccctctcgtccgcacgcaatttctagccacggccgcgtcggctactccgctcgtctcgtctcgtctctctgctctgctcgtcgactgccaccaccagtccaccaccaccttcggctgatacaagaagcgagggggaggtaggagagaagcccaccacagggtgaccccatcggccatcgcgacatcttcttcttctttgctcgcttggtttggttgctaacttgctcgctctctccgcccaaaaaaaaaaagtttctctcctttgcttgtcgtggcgttcttggatacagacagcgaggaaagtcgcccattttcgtactaggagtaatacaggttaaraggaggcaaagcggaggaggaagctactggaagtktagtakaagaggagagggagggagaggagtgtgtagtgtgcctgcctctcgcaagcggccaagcgcgatagattggtatagacagataaatcctgcaactgcgatacgattccgtcaccgaatcccttgtttccttgcagcaatttgacgccgcgagggcgggtggtttcgtggccatggcggtctccggtgcggcgcattgagcccagcgtgcgagggggc

SEQ ID NO: 6286 - DNA, 2000 bp, Oryza sativa
gcggcgcagccgtggaaggctgtgcacggtgacgcaggtggaggagctgaaggcgatcgtgcggatgctgccggtgtgggccaccgggatcgtctactgcatggtgctcgtccagcagccgctcttcccggtgcagggccgcgccatgcgccgccgcctcggggtcgcgttcgccgtcccggcggcgtcgctcaactccgtctacgccgctgccatgctcgtcctcgtgccgctctacgacgccgcggtggtgcccgcggcgcggcggctcaccggcagcgagagggggctgaccgagctgcagcgcatcggcgccggcatggcgctatccgtcgccgccatggccgccgcggcgaccgtcgagggcaggcgactggcggccgccggcgaggtgagcatcgcgtggcaggtgccgcaatacgtgctgctcggcgccagcgcggtgttggcccacatcgggcagctggagttcttctacaaccaggcgccggactccatgaggagcctctgctcggcgctcggccacatgacgtgctcgctcggcagctacctcagctccgtcgtcgtcaccgtcgtgtcccatgccaccgcgaggggcggctcgccggggtggatcgccgacgacatcgacgacggccacctcgaccgcttcttctggctcgtcgccggcctcagctcgatcaacctcgtcgtgttcatctgctgcgcaaagcgatacaagtacaaggattcaatcaattaattgagaattgctgatcgaattgtgaatctgtaaattgtaatcagctcatgtgttctttagtttctgtacacgggaaaatttatgttttctcattgttatttttggaatagaaatcaagagctctgtgaattcactgggagtaaagaattacagctcaaatggcgaccacgttgactgtagcaaaaccggcaaaattgcaagacagataacatgtaaataaagaaaagaaactaaaccaacgtgcatccgaatttcttatctcacatgactctcgatcaatcatttctctgtaatgcttttcgattaggatgccattaatttgaagagtaatagattcttccattatgtaaagatttgaagacaaaattgttagttcagtttggttctattgtaaacaagtgaaagagttgatctattgtttgctacttttatttttcagtacgagcgtgtacaagaaaacctgtacctttcagcaaaggagataaatttgagtttctgctcggtcatggatttgaatcaatcagtcattcgctgtagtgcttattgattaggatggcatttgggctgtgtacatccttttctgggtgtagaggccagtttaatccattatctaaaaaaaatcagtttgactctgaagaagctttatctgcatgaattaatgcatgattacatcattgcactggactcaattggtaatgcagagacaactcgtatgcagcaccaatgcactttaagcctcatctgaatcttttgataggccagatgaatttccccacattgcaaacatgccaccgttgccactacttaactgaacaagtgaacaatccactwatctwatcatgcttcagacatctgcaatacccaaatcaaacacgaaactgcgatcgatacgttaaaattccttctcagctggttkgracacccactamcactttggawttgataccaaaaagctggttagcactaggraacaaggatgctaagtgcagctccattacactagttagtgacttcaccattgcagagcagaaaggagaaccaggctccagtagccattttcagaaagtggaatatctggatagaaaactagttagcagcatcagaccagtgcatgcgcagccgcccactatcatgccgacttcgcctatcggaaatagtataattcatcgatctatcgctttaaccgcctataagaacatggcaagaaaacatggactgtgcaaccagcacaagagcagggcagtaacttctgtgagag

SEQ ID NO: 6287 - DNA, 2000 bp, Oryza sativa
gtgaaacaatcatgaatatatggttgaatgaatagattttggaagtggacagatgcttctcgtgttcgatcgtcactcaacaatttggtaatcacgccttaattggtcgatcgacgccagaataacatggctagtttaatcttacttaatttcgggaatcggataatcttatcggtgagcaatattagtatacaatctgctccatgatgcaggataaattacttttcagatacaagcggatatagttcactgttggtggcagatatagttaactagattaatactaacagtttggtgatgatgctctcctacgtgaaccaaggcgtcatctagaacagattttctgagatttggactagtaaactttacgaaaatgaaaatcttgtaaaaccaacgtattccaaaggaatcatcggtgcattttcttttcccagttacatgatagacgcacactcaccgactcacgcaaaccattacaccgtaacactacgctcgcacctttcaacacatgttcaaaaagacggaaatcagtggcatatccttaatcaatattagtaaaatttaaattctgctaaaagtccacatataagtgtgatattttaggtactaggatttaaacccaggctttccaggtatatgttcttttcgagcaaatataatactggattattgaacgtctgaaacatgcttcccttttaaattgtgccattgttaaagaaaaactttataagaagtaattcattcgtttaaccccttgaacaatgatcacaaatcatccatttatgtatacccatttaactatttagaaaaaaaaataaagtcagccactactcatcttttctaaaactataagcatttctaagctacaaatctacataattgtctatgattgtatgtcataagattgagatagcgattatacaacttttgctaattatgaatagagattcacaaatatacttcaataaatatatactccttatcctatattggttatttgttattttagttgggtgtttttaattttatttaaaatacacttgtttagagtgctacgttataataataggctgtaggtttattctattctattatttttgaaagaaaaaaaagcaatggctagcgatagatggatagatggcgcactgcgatggcgacgaaaaaattcaagcaggaggtggcgccggtggtgcaggggaactgggcaacgtctccaactctagtctagagagctatagcggcgtgccacgtgtcccattttacctattactagaatactagattattaacctgttgcttgtttgtggttgactcctgagaaagttggagaaggttgttcatattattgtcaaaataaatcttattaaatttttataagttgacaatatcattaaaattttaacataatttattatgtgtttaaaaaaatttaacaacaaactaaatgtaagaattttttaataattttgtcaaaaaaaataatatggttaaatatatcgttgaacagccccgtagaattagggctagtcgattgccatataaagaaataaaaataagtaaaagctaacatttagcaattttgatgtttttaatgtgatttttttcattattaactttttaagagataaaaaatgatttagtcgttacgatttataataagcttttatcattcgatgtggcacttactttcaacgcaagtactcttaattttaaataaacaagtaaaaactctaacgaaaaaaaaagctatctgattttgatctctccatttttaagttattttttttgactttcgacaagctcctaccgtatagattaaaaaaaagaaaaaaaaaaacagagtcgcttacatatatatggcccagaggcagtgattgtcacatcacattcacgagaaaccccgggcgctctcaatttttttttcaacctacattcaaaccccaaatcctccccttcttcgacctcgcctcctcctccgccgccgccgccgcatttcgccg

SEQ ID NO: 6288 - DNA, 2000 bp, Oryza sativa
aaatatgtacttgtgtgatttagatgaataagagcaacaccggtttcgaccaacaggatgtagggctattaactgtcagataagaggataaggggtctgaacctgtataaaaatccatgtctccatctctttaacctcaatctcacatataccatgttaccaatgatmcccatatcatccaaataccgtagtcgcgatcttaaacatcgatagaattgtcaaagcaccatccacatttgtaaaaaaaaaggatattgtgctgtcatgtggtggttttttttttatctatgaatgctaagtatataagtagttaatgggaaataactaagatatcgataatggatggggtaaacaagcatggaaataatctaatatttccttgttttagaagtgatatggctcaatgcatgttgagcttttgagcttttggttyaaactatatagaaatattaagtgatgttcagcgcgttgttgcaaaatctccactattataaaaattgaagatgtttttgtcggtattttggtacgtcatccgtgtatgagtcggtttttaagttcgtttgcttttgaaaatacatatccgtatttgagtcggttttcaagatcgttcacttttaataatacataacgaatcatataagaaatctgtttaaaaaaaactttcatgctaacttgagacgatcggactcctaactgcagctcatgattttctaataatatatatatccaagcgaactcccaaagtaaattccatcttaactaaaccatataacaataataagattaaaataaacttcatccgttacaacgcacggacatttttctagtacataaataaataaatgttaaatattataaataaaggtagctatatatatatgaaaattgatatgtggatgatgatttgacgtgcttgcatattgagttttagaatgtaataaaaaaatatagataatgtgatatgtttgcatgggttttaagatataacaatttagcgggtatggatgtggcattcgttcatgttgaactttagcatgtactcatatatagaaagtatatatatgattgcagattttatataaaactatgcattttgtaaaatatgatagggtccaattctataatttgattctacgggttgacactgttaagaaaaacaatcatcaagtattcccatcctgttaacattgatcaagtttgagttgcagatggtaggattcaaagatggtacgcattgctctgccttaaaaaaaaaaaggggaaaacaaatggtttggcttatatatggacggtctaatttattggcttatgcttataagttaaaatttgaattttaaagcttaaatttgattgttttttatcgctgtttattttacaacatttacttatatataaaatatataagttttacccataaaaaaccttttatttgctaacaagctattgggactgcgtttcacagacaatccaacccggtctcgcaagatgcaagccgggcgagtgcgcatcaaactgcccacttggagagatactacgcgamatcgcctttctccggccgtcacagtcacactcaacacagacacatccgagtccccttttcaacatagcgtcgccgtcccacgagacaacgagaggagcgcgagatgggagccccaccggccacaagagaggagatgagagaggcccagagcggcccacttccgtcccatgcctgcgcgtcccgcgggtccctatcgccaccccgcgagctccagctggttccgacccaattaacgtagcgcccgccggccccgtctcgagcccaggccagaggctcccgacccggcaggtcgcgcgcgctgctgctacctggctggcgcctctcgtgccacaccgcgtagatacagttaacgcggcccacgtccctctccacgcgctaaactatatagcccccgcccgccaccacctttccctccagaattcaaaccggatcaacctcgctcgcttactcgtgtttaggc

SEQ ID NO: 6289 - DNA, 2000 bp, Oryza sativa
gctagtcacatccgaggccttgcatggcaatcgagaattatgacaaatcatgataaaaaataacaatatggattatatgatcatataaatatacttatcatgtggattccaatctattcggactatacggggataatctaaaatgtcaattcaatttaccaaatcatgtataagttgtacgttttgtagactacaccctaaatattaagtaaaataacggatggagtacacatcgtgttttctcacctttgatttctattaaatacgtatggtgtgtgggtattttgtatatactaagttttgttaattaggggacataaacaatactaaagttatatatgagaattcaagcattaaaaatacacttcataacatgaacgtacttaacaaaaatgtactttagtctatggtgcttaaatatttataaattctctaaacatactaattatttctgctcttatttcaaactaaattcattttctccacataatataagagatcatatgagaaaaaaagaggagggagaagaagtaaatagaagtctgccattaaacagatagaataaagacatctataacatacaagaaaatttgttgattaaggtttataaactccaaatgtaagatatgctaatttctaaaaaaacacacacatggtacacataatagttccatatgaagcaacactattgttgtgaaacaatagtttctcgtaaattaaaaaccacatggtttaaataaatttgatttagaatttatataatgaaaaggtaattagaagaaaattaaaagcgacgttcacaacaatctcaaataaattattgataaaaaacatgttcagaatagagtaaaaaaatattttaagaaatactcatccacacataagtatttataattaaaattcaagcaacattaaataaggtgtcccgcgcatgtgcgcgggctacctttctcgtctagtgaataaccgacagctcctataagatttataatccaattccctttttcaaaaccaattgggactacctaaaaaaactgtcgtaagttttttgagaggaaaactttcaagagttatattgtaacttgcatataactatgttgtacctcctccgtttcatattacaagactttctagcattccttacattcatatatatgttaatgaatctaaacatatatatgtgtctagattcattaacatatatatgaatatggataatgttaagggttataatatgaaacgaaagaagcaactcatatgtaacttagagtatatctatgaaagacttacagctagcacagtggtacaactcccggtctgcaaactgaagatcgtgggatcgaatcccagccacacgcttgctttgtttttcctcatccttgctcttgcacgaatctcggagcaagatctaatggttaaaaaacgcaagttttctctcctaaaaaccgtcgacaacaatgtagcaattccgaaccaattaagcacatataagaagatgtactttgcattgaaggagtaaaatctgaaacatgtgcttgattatgttgacatgttgaagaagtagatctatattagcaccttgcattggagatacatagggccaatcccacgtgaagaattttttttccacaactagtcaatgtattacaaatctagaaaatcagaaattgcgtcgacatcacacttagctgtgttggggtagcctgtatccaaagattttccttaaaattgattgtgctccaaaatggtttatccccctccagccctgcagcttgattagtccacaacttgtccagcacagcaataggccccaaaagtgtatagatgctcatgctctcgagtctcgatcacacacggacacagagtctccgccgcattttcttcttccccaacctccacactttcgtcctcccccctttctcctcccccttccccaacccacacccacacacacttccaagctagccgtctccaacaaccctccccccaccatcctcccc

SEQ ID NO: 6290 - DNA, 1356 bp, Oryza sativa
ggaggagaggaggaaggggaggagttggagaagagagttagagaggatagatttgaggagaggtgtgagattcgatctgtctaagttgtaactgtggaggagagaataaggtatagggattatatactacgtgtttaattttagtcccgattggtagttggtgatctttagtccggttatgacatcaaccgggactaaagatcctcggccctctgacatacatctgacagtggatgaaccggaactaaagatcatcttttgtccctaaagatcaaaatttttataaccgggactaaaaataatctttagtcccggttcttcttggatgtggaactatcgtggattttgccggaccgaccaaagatgatttctctaccagtgagtagctcagaattactatatataccttaatttatatgatgttcacaccttttcttttacaaaataggataattaaacctaacctctacgtccaaccgatgtacacagccaatgcgatgttcacataactactagtagtaattatttatgctggcgtgcagttgtcttcttctgttctttggtcatatagtagtttatgctgtgtattccatagttaattactgtacgtatatatatatctgaccagcaacctcctgccgcaagccctggcctgtcaattgacgcaacgacatgtatcattctccacgtacgcatgsctctctkgcgtgttatcgaaaaagggctaggtttagtgaagaaacattgcgtgctttcgcgcacctgggtgttatttattcatatcactgtagatcattccatgggtcttaaacatatgatgctacacatggcgaatactaattttccgtggccacgaagcgctcaatattcgccatgtgagccatccatgtcaaccattgcaaaagtttgcagctgaactggacctggttctactggtcccaatttatgatggcccattagtcacccaacttaggtacagcccaaagaccatagcccatgaaagcctccgcattgactcctcggcccctattgcgtcactgggcgtcgcctcccctttctcgatcacccgcgtattattatccccttattaatagccgcaacccccagtaatctcccactgacattacgggcccacaagtacgcgtccccaccagccatagactgctcctagacccgtcgcaccgaagctcccctgccaaatctacgcacgcgacgcggccatctctctcccttctcccccaacctccattagccgatccaaaccacctcaaagccccggaccgcatcactctccttctccccccccacgcccagatccagatccacccggcgcggcggcggatccgtcgaggaata

SEQ ID NO: 6291 - DNA, 2000 bp, Oryza sativa
tcttatatttatgtatataaaatatataatatgtaggtacagtttgagactagatccattcgatctctactcgaaatgagaaaaaataatgattaattaagtaataattatgattctttttaatttttaaacaactttcacacagatttttttttctaaaacgtatgtagtaatgaaaaacgagaaagttgaagtttggacttaggccctctttgtttaggcttataagcctacttataagtcgaaaagtctaagtcaaaacaaacaagcagctttttcatttggctttttttgaagccataagccactctaacactattaagccaaaagctaggttggagaagcttttttggcttatatgagatagatgtatgactccaccactaaacttaggacattaaatccactggcttataaatcatataagccaataagctgacttaaaagtctaaaccaataaacctaagcctaaacaaagagggccttaataaagaaaaagcgcctaagcgagtagcgggtcacgcctcacccgggcgcggaaccagtcgcccatcagccggggtgtgagaccgagacacacctccacgttgaatcgtgcactcaccacacccccgacgcacacggcggatttagcgcgaaccgcaaaaatccacctgatttctccacacggcggattctcagtggcactacagcgccgtttcttttcgctgtagggaaacccaggtacgcgcccgtcagtacacgcttaatttgaacgtacgcttagggaataaatatagctgccactgagacatctgactatagctctcaatggaacggtttttttcctttcactgtagtgaattaacagtacatttaattgcatttatgcaactgatagtaaaatagcaaaagatatttcaaaaccctccaggtattttgggcattattaaaaaaatcaaataactaaccaaagggaaaattacaaaaaccatctcataagtcacttaacgggatcagcctgctattgtaggaaaattacaaaaaccacccccacaagtcacttgaactttgacatttcaccatatgaatcattttgttgtaaatgcttactcactatttgattttgttgcaaaaatcaacccagtacgaacgtttttaaccggatcagcctgttatgatgtagagctccataggctaagctagccaagtcaattgtctaagtgtttgcattagactcattcttcatgttccattaagttcttttcattagcaaaactgtaagtgcaacaacatttacgctctcatcaacaattttatttgtgaaatctccaaaaaaaatttataaaaacacattgacgtctcattaagcacaaacacactaggatggttttttacaataaaaccgaataggaggtaggcatttgcaacaaagctgagtaggatgtgagcatttgcaacaaaatgacttcaaacttcaagtgacttctgggatgattttttgcaattttaaataaaacaatatgattcacgtgttttcttaccggtcttacctgagattagttaattagtctgttggtatgctcacccaaacgaaaatagcagaaaaaaatggcgctcaattacgaaattgcttaaaaccataccattatctactccgacaatgcttaaatgatgaaattgttaacggtgatgcatcagcacttgccctttttcttgacaagaaaacaatgagatagcacacggaaattacgctgagtccatggtggtagtcactgcctcactggtcaagccactcgacaatgtaatgcggcacagccaattcttgaacctttagaattagaactggtgattggagaaaccaattcaagcttccaaaaccaaattcaaagcaccgtgtggtatatatccctgaactttcaacatgtattgacatatcaccaggtcaggacatcttgccaacctctgaaattggccacagttccttgcaggcttctcatcgcttttcccatccaagaacc

SEQ ID NO: 6292 - DNA, 2000 bp, Oryza sativa
gtgcaggtcctaaatattaatgagatgtgggcgtgcatgtcagtttgattttgcaactaacaagatatataaatagcagatcaaagagtcgatcggccgacaagccgatggagcgataccagccgatgtcgatgctaaccgatgtcgatactagccgatgtcgatagggttttgagtgattagctatatgtccaatgtagatttttgacacttaagtaaataatgatataaagacaatcagctgatgataatataatgaaacaataatataatccaatcgaaaccaatcggtaaataatgatatgatagaataagcgttgattcgaaggttaaagcatatatcggctagaggtccgatgtcattaaatttacaatattatataataagtgaaacatttgttgcaatcgactaaaaccaacttgtatgtaattcttgtataccgatgcaatgtcctgataactcattggctaaaaccccaatgaaaccattattggaaatcaaacagcaggctagagattattgttctaagcacgacttagtaggtcaaacccaattgatgcagcactaagtatwaaaagaatagacaattaagcgtttgactgattttcaggatgttggatactttagctaatctaaatcaacaaaataatttagccgatatcgacaaaaccctataaaagatctgatcgatacaagtaaattgaataatcaacttagattaactaagatatataataaataggtaggcaaatatatcaactgaatcagagcgatccaagaggtcgaagcgatacagtcttgaacaacaccaatatagccgatacaattgccagggccgacagaacataggacttaccccttcgccggagatcgaaaaacgatgcagcctcgcgtcaagtgccaagttcctccggttgataaataaaaatgttggaaaagaggatggcaatgcaccgagagtagttgtattgtatccatgggtagatactagtccttattggacatgacacaaactttcctaaagataaaaggaaaaacgtaaagttcttatcggacactaaacatactttcctaaagataaaaaggaaattaacagattcttcttaattaataaataagctgtcatgatgtatcctccttaaactcggtctattctggataaacttcctttaattgattaatttccttaaccaaatcttggcgacttgataattccaccggccgatctaggactctgaagccgatattagctctagaccgatgatgacatcgggacataccaaaaattttatcgttaacacttttatttttaaaaataacgagtgattaaatattaaatttaaatagtgtgtggtgcttttttttttagagaatggtatttttttacatggcctgcatgttgaacgtactcgttctttagtttctacctttgtgcttgtgcgtttgtaattggctcttgcagagaggtttttcttctcctttgtaaactttgttctcttcttaatggttaaaaaatgacacctaattcttcaagaaaaaaaaatctaccatcactattcaaactaataaattttaaatggttagcctatgacaaataaaagatttataacacactttaataatataacatcatttcaagtctttataaccttttatttttttcaaaaacaacgagcggttaaaatttaaatatgaatagtgtctggtgccaaccataaacgaatacagggagtgtgctttttttttttccatttcttttatataagagaccaaacctacgtacttctgtggcgtccatggaagccgtggccaccttgtatttcacttgcacccgtggccgcgcctccgccggcgaatccacgtcgccgtcgccgtcgccattgccgtgagatcatcccctatctcgccgcctgtcctcttgcgattcatggcgctctcatccccgtcttctccgcccataaaatcgcggaagccagcgagctctgaggacagcgtggcc

SEQ ID NO: 6293 - DNA, 2000 bp, Oryza sativa
tgagactgtatcggttaggtctggtcttctgtcttagacgatatatctctacaattacaatgttgttttaaatatatgtggtatgtccatcatgttttcataggcttatcggcttattgagtattagattattatatacaatcatcggttaggtttgacctactacattattgttgataatctaagtattgttaagtcgataggtttcttacctatgttttatcggagtgctagccaataaattatttgtgcaccagacttccagccaacgtaagttttaaccactgagccaacatttaatattcagcataaatatcgtcgattggttcatcgggcatctacttcattatattataatcggctgattggattgtttgttaaagttctatcattgtttatacaagtgttagaatctatatcggacatatagtcgattgttcaaaattctatggacattggctagtatcgatatcagctaatatcgctacatttgcttgttagccgatcggcttttcgatcatttacatatttatatgtcttgttagtcgcaggatcaaactgactagcacgcccgtatctcatcaataatttagaacctgcactagcgttttttttcggagacctgcactagagttaagcagatctcccaaacaattgtgttgtttttcgcgtcaatggaggtgagtgttacatcgataatggtgcgcttgcgaattttagatgtgaccgtatcacaacgacgactatgtagttttttttttttgttagttctcaactttatctttctctttttcacacgcatgttttctcaactactaaatgatatgtattttacaaaagtattagtaagaaagttactttagaaaattatattaaccaaaattttaagttattttaattaatacttaattagttatgtattaatctatcgttttccatgttgcatacgaaggggaggaggagttgagaataagtcacatcaacagtaaataaagtcaaactcgcgacaggcgtggccgacctcaaccacacccgaccgtccactgaaccgggacatcctcacggctctccccaatcccctatcccccaaacccgtccagatccatcgtgccagctactatagctcccaaacaccggtcgtaactcgtaaccccgtacggagcgtgtcggtgtccggtgtccccccgtatctccgtgcccccccaccacccacccacctacccccgtcacgtgccggccatcccaaccmaaaccagctcgttttccgcgagaacccacggccccctcggtctcccctccgtctgcagggagccagacacacggggtcgcggccctacgtgccttgggccgtgcggcccccatcgccgtcctcatcctgatcctaatcccaagcgaccgcggcgcgatcacgcggcgaccaaccatttctctcgtcgacgagacgacgtgcccgccgctcgccaccccccccaaccgctcgcgcggcataaatacagcacgccacgcccatccctctccctctcaccaacaacagtaacccaaccagagagcttgcggaagcgggggtttggtgcgggcgcgcgcgtgtgaggggggagagaaggccaggaggaggcgacgccgtcgcccgagggaggcaaaaatccgatcctcctcctgccctgctcgctcgctcgctcgcctgcgctgcgcgcacttggccccgtcccgtccgttcccgctcgccaggtgatttcttgcagccatttttccccgagattacatggtttgtggggttagttgggtgggtggtgatgccattgttgcgtcgaatggcccgctggggttggatttgaggtcgcaatcctcgtcggtgtgccccgaatagagtgattcttgtctgcttcgggggatctcgatttggggattaggagaagctttacaatcttctcgatagtatacaagattttctttctgatttatctgctgtttttgcgctcaaaatgtgcaggcatagaaag

SEQ ID NO: 6294 - DNA, 28 bp, Oryza sativa
atttggkggaattacggatgkggttgtc

SEQ ID NO: 6295 - DNA, 2000 bp, Oryza sativa
tataacacaaaaagctcagttcataatcgtaaactagctactatctccatcctaaaacatagcacatttttcatattgttcagattcatattattaggaaatatctcatcatgtataggtagctatattttaaaacagatatcaattattaattattattccctccatcttaaaatataacaacttttatcctttaaattttatcttaaaatataacaacaacttctcctatcaacaaatcacatcgttaattaatttcaccatttaaattatttacctactttattttctcaatcaatcataattctttctcatttaatgttatctgctttctcaatacgctagcttgcctaactctaaaacgaatgtatagtaactaagtgctgcatgcatgtcaatgaatgatgtcatctctctctcgatctatataaacccctccgcgcaacataggcatatatagctaccttcatatattaagcacttaattaagcagctgtggtgcgagatcgaggcaaatacgtactcatagttaggtaaaattaaggcacccagagagatagagagagagagagagagagagagcttaattaatttgcagatatatatggcgcacaatggttgtccagctgctgctacacctacaacagaggtattatgttcccatgcatattgatctccattgggtacccaagttctccttctcaatctgtggcccgggctttgatctccatcaataatactatatatctgctctgatagtataaataagagagaaaaataataagtattaacttataatttttaatatataagaattaaccctacatatactttaaaataaatatattaaataaataagtgagataaagagaaaaaagagaggtgaagacaaccttatggatgctacctgtctaataccttctttcccaaatattcgagctaacccaacttagaaaaagcatagaggaagtattagctcgttctaattgtttaattttgaccacctgttaaaaatcactcgcatatctaattatttggcggatagaaaaatattatttcaccctttaaaggataatattttatcttaaccatccattcttcgcatctcttatcttttcaaacctacctcttataacccatttatcaaacacacccatataaaaaaaatcagctattggaaagctaggcatgtacaaaaatctaataatggtaataaatttcacaaaaccatcttaaaaacatatataattttttaaaatatttttttacattaaatttataattttgtgatacaaaatctttaataaattttatagtttgccatagttttatctaatatagttggtggaatttactcaaaatttaatgcgtaaagtgcattgacagttcttaaacttgtaaagttgtgtcatataccacattaacgtcacgtaagatcctgaagaggttgtggcgatttagaatctagatgacacattatgataagttctggagcttggatatgtattttgagagtctagggacccagataacacacccctacaagtttaaggaccgcacgtacaatttactcaaatttaaatttatgtgattagatttgaaaaacgcatcacatagacaaacaacagaaaaagaaaagtaccgttcaaaaaaaaaacagaaaaagaaaggactcaccagaggaggcagcggccggaattctcggcgtggagcccgcactcgccggtgaacctctcaccagagctggccgccggcgaggtcgtggctggcggagctggccacgaggcsccggatctggccgagctcaaggcatggctgcggcagctggtcccgcgagtcaatgaccggtgggaccaactagttagccttgtgtgtgttttgcgctcgcggccgccgctattttattcggacgacgacggtttccgccgccgccaccgccgcattgccattgtcttcgccccccgccgccgcctgctcaaacccatcggagagcaaaccga

SEQ ID NO: 6296 - DNA, 2000 bp, Oryza sativa
ctacaaggactagtatcttcccatgggtataaatatgtacacccgaggtcattgtaaaacatctctcgatcaataatactactgttggcgcatcgccaccctcttttccgaggtttttacttatcaaccggcagaatctagcacctaacgtggggctggatcggttcagttcaatttccggcgaaggggtaagccctgcgttccgccggccctggtgaatctgttggctatattggtgttgttcaaggctgcatcacttcgatctcttggatcgctctagtttggttgatatatttgcctacctaatgtctcaattctatctctagttgcattgtgtttagagacgcattggtttagttgggactatctcggttaggtccaatcttctgtcttagccgatatatctctacaatcacaatgttgttacaaatagatttgttatatccatcacattagacagatctatcggctcattgagtattagattgtcatatataatctcgtgctacatcggttaggtccgacctactagattgttgttgataatataaatcttgatgagccgataggttcatactagtgttttatcggggtgctagtcgatatgttttatggacattgcatccgcttataaggattgcataatatataagttgggtctagccgatgacaataaaggtttcattgatctatctaatcttatggattttatgacatcgtacctccagctgatgtatgctttaaccttcatatcaatacttgttctattcatattgttagccgattggtttatactggattatattattattatttgtcatcctttatatcattatctacattggacatataaccgattgttcaaaacccaatcgctatcggctggtatcggctatcggctggaattactacatcggcttgtcagctgatcggctcattgatctgctatttgcttatcttgtcagttgcaggattaaattgactggcacacccgcatctcgtcaacctttggacctgcactggagctaagcagatttcccagggcagtgtgtgtttcttgcgtcaacaacgatgtacggatagaggaggaggtgtaagaaccgtggcagaaaaggtggcggtggcggcagcagcgatgccgacgcacggtccgctacggagagcgaaagaggaagtgctatgtggagcagggaaaaacgacagcgcgtgatgcggagtgggagagaggagcgatgtggtgcagggaaaatgacgcatgatgcgtagtgggagagaggcggcgtgcgatttgtagtgggagagagagccggagttttagggttagttaattgggttggtttagcttgttgggccgattgggccaaattcactccggcaggtctttttttctatggaatgagttcactttaaaaccgatgtaatttgtctccctcagcagtttagctgatgtggtgctttgacttggtctaatttgctgagtcatcctatggtgcccagctgtcagtgatggggccgcctaatgggcgggtgatcgccccaggcaatcaccccccatccccccaatacactactcttccttcctctccccttcttctcttcctactacaccataaatttttaaaaaataaaaaacacaaagttgaaaaaacttatgtatggaaatactatatataataaatctgaattgaaatttaaatttaaaacaggtatgtaaacttttgacttataaactttgggtctataaactaatatttgaattcaaattcaaatttgaatcggatatgtaaacttttgacctataaactttggatctataaactttaggtgtataaattttagatgtatagaaatactatatataaaaaacatttgaattcaaattcaaatttaaatcagatatataaactttttatttataaactttggatctctagactttagatgtgtaaaattaagatgtacaaactttaggtgcataaatttactaaaataggaaagta

SEQ ID NO: 6297 - DNA, 2000 bp, Oryza sativa
tactgtagacccgcgctttgtcgatggcataaaatggattgactcttatacttatcagccgaaattttaaaatttcattgatttaaggtttttccatcgtagtttattttttagcatttgcttttagatcgttaaaacacgtatttaaaagttttatttacaatattattactccctccgtcccctaatataagggattttgacattttgcttgcactgtttgacaattcgtcttattcaaaaaatttgtgcaaatataaaaaacgaaaagttgtgctaaaagtactttggataataaaataagtcaaaaaaataataattctaatttttttaataagacgaatggttaaacagtgtaagcaaaatattaaaatctcttatattgacatagtaagtattcctttacaaatatattgtttagcttatttctcaaataaacaaaatgatggagtagtagtcatcacatctcccgtgaatagggtgtgtttagtttggttgaaattgaaacgatgtaatggaaaagttgaaagtttgtgtgtgtaggaaagttttaatgtgatagaaaagttagaagtttgaagaaaaagtttataactaaacaagggctaaacaaatttcgtgttccaaaatacaaatgttgtacagtattacgaggagacgagaaggaagagccagccaaccatactacctttcggctggctgaccggggtggcgtcgctgtcccgggccggcccgcgtagccgactttcggttgarccgcccgcsggccccgccccggcgaggcgtcgcacccccgccgccgccgccgccccactccacttgcttcctctctttgtctcccttcccttcgtttttggctcgttccggcgggtgggaataatatagctcaggcgtggcgagtttggtcggcgcatgccaaccttttccgtctcctctctctctctttttgccctctgctcctgcctgcctggctgccgcgatcgcagatcgggatctcggctcagcgcgctgcggcgaccccgctgcagcttgcaggtatgtatgttcttgctggatgatcctcggaacattcttcttcttcccttgctttctttagctttcgtttctaggtttgcttctgtagttggtgagctcgggttctaggttgcttctgtagtttggagagctcgggagcacacccggtggatggtgtgattttgctgagttttctgttcttacatgggagaggctagtcaattataggggaatccgctgtgcaggctatagtagtgctaggttgcttagctttatgcttattgttctctttgtttgatcggattttgttctgttgctgggtggtttctggaagagtttagtctgttttggtgttaaaattttttcaagctttcaaagaggttcttttctttctccccttacaaaagagacagtttgagctgttctttcatcatcggagtttgtgggattcaaaagaaagctcttctgtgcagcatcactgttcttaatgcttcttgaaattgtcctgtaacaattactacttggactgatgcttccaacattctcttggtcctgggtctattgatcaccattatggctgctgctagagctggacgcttttgaattycggttytctagtggttttccaacctggtgttcgggtttcccgkcttttctccagctaagctcgccctttagttcaccaaaatcaagcatatccgctacaatgacaccgccatcattactttaccgttctatcagtgctcaataatgagataaaaggccgtcctaatcccaccaaactttgatgtttacagcttttgatgagtagttgctatgttattcagaacagcatatcattactcattagtaggatcaattatacacttcactcattaagtttgtttttgattccttcagaaattctggttmaacaccagccacctttcaccaatctaaagaacttgagtacagcaattgtgaagaattgagcatactgttcaaag

SEQ ID NO: 6298 - DNA, 2000 bp, Oryza sativa
gaggccggacgtggcggaatcggccggcgaagtggggcgccgacgtggggtggtggaggggttaaccggcgccgattttcgcggggagagtgggggaaatggtggaggacgtggaggggatcgtgcccacgtcgttggatgcgagctcgggtgcgggagggcgccggattttgcggcgacgtggacggctatggcggttggcgtcggccggcgagaggtaggaggaggagctgacgggtgggaccgccggtcccacctgtcggcgaagggagagaaggagggacgcaaaacagacttttgcgagcgggccaaggaagaagggagccggcccgagagagggaggaggcgcgcgggccgcgggagaggaaggagggggaggaatttgggccgaaaatggcccaaagagatgaaggaggattttatttgttctctttttattttaattgattaaatgatcttcgtgactttaaaactatttctcgagctccgaaaattcacggaaaattccggagagtacattagggcacaaagaatattacaaaatattcccggccaatgatttttaagggaaaattttaattctcccattattttacttgattaaattgatttaacttttatttaatttctagaaaatgcattatttaatgatttttaaacccgaacgaaaatcggggcgttacatgcgacagggcacattgttggtgcaggttggatagcgggagaacatggggttacgatgttagggtggtcgcaatgccttaatttgggtgcctcatttcccccatggggcattgctgagaaacatccatctctcccttcatggtgggatcctccaggtaaaaatcttgtctaggtcttgggtgggcgggtgggcgggcgggcgggcgacgtggcgacgtcacgaccttcatggaagcatatattgtctaggagatcacattttctatctttctagtctccaatcgatttggtctacgatggtactctaggatgtcttcaggttatgcgagggatgagttgattctcttctttctgactctctcccataactacctttttcttggggatgttcagaagcttgaagatgatattttgtttagagaagagtagggcgatgcgtttgtcccccctttgaagggttgacaacaacagatcgtgcacaacggtggctagctggtattaataatttgtgtgtataagttgccagcatggggggtggtgtgtttttctttttaattttcttagattatagcctcacaggatataatcttaggatctcatcttttcgcttatgcttatacttatcagccacaattttaatttttaaccttaaatttgaagttgatttttgaggtttttttcatcgaagtttatttttcagcctttgctttcagatcgctaagaacacatatataaaagttttattcacaaactacttttcgtttgcgaatatgccgtataagcgaaacgatgggaccgttatattttttcctactgtatagatacgaaactttgcaatgtctagtatggaggttgttttgaaaaaaaaaaggctgaagtgataaactagagtagtagagcctgagttccagctaagtcgttgactaactcccagcaaagtcaactacaggatcatccatgtgatttcctgcttcttctgactataagggtttattagtgcaaattacacaaagtggcttcttagtccactctaaaatcaaactgaacagagggattgccatggttacctacagttgtaccatgttaattaaatggcagagccccactaatcagcgttcatttgtctacttaatttgttcttcttcgcgactttgaccgtgttcggtgatgtccaagctgtccactggccgatgcagttagcgaatttgttcagagtcaatctttgttgtttaacacatactatgtcaagtctaattgcaactggttggtggcatgcatgtgcgcacaacgcacgtagcggaatggatcgaccaaca

SEQ ID NO: 6299 - DNA, 2000 bp, Oryza sativa
catggttgaagagtgtagagtcctttaactagaagttgttctatagtttatgggtacttttggaggctacctttatatctaacgagaaatgttatatccttttcagatctttgttattcctgtgttgattggactcctgtttgagttactggtcattgtacccatgagggtgcctattgacgagagtccggttttcctgttgtatcaggattgggctcttggattaatattcttaaaaatatggactaggctggtaagattacacaaatttgtgatcattttgtcacctcagttaatttgttgattgtgctccttagaggtcattgaggtaggtttgtgctgattatttggcttacatactgtttccaggttatgttggatcaaatggcacctttggttgatgaaagctggaggacgaagtttgagagggttagagaggatggcttctcccgtttgagaggtctatgggtcctgcatgaaatcataatgcctattgtcaccaagctccttacagctctctgcgttccatatgttcttgcaaggggtgtcttcccagtgcttggttacccactcattgtgaactcagcggtctaccgtttcgcgtggcttggctgcctgatattcagcgcgctgttcttctgtggcaagagattccatgtttggttcaccaatctccacaattccattagggatgaccgttatctgattgggcggaggctgcacaactttggtgaggactcactccattcaagtgaacctggaacaactacagcgtctgacgatgatgaacacgagcaagcactcattcctcgcgatcaggaaggagagttggggctgaggttcaggcgccatatcatgcgtggaaaccaaccgagaatggctgcataagcagggacgagtttttggacaaagcaaggggcatatgcacgatctgacttctgccctggagcttctgcttgtgattagtaatccgcattgtagagtgaaatgagtccgtcagttagtgataggaaaagtaaggattgttgtacaacaaagtccaagggaagaacagctcaaaaaaaaaagaatacacaccagaaaactcatggtaagctcacttccctgtggctatgtgttgctgactgtaaatatagacgaactaccccacacaatttattgtggttctgatgtgtaatggacaatgaattactcctacagtagtacatcaagttggatagtagctagggttggtagacgatgttgtccacacttcatttcttttcatttcttgtgaactttttgtacctgttggtgttggatcttttttttttaccgcgtctctgctgacaaggaaggcacacagcagcggggaggggcaacttgtcggttgacttactcggtcggtacgtgcaaggaaacttcgcctgcatttgttcacatcgagatcgccaaggaacatataaaataaatgcttgctgtgtctttgtattttgatttcgccttaacgagggtcccgggatttgtttcacccgctacggtaccgcgggcgggattgaagacctgcctagatctttatagcagcagacacggaatgcctatatatgtgcagcacatgggatttcacaacccaaagacgggaaacctcttggcaattgaatggcacgtttgcagttgaggatgcacgcggctgaagatgagcacagcggagacttaacgcaatccctttagcaaagcattttttctgcgaatatgaatctattctttcagttcatcttataaatagacttgcctaactttgttatatgaatcacaagtgtcttggcatatccagattctagagtggttctcaaaaaaagcaaaattgtttaagttcgaacagggcaggctccaagcctacaatacgaacactactagcctagaggctctagcagagtcgtctcggttcatcgtcaactcagctcctctctttcttcccctcccccgctcctccgcgagacgacccgcgcccgtagccatcc

SEQ ID NO: 6300 - DNA, 2000 bp, Oryza sativa
agtattgcgttgacggctctgatgagctgggccggagtagtcacttgattctccgcttccgcattggtgcgcgctgacgtgccgacatcgtcgatagccaatacctcacgcggcgtactcgttgtcgatgatccatagtctttaagcaggtgcaagactaatggttcgtggggatcgatgtcgattaccccaacaaatcgatctgaaatcggcgtcgctacttgttccttgtctttatccctgatggggatgcgtgactgctggaccttaggaggtggcatcttcatggcgctgagaaataccttgcagctcgagaggccgtgattctttgtcttgtgaataggacaatggacatcacgagttggagaggtacgctgaattccacgctctttgcaggcacgaatttcagcatgaacgttgagaaagacccagcaggcttgcagggtgtgtttcctggttttgtggataggacaccaggaccttgtcacctcggaagtaatcctcgtcggcttgtgattcatgttggaaagacaaggcttggccgcactaggatccttctcaggctcggatgttgtcgacgttccgatctccgcttcggcgggtggattcttcgacatagagtcgccccgggttgttgccactgcgttctcgtttccggccattggcggaccagctgagatcggcactgtggtgtaaaccggaaagacgatttcaccgacttgagtccacaccagtgttgttgaagtaggaactccttggttgaggttggtgttgacgctgttgtcggtgaagctggatgtcatggtagtagaaccttgagcaccaagtccccctacctggcgcgccactgtcgacgggggatacccgtagaccggatatagagggtattggggtacgctggtacgaggatctacgtagtacgacatcaagcaaacaggaaacatggattatactggttcaggccccttggtaggtaatagccctaatccagttgatatgggatcatatggtggaaaccacagattacaaaggaaatagtagaactcgacgataccgacgagatcgtagtcgaattgatccgactagatctcccggcgacttggctccgataagctccggcttcgtaggctatggtggatgtgttagctctgagattcgatgccttaggtcctcccgggggtcccttttatatcgcatgtcaactgtctccatgtaggactcggaggagccggactgagcacgacacaatgacaacccagttctgaccgagtaggactacttccatctgtgaactccatgatgaatttccttaacgtatgccgaacacatccatatacgcgtgagcataccatgtcgatacgtgacgtatatcgaagggtagagggtataccttacccgtaacctgacacaattagcttttgattaatcaatggtgctgattgaaatttatttagtctcaaaagaattatagaaaaaaaaacagtaaattgttgtttgggccactttggatactctaaaactaatccgtttactttggattgggcacgtttgccattttctcggtttggaccatgcgtataggtaaggaagttgactgttataccgataccgattcaattgaggttgttaatggataccattaaagttgttccaaaccgagaaaatgataaagtcacctagtataaagtgaaaagattggttaactaagtgtgatccaaagtgaaacttggataataaaacatggctaatttactcggaaaaaagaattcatggctaactaaacttggaagatggatggatatttcagcgttaaatgaagtcagtggacggtccagatcgatcagaggaaagagagggcctcggactactactcctcctatatcactggttctttcttgcaaagtaagtcgaacacaaaagaaggggagaaggggaaggatagatagatcgccgccgccgccgtcgtctccgcccctctccagccaccagatccagcgacc

SEQ ID NO: 6301 - DNA, 2000 bp, Oryza sativa
ctttcgtctctctttttgtttttaatccctttctttaaatccctttttttgcaaacgagttatggttgattaaaatagacgaaatgacccacatctttaggagatggagtgatgtagtactggagcatgtgccacttatctgactatcacatggccctgaaaactgctttgcttctcttacactgaacacactaatacttgcatatgtacgctaaatatcactgagatttgttatgctaatcgatgtgtttttttataatttgtcggttgttgcttaatctcaggtcagttgggccaagcacacgagacagcatctgatctcgttgatttctcttgcgccagattaagcgaacaatgccacgtgggtcagcacacaagctgtgaggctgacacgtcgttttggcagagactgcagattttctgaagaaagatagacgaaatcttaattacgtatacggtcctgtaaaaatactactccatccacgtgtcatgatcagcaacagtaaaatcgcattgtgtgctgtaattctactgcactaaccatcttcgtttttaaataaaattaattcgtgtctacgttcaaattcgtacatagaaattaatttattttggatggaggggagtagtaatttgttttgacacaagcatcgagctttacacgcaaaactaatttaacagcaagcactttgaataaaaatgtaccacatgtatatttttatattacaaaaattggcaagacgtcaccaggtttggaaaatggatgaatttaatttaatttattagttagtgagtcccgaggtcaccacttctgtaaaaataatttttcacctagggtcaaatgtgtgaaaagatgaagcagtagtaggtctatttactaaactaaccctcagcggcatgactttccgcgtagtttctcttcttcttgcagagagagattatcctctttccccttccaccgccactgcgccgcaattcgccttcgctgcgggcatctgcagcagcagaatcatgggctgaaatcgaaccactgcgcgacaaggttccgaagaatctcttcacctcttctcatctctccatgaatcgtcgtcggctctttgcgtgagtggcagtaggtgtgtatgcgtgacggagtagatcttgggttcttgcgtgctcggtttcttcgtggtgatacggtgctgctagtgttcagagtaggtagtcttgatgcgataggcttgggggtttctgtgctggatcgagcggtagagccgcccgtttcggtgaaacctggtctcacgcggtttgctttgattgggttgtgtgattcttggtctaggtttcaggtttcttgctcatgaatggaggcatatctgctttacttgcagttgcagatgctcctgtagaaagtccccaagaaatatcctgcctttcttgcaggttcagtactggttcgatcactatgaaaaaaaaaatcctgcctttcttgcttggacagtattggttgcactaggatctggcttaactttcgttgttagatcttgttcggtttgtgtgttgtcggtggatatattaagtgtagatatatgctaatgggtagagttgtttcagggtgccaaggataactttattgtgctgctgaaggaagactcttattgacctgctagttctgtagatgatttttggagtgcctataaatatccgaggcgcgagttcggactgcaagatacaacacaagagtgagaaaagaaaggctttagctgagttacaggatggaacaaggttcagggagatagatactggtgccaccactgcgaggaagtgatcgaacctgtggagcctgatatgaagtgtcctagctgtgacaggcgggttcgtggaagagatggggtctgcaggctttgagccatcgaccaacttgaggtctgatcgtatctccctctgggcaccactgctgctcgggatgatgggaggctcatcgcggcgagcaaggcggctccgaaggcagatcatggaggatg

SEQ ID NO: 6302 - DNA, 2000 bp, Oryza sativa
gcacttcacttatgtgtaagttggatgttagttaataataaaaataggtactccttccatctatttttgatagtcatatttcatcttggcacacagatcaaggatatttaaacatgctactagttattcttcgtaaacaagcgatacattaatatttacatttctcgatgcctatgtagccaatcttgtgtggaggaatgaagagtcacgcattaaatccgagaaagtcattaaaatgatatgttgttgaattgaaatatgcctatcaaaaataaaattttcagatttggaaatatgcatataagtatatgagggaatagttgcttagttggtatgtgcgaattgcgatggcttgtacggcatagttcacgggttcgattcccctgtctccccgctgctacttgtgttttttttttcctcgtatagcacggatcttgaggctaattgatgttccaaaaatcatcatattttttttccaaacaatctatcaccaattatttagcaactccggaaaagaaacaaaaatcatgcatgaacaatgttgaaaagaactactccctccaacccatccaacaatwtaagcatttcaattttgtcgaagaatwtaaagcattcctacactactatttgtcgcatcaatcacctctcatttaaaatcctgtcatcttatccccgattagctccccacccccattgatccctaattaaataaggggccctaaagttttttttttaccttagccttaattcttgctaaacaacataacaatgtttaaattgttgaatggacgcagtaaagtaccaatgsaaaccaaaatttkgcctcttcttttttttttttatcttttttacaatgtatatttaagttaacacatctctctctctctctctcccccctaaacagaaagcaatcatttgataacactgttgtgcattggagcacgatagcactagaattgttctcataatataataaaaacaagcaggttatataatttatcaacaatgcaaaatggggtcttagcaaacaccccataaaatttagaagaaagaaaaagtaaatggacttgattccctgaatgatgcctcgaatggtgttacaggaatgacctgatttaataaaggaaccatgttttccttttacttcagccttgtaattctctttattttcttaataaatttagccttgaccggtccggtggaaaaaaaaaagaggaatagattgctaactgaggttgacagatagatgcaaacacgactaatccacaagcgacaatatagcaaggtcacctttggtaatatatctccatggtagaagttagcagacaaataagttttaataattcaagatgcaaaaagtagcaacagccaattgaacattatctcagcaggatgccaaagcggttaccatatgaacttcatataagtggactgacagttaggacataggttactccaagcaactaatgtcggttcaattttaccccaccccacaatctttaatcaaacagagaagatttacaccacgacccataatattcaacaagacagtaacttgaactaggtagcactttgttttgtatgaagcagtataaattacctgaaattttctcaaagacgtgtagtttacacaggcaagtgtaaaaatccctgttcatgtctaaactgttccaaagcagaagtggtaaattctccctcgcccaaaggtcataatggttccattgttccaagtcatccatgtcatcagacactaacgatgcgttggagctgggaggaccacataaacaaaggcattaacagcaaggcttccatgttagctcaaaatcaaatagtcgaatggatgacttgccagtatatgcccaattctaaaaggaattcacagtgactggtgacaatacaatagcatccacttgcattggagattatagctaaacacccaaaacacccatgcattcctcctctcctggcaagagatttccagccaaaaggattcagcagag

SEQ ID NO: 6303 - DNA, 94 bp, Oryza sativa
actcgggcttaagcgcaaacgcacgcgacgcgacgcgaccccgaatcggaggcgaggccgccgamtccgagcggatcgggccgaggtcgacggc

SEQ ID NO: 6304 - DNA, 2000 bp, Oryza sativa
gagttgatcagcagtacagaacaaacatatttgcatatggtgagaggaaataatgatttgtgataaagagataatagattatacagatggcaccagtattagcaaaagggatactcaccatgattgatcatacagatgagtccatgtgagtcgctgcatctttttgcggtaagtgcggcatgggtattggtaaccaaagtgcatgcatcattggtggtagcaagagcacacccagtagtgctgcagttggcgcgcaatgggtcagcagggaaggcagtatcattccaagaagatgaatcatcggaccatttccaagcaaaagccgaggcagtgttgttgcgatgacctccgacccagcatccagagggggaaggtccacagagagactttgcaagattgaggtcttgaagtgatgatagggcagccaaatgagcggtgaagttgttgcggcagagagcctcggatctgtcccaagaaaggggtgtaggtatgtagatgaaacacttgtcgagagcaggagtgatttgccaaccatcagggcatgatgctgcagagaaatgggtggcagttaataataataataataataataataaggtagtaagtatgaataatgagaaccctggcatctgatacaaggacgacagtagagtatagtgaagttaaagaagaaggtgtgacagacatgaggatgaacacaacacaggtcgtaaattaattattaataatatactaatggtatccccattacatttacatggtcgtgcggagaaagtgtagccgaagaaagggtgtaggtggcggggaaaaaaaaagaaatcttgttttatatataaatttgtgtgcgagtgtagaagaagaagaagaagatgtaagagaggaattcgttgcttgtttgtgacagacagattgatgtggaagagtagttattaggagggaggaagcaagggcaaaaggagagtagaaagaagaaatagaagagagatgcatgcaggttgaggttggcgagagagatagggaaagaagtgatggatgcagcgcccctagtactaactggagtagtagggatctagtcaagtgtagtagaagcagtagagaaagaaagtagtactcctatgaggcaggcgaggcgaggagggaatacatacaggtggaggtggaggcggtggcggtgagggaggcgggcagggatgaagaagaagaagaagaagaagaagcggaggatggccgccgccatggccgccgatccgtgtcttcccttgcggccttgcccttccttccttgatgatgaacaaagaaagaggaatggagtagaggtgggaggaagcggtggtgtggtggggtggggactaccaccattaatgcaaatgggctatcggcccaacatactccattatgggcttctgtgggcctactcctcgattcgtttgcgttgcggtkcgtcgcgtccttcctcctcctcccgtcttcgttgtagtaggcttggtggttgggaaaatcaattcgaatcgatcccctctcatccgctcgcggacacagaatctctcctctccctctcggcgcccaggttctcgccgccgcccgccccttccttctcttctcctcctacgtacgtaagtatcgattccatgcccccctcccccatcccccatcatcatacgatttctaggggtttcatgcatcggggatgaatcgtccatgcgatttaattctattccctattactatattataatcgtatatagagattgatagatagatagatagatagattcttcttacaacaagaagaataaaccaaccccaattttttcccaacctctatctaataatcaagctgctccctactttaacaatctctctcattcttctcaattcaattctactactgtactgcatttagtctcatgcttcattgaattttcactcaactgcttgccaccaatctttctttcatgcaggtaaataatccacctacgatagatacgaccaaccccatt

SEQ ID NO: 6305 - DNA, 2000 bp, Oryza sativa
ttcgtgtgacggcagcgatggcgtggctgctttgtctcttttcccctgtatttctcacgcgagagacttccatacttctcaccaacttcttttcaccacaagaaaattttcttggattatccactgtatgcaccttctagtagctaggaatagcattcagctgcatatatatctagtacttccgtttcacaatataagttattctagtattttctacgttcatattgatgttaatgaatctagacatatatctatctagattcattagcatcaatatgaatgtgagaaatgctaaaatgacttacattgtggaacggatgaagtatatatctacgtatatttaaaatattagtaacggtggtgtccattttcacaccaccctcaccattaatatttgagtcccacaatttatactattacaccacctttcaacatgttctcccatattttactatcggcttcttctaaattcaaaatcacgtactacttattcaataaaaaaatcttagtattatttatactaaataagtacctattaattgattttatcaacgtacgggctccactagttcaaatgagaaggttcatgttttgatatggtcaaagaagctacctatacagagctagctagcttaggtacagtacaagctggcctgcatgctgccaaaatatgtggggaagttttcttggtgaagtgatcttcttagaaatttactggaagcctcttaatctttgatgacactaactatgaattagctaaatgtactggagtggattttgcctgtacctcacaagtgaacatcccctcattctgagtatgtcgtttaaaaagttataaatttattttaaaacaattagcaatattaatcaatatgcagcattatggctttataaacatgcaactttaaatttaacttttacaaatagaaaaaaatatcaaatttgatcatgaatatactatttatagttaaattcttgtttaaacttgtgtaggttggatttaaacttatatgtttgtcgagtgatatattatatactgattaaacttattatttaaaaaaaacataatgacacttcgaacgacatgaaaaaacaagtggatgcccgacatatagacttccctaaatgtactgggctaaaaaaaagtatattttcctcatctatttttgtggacgaagagagccgatggtggatgcacccaccacctaggctcatcaccacacaatgaaatttgagtcctattttaagaattagaaatttcatagaaaacttgaggtaagatttgaatttgagttcctgagataaacacttgacatatatcggtaatttggccaacaagttcgtaagataaactaatttgagttgattatcaacactgatttttcaatattcggagtacgtgtatttcgtccatttaattagtttttgataaaactccacatgaatcacctaacttaaaatgtggtatgtcagagatatcaaacatacattaaacaccgcttttaatcaggggaataaaacagaaaaaaaaattatctggacgtgggccaggtggctagctgcctgcagccaggtcctcgtatcatagatgacgacgacttcctgtccgaggtcgtttactggtcagatatatccatatatttgctgtttaaattaatattcatcctaaactgcatttgagatcttaaataatattgataaagtacaatagaaggccagtctcctgctaatctgaggcttacttaaccttagagagcttatagctatctctgcagctgcaacccaattggcatgtgtgtggcagctctaactagcgagaaataccgaagatatgcttacatactcccttcgtcttattttaaatatagttatggatttttgcatctaacgttttactgttcgttaaactttgggatactatagtacatataattaaactgtactagtagagacaaccagagaaacggaggagaggctctctctctagctactacctcacc

SEQ ID NO: 6306 - DNA, 2000 bp, Oryza sativa
cgggactgaaatccggttctctcccgactggtctgacaccgagtcaaggagagagatcttgccgaagttgttggtgacgaagtcgaggctgccgaaccgaaacgtctgcccgggtgggaagacgaggtcgtcgatgccggagacggaacccattgcactgatcggcgaaaagcttgacgctcccctacctggcgcgccaactgtcgaaactagatttcggcaataataaaaagggggtggctatcaagctggagaagtgtatgggtttggagacaaaggatttatacaggttcaggccttcttattcaagaagtaataccctactcctgtccggggatgaatccgccgagtgtcttattgattgtatgatttggagaaaatcaacatgtgtacccctagaggcacccggaccccccttatatatgggaaggagtccgtgttacaaaagataatctatatccctaacggaatatgcagatacagataaaatacagtcgtaaccgactaagtctcaaggtatttccttgatgtacaagttgagaaacaaacccgagacacaaataagatattctatctatatttggtatcctgtattcagtccaaataccatcgccgtgtagatatgggatatccataatctccacaatttcatataagacggacagtcaaagttggacacgcaaacccagggtttgcctttttttgaacggagggagtaccatctagctattgtgctgtcttcagatgacttgacataaactaccgccgacaggaagctataggcagtgtagttcccttcaaacttctaaaaattcatatgcatggagcattaattttggacgaaaaaacaccaattgcatagtttgtacgtaaaatgtgagacaaatcttttaagcctaattatgccacgatttgataatgtgatgctacagtaaacatttgctaatgacagattaattaggcttaatagattcgtctcgcagtttataggcggaatctgtaatttattttgttattagtctatgtttgatacttcaaatatgtgtccgtatacttagaaaaaatttggcacacgaactaaacacggccatagtattattaatggatagaaattcaaccactgtatccactcgtggatatatacggaaaaatacgtagtagagaaaccacgtacgttgttaaaacctaaaaaatatagttggattaaaaatggacgcttgagatttatctacatcatcaagagtaaatattttttctggtaaaatttttatttatagttgaatttgcgagtaaactatttactcttggtgatgtggataaattgaagcgtcccttttttatccaatggtcactacatattttgtttgcaccacatatttctctaatatacacggccaaaatgaaagataataatcataaatggaaagagtggaaagagaagactgaggaagaagaagaagaattggacctgctgggctggaaacgtgtgccccctttcgataattagcatctcttcgttgcaacctcagattcaagaaatttggataaatcactttgctcccattttagatgaaatttaggtcatctccaactctccatatcatctagcgtcaaataaatctaatataaaaagctttaaatcaaacgtgaatctgagatcggatgctgtgccaaataatgccgtagttttctccctgcggctccgagtttccgactgcgggcaaagccaggaaccgatcagctgagctcctaaaatttcttgaaaaagaccatctatacctgtgtgaagacgtcccaagtcccaacctaacacatctgagagtaaaacaaaattgtgtctttttctattgcccgattcgatctgcctgccaagtgatgatcgtcccgttgacccaaattttcgttctcctcaccgagtatagtacttaccctgatcgatcttggagatttagaagaggaagacgacgacgaccaagaacaactagaagtcaaagaacgca

SEQ ID NO: 6307 - DNA, 2000 bp, Oryza sativa
gtgagttgagcaatgtttttcgtgattagtcccatattattcattaatggtaattgtgataattaatttgactcctggtttggaatggtacgttcctggtatggaggttagatttgtacaaccggggttggttgttcatatgaggttgggcctatgcaacatgggtgtgttgtatggtgttatttaatattgattaattattcaactgtttttaccattcccttaaatatttattaaatgctgtttctgcaaatgagctatattatgccatcctttgttatcctgtgcacttgcatatttgctgtgtgacttgttgagtatgtcatatgctcattcttgcaatattcattcatcagaagaggagtatctcagtgaaggtgatgatctggaggattaggcttgttcttggttaagatgcctatggagtggagtcgccatagctgttccgtagtttgttatagttttatttttccgctgcgtagaaggttattctttgagaggaactatctttctctgtagtaattatttatttgcgaatattaaatagttatttatttgtactctattatcaatttgttattgtgtgcctcggttgattcctggacgagggtttaacacacatgtaagcgtttggaattttggatagaaattccgggcgtgaacagtcatccagtcgtttagcaattagcaccgttccttcccttgatgaaatccatttctccgaaacacctatccttccagaacggcgtgtactgttgtgcccatgatgatcggccagcgagaatgacgggctctatatatgccctattgctcacgatctgtccctctcattctctcaataaacgctcaccagccaactgcaccagcacacattatacggagctatccaccactcgaatgcgacgagacgccggccgacgatagccgacgactgcactgttcccttctccacggcgccaagaatgcaaacgtgtcgcgacgccggctgagtacatgcgatgacggggacctcgattaatttcagggcatgtgtgtccatgtcgttttttgcacattaattacgtcaacagctagctagcgaaccaactcgattgtatcgatctgtagcaacaactaccccctgattgttgatcgattccatatcgatctgatctctctatatattttatggattacctctctgtttttaagggaagagctagcgatcgagctccagtagtatacgtgcactttgggttgctcatgcactggcttaatttctgaagatgagtaatctgctcaaggctaagagctgggtaccagaggagaaagctgcagcgactgcttctgatgaacagaatgacaaggtatgctactttgattgtacgagcgagttttgctagcttcccttcggctatatatcttaaattatgttttctactagcctgactgtgacttggttaagtatatacgattgcgtgttctactagctacgtctgtggtgaaaacgttctatatatgacagattgagatgacagacgctcttcaattccttcacttggatcagaatctttataggaaattcatgaacagttcgccgagatcatatcgaacctgtcatgaaaatctagggaatccattcgaactctagtggaattagttcaaaatccaacctatttttgagacacgttcgacactaaaactgaccaaatataatcagggtccgtacgtatatatatctccattctccaaaccattatcttgctgtttagcgatacatcggcgccgtatagaattcagcatgtaacaaatatacagtttgactgtgtaaaaattataaggtggccggtacaactgccacttacatcgggaattcgatatatatatatctacagcaaatagcgggcttgaaacaagaacagttaaccataatttttcgaaaataatatataaacgttcaatttcaaacctgcagataaagaaaggtccgggaactcctgggaagccagatgacagcagag

SEQ ID NO: 6308 - DNA, 2000 bp, Oryza sativa
aatcatatagcaaataggcttaaaagagtcgtctcgcaaattagttgcaatctatacaattagttatttttttagtctatgttcaatatttcatacatgtgtttaaacgttcgatattataaggtgaaaaattttaggtgggatctaaagagggccttagtagcattgggcacatttactttcgttgatggaccgaaaggaaaatccgggatgatcaatcagatcgtgcaatgctcaatccgtacgagcttggatcactctaacatcattgtgaggacggtacgtcctcctgcacgaatcatggtgcccgactttagatagagtgagtgtaaaggctgtccctctgtccagccaaaaaataacggaaaaagaaaataatgtgaagctagacgtagcctacaggcccgcagatccacaataaccagcctttttgtgctaagattctgcagaatttattgggcccgttgatctcactgggccaatgtattcccccacgaatggaataagtctattttatctctctcttagctccctgaacactccacaatctttaaaaactagagcaaattgactccttagctggttagggaagtggtttttgataacgtggcaggttgactatggttgactcgctgagttagcatgtgggacccacatgtcaagggctctcctctctctcctctcttgcatctctcacccatgaactctagaccagcgcccgatgaggagaggggcggcgggcggccgagaagagcaaggcggtagcagccccaggtgaacggagcgggaatgctgctaccgccgtggtttccccgagctaccgtgtcttcccgctctttccgcgacctcgcgcgagctcccctgtctgtgaggacggagacgaagcccgaacatcgccaccgcagcctcaccaacctcccgcgttagtgttatctccgccttctgagctgataagtagcaatagtagtactggtggtagtgtagcctcaccgccgctttgcatggatgagaaagcttttaatgcgggggagaaaagaagacctcaaaactgttagcatgagatatattgttctttgttcacaccgtcgcaacgcatatgtcaggcggcatagggtcgacatcactactacctcttctccatcaagaagctcaactcgttcgacgtgatagtggtgctcaccttctccaacccagttacgctggtcttcctcgacctccgcctgccgccgtgttggtgatgcacaacgcgtgaaggatgtttgcgacgtctgagtggttctgcccggagatggcgaagcgagataaattcggctacatcggtggcgcaccgcagggtgctaggggtggttctagctacttgctccggaggtgcctcaggaatgccatcaggttgagttgcttgcactagggctccttcccttcccttccttgtcggtagccgatggagccactagaaggggaagagagaggaggaggaggaggaggaggaagagaggacaaagaggggagaggtgaggaagaagatgaaagtcacatgcacgttggtcccacctgctgactcaacaagtccaccacagtcaacttgccacgtcagaagaaatcacttttaaaatcaccgaagaagtcgattttcactgatattagaagagatgttatacccggttttgcagtttggtgagacgatttaatcaagagcaaaaactatttaaagaggcaaaatagacttattccccccccccaacgaattacaagtgacgtcaccagccacgactagttcgttcggccggtaaaggagtgggcccaccaatgggctagcccaacttgccaaagacaacccatcacgttatctcctctactactcctcttcgtcgtcgtcgtcgtcgccgccgccttcctctgccgcttccacgtttccactcctcgtctcctcggcttgtctccacgccaagccgccccgcttccgccgccgccggcgacgaccccgcgcgcggccggtcacc

SEQ ID NO: 6309 - DNA, 2000 bp, Oryza sativa
agttccatgtaagcagaattatcaaaaacaagtctattagcagaaacaagattcttatttgaattaggaacatatagaatattgcgaagatgaatgtcacagttcggggttttaacagtagaatgaccaatatgactaatttccatacttgcaccgcttgcggtgtgaacttgatcttgccccttgtagcggtcacgaactgtgagcttgtccagttcgcggtcacatggtcagtcgcaccggtgtcgacgtaccaatttgtatcaatcccataggaagttgctgatcctgcatatttttcatcgggaacaaaatcttcatcgtaacgataccagcaattaattaccgtgtgtcccctcttgtagcagagttgacacttgggtatgttgtcgacacctcccggtggacgcgcgccgccattgttgccgcgccccctgccacggttggcgccattgttgttgttgccacgaccacgtccgtttccagcattgtcgccgcgttgctgtcctccaccaccgccacgtcctcggttcgccagatttgcagatgcatctccaccgtgacgaagcgcgagacgctgctcaaaactgagcagctgggagtacgcctctcccagggtcatgaagtccttgccgacgatggtggagatgactggttcatacgtgtcgtcgaggccggcgatgatgtacaagacgagatcatcatcatcgacgackttgccagcagccgtcatctcatcagcaagagtcttcatcttggaaacatactcgttgatggagagagtgcccttctttgtgttggagagggcgatgcgggtgttgatgaagcgcgccctcgagacggaggagtacatctcctccagcatttgccatgccgctgtagccgtgttgcaggtggccacttgcgccagaacgtccctggctagagtggagagcaggaaccctagaacctgctaatcggttgcaatccaatcatcaaattctggattacgagccgtgacttctttttctcccttgtcgcctgctgtcgtcgtgatcagggcgttggggactttggtagtgccggtgagatgcccctcaaggcgggctcttcgcacaacagccataacctgcgctttccaaagcacatggtttgatttggagagtttctccgagatcgcgtttccaccgagagggttcctggccgccgtcttcgacgaactcaccatgagttggattagatgcgatttggtggatggaagggctctgataccatgtgaaaatcagaggtgcagaagcgttgaacctcgttagaggccgcacctttgttaatatatggtgataacaaccatcaccgctgggtttacatccatagttacacgtgatctgtcagttggatagatgagactaacaacatcctaacaaactctatcttatccaacctaacagacaccacacgaaggtatacaatatagttttacagaagcgggagtagacggaggcggcggccttgaaggtaagtaccgacaaagggaaagaaggatgaaggaaagagaaaatgacaatttggtcccaaacattttgtaaattcatctaagaggtaagtactgacatactccctccgtcccataatacaagggattttgactttttggttgcgctatttgattactcgtcttattaaaaaaatttgtgcaaatataaaaaatgaaaagttgtgcttaaagtactttggataataaagtaagtcacaaataaaataaataataattgtaaatttttttaataagacgaatggttatatgtgtaaaatgataatggtacgattccaattaaatgactatatcagaaaaccctctctcgttggctcaaaatcaaacacgttgcacatctttggcgtgtcttgccatctcttccagtacacactctatatgggagtagatatactagcagattagcaggagtatccaccctagcatacgagtatcgttccgaccctgcacacgttttgtacggtcaatc

SEQ ID NO: 6310 - DNA, 1837 bp, Oryza sativa
  misc_feature (1)...(1837): n = A,T,C or G
gttgattcggcggatgaaagrktctgggattggcagaaaatttggcgagttktggkggttngactngttggagttggttngctcctttgggtattattaatnggtactattagcacagattggctngcaggggcatttttagtccggaaggaaatgtcttttaaaataaaaatgacaggtgctaagggatcccacttacagccttaaaacgtctccatctctaaatatgacccttcaaatacccatttgatcagcctgcaaaataattagagcctgtttgaaaaacagggacttattttaagtacctgtcacatcggatgtttggatattaatttagagtattaaacatacactaattataaaacctattccataaccttagactaattcgcgagacaaatattttgagtctaattacatcatgatttgacaatgtgatgctacagtaaacttttcataattatagattaattaggcttaaaaaattcgtctagcagattagctctcatttatgaaattagtttttttattagtctatatttaatacttcaaattagcgtccaaacattcgatgtgacatggacttaaaaagttttagccccatctaaacacccccagccaaatttatcttcaacctaataatctttctattacgctctccaatctgacaatggatcccacatatcaatctttatatgtttttttcttccatccaaatctttccttcttcctccccttctctccacaacctctccactccataatctctatccacggaccatggttcaccactggcagcgctaagatgatggcggagtggccagcgccggagggggaggctgtcgaaggcgacgatgtaggtgaggcggccaacgccggagaaagagagaggtagtcaataggcatggcagacggagcggcaaagctttgccgctccagcgaccgcgcccggctgcggcagcggcatgaatggtagcgacactactgctactcgcgttggtaggggaggcgaggaaatcggcgaagggaatggacggagaccggcggtggtgacagacttggtgtgggcgtcgatgggtaggtagtcgaatagcggcggcgacggctccaccttgctccagaagatccccgtctctgacgtcagagagtccgcacactacctcttctcactctccttcttgagccggcagcactgcagttggttgtttttctttccgcacaacgacggggtggccgacgacaggaatcggcacgcggcaggcaagcggtagacgggaatcagcgtgggacgccgccacttgcagccttctcgatctgtcttgccccatgccatttgttgtgcacgactggtcagcgaggggatgggtttggccaaccagatggacaagccatccagctagcaagtctgttgaagctgtaaatttatctacactagctaaattttagcttagagagtagaatagagatgttgtttgagatgcttttataggatggaaagtataatggagaagcttggcccgtaaagataaagaacagtacaaggactaaccatggcaagagaaaaccgtcactactcaaacctttgtttttctctattaagattgatttagtatttatcttatatttcctacgaatgctttttacttcttatataaaaattgcttaaaatataagataaatatattttttaagtttttaataattaaaacttaattaatcatatcataactatcattctcattttcctcgcccccaaccttatctcaatatacaatgccagtccgccgcaccgttttgcggctaactaagcagtaagcacacatttgtacggtcaatc

SEQ ID NO: 6311 - DNA, 2000 bp, Oryza sativa
gctttggttacgaggagagtttgatcatgagaacttagctgcgcatgcaaattttttgttgtgttcttggaggtgtatgtgatctccatttgtaatttatcatcaggcaataataagttgttagaatggaattgggatccaggagagctccttgtattttaggagacaaattttgaggacatttggtattttgtcattccaaatgtcaatagttcaataccatatgcactatttgctgcatatgaatcataccttgttaaatcgagagatagaagaggtaccttttggtattacaccattattgttgttttctgctagtgagatttataaattcattcactgtaataagcagatgttatgctgttcagtacaacaaaatgattgaaagtttggtccgctcagccatatgttttattttttagaatacacatttcttagtgatctatgcatgaattgctccattatgacttcaaatgaatttgtgtgaggtatttgttttgttcatgtggactgctagattatgcaggccaccttatgttatgcttcactcccttcttatcttaattacattaaatgacctccttcggtcattccggcaaatgttatgcttcactcctgtactgatcaactgaattatcaggaatcagggtatacgtaataatagtgcttgatttgctcatctggtgtgacattttgtttctgcaccttggatggccaatgtttgttttgagagaaaaacaagaatggacacttccatgatgcttggttaccattatatgttgccttgctgtttaggttaccatgataggttgtattgctgtttttaagcaccaatgcgttccccctgcatagtttcatgacttcatctgcaccatcattcagttactccgttttctttgtgaacgaaaatgcagttactcttatcagacctagttctcctgaaataaaatgggttttyccttttgagctgtaaaactctgaaacctctctgtatcaggattcctgttttatttttaggatacttctaccttttttcgctttgagtgtttctactctgctgctatttttaagaagctggaaacgaacaaacatcagatcttgtttgttgtttgacttgattctgtgcctgcactgcacgtctggatttgttagcaaaagataacacggctgtcaatatactgaactggactattctgtaactacatataaaaaatgtctgaaataggaattatagtccaatttgtcttgacaggtttttaccgttctaaatgccaatgctgttgaacataaattactctgttttccaaacaacaacagaaaaaaaaactgaaattactcgcatatgaggcatagtatgaaattgaatttactgcctattcgtgagttggtcctcctgactctgactctggatgccactacctgctggagctatggaaatgggagtaaagctatgcacatctgatttccctgaagtttgatggtctgacgactgaaaacttgagcagtcacaatattgctgtccgataccaatcggtttaaaaggtcatgtggtagccgcggagatgacgagagattcaaatgtaaaagttaacctaatgaaaactcatcgcagaatttctttctgggattcatgtgtttcaaatgaggtttgaatctcaacagacacgcatttctcatagcacacggaattggcttgatttttctccccctcacacaccggacgatctcacaaatgcttcaccaaaagtacaagcagataagaagtacgcctccgtgcgagcaacacgtaaaagtcaaagtccatcaccccccgcgaaccccggaagcttccagaaggaacccaacaaactagcgcctccatctctcactggcagccgggccccacgagtcgtcgggcccacctgtcactcactctacgcgactactactacatcgcgcctctctctcccccttccccttcgaagcttttcctcctcctccgcgcatctcggcgccgcgcc

SEQ ID NO: 6312 - DNA, 2000 bp, Oryza sativa
gggagaggagaaagtaaaaatatggctataaccaaccttaaggttagaccataagaaataaaaaaatatttcataccttttgcaccacgcatgatgctctttatgttgaatagagttttttcatgagtgggtcccagcttaatatcaagaaaaagctatatatattgtagcatatgttatatacaaaagaacataagaatgtgggtcccatcttattgctctagtgaccttaaccattgagaatgccctaagaaactttcaattctgaatcagaattggccatataaaatttctgcttacacagaagaggataatgcggtgggagagaaaaaaaaaagaaacatgcacgcatccgcccatcaatttttggtattttctgtggattagtagtttaaggccggggttttatgtgactaagtattaatttggcatgaatcatgataagttcatttaggatgatacctttcctgccatcctattcatcggattaagttgtttatttgtttgggctttattctcttttttttttaataagatggctcgtaagcctaaataaagaggagctcatcaagataatgaaaacactattatcaaagatacctatgcttgtagatggagatgtgacttcttctagtaaaatgaatatggacagatcacatcctatattatcctatattatgttgagttcttttttggatgaagtacaaatcaaagatttatttggatcacaatcttaaataacaacactttaggacgaaggaagaaagtaggtagcaaattaaccagacgaatgaccagtcagtagagtacaaacagcacgaataagcggcagtaggttaacttttcgttatttttagcaatcggatatttcaatgcactcattaggtatagcttgtacatggacaacacacaaaagtcagatcacatcattcctacatttacatagttgttcgattcataatcaagatcataagccctatttgtttgacacattcaattatatactattagaatatattatattactaaagtatatgatagttaaatttgtaatacgataggattgattgtatcctatcctttcttatctctatccatataatctctatatatactggtcatatatacaggactcaatacaacgaatccaatatatattacaaagtaatctaattcctcctatactatattaaacaactataccgtatgttttcatttcttcatgatatatagtgctagtttcttttaagtaatttatctgctcagtacaattacaaaagaaccatagcagaacgtccagctaagaaatgtcagcccattcaaaaaataagtactctcttattaatataacacttctactatacttactccatcccaaaatatttgacgccgttgatttttttaaaaatgtttgaccgttcgtcttattcaaaaaatttaagtaattattaattcttttcctatcatttgatttattgttaaatataattttatgtatacatatagttttacacatttcataaaagtttttgaataaaacgaacggtcaaatatatttaaaaaagttaacggcgtcaaacatttagggggaaggagagagtattttgaaagacacattagtatcatggatgaaaccacaaatatgcataatcacgaacaattttccgtcgcccgcggtcaaaccgtctctcctacacattcatctgtacggcaagcaatccgtacacaccacggcattctgtacggccgctaatctcattccattccgtgcatccgatccttcccgccattgaagcgcgcgaagccgccgcgcaatccttcaccccacactcctacctagccgatcacacgcactccgatcgaggcaccccaacatggccgcgccgcccgcaaatcaacgcaaatgcaagaaagatcgccattaaatacgagcaatctcgcagccgatcccgtctctggatctccctctctctcgatcagcttgagatcgagcagaggag

SEQ ID NO: 6313 - DNA, 2000 bp, Oryza sativa
gttaacatcaaaagacaaaagtcaaaactactgtggacaaccgagcaacgagccttcagacatgcttatcttgaaaggctgtagcttatccgttctcaatatgaacatagttctgcctacgttaccaaaagaaaaatttcgagctggttttggttaatccgtttcaaatgcatatagcatagttacaggtttgtcttttgaaaaaaataaggattgtagtcgcttctaatagtatgttttatcccatttttattttctgttcttggtataaaacttggaatctaaccgtgctagtttttggcatgttkggttttcaaatatttgaatgtatattttacgcattcgttaatcagacttccaccccctgttttgtactgcctcaaactctattcatttacacttttgattccgtggttttgaaaaataatatcatcacataaacgtgtttggttgtatattatgcttgtaaagatccacgtaccaatatacataaggattataagttatgatatcttcgtcagaaacgatgtacaccaaccagactcgaagtcataaactcgaattgcatatacttagcgggtttgcaatcaagcgacggttcagtgaaataacgagttactttatctaaaactcaaaattaaagcacatatgcgcacacattttgagtaataattgattggatttattgataaatgatttgcttggatacaccacatattgatactgtatttattattgtcttttatgtgaataatgagtatttataaaagttaatgcttgccaagattatcagtttaaaccctgcagagtttcatcaccttctttctatggataaacatgctttgcgaggaatatcggttggagacaaaattttctagtatttacacatagatccattggatagctataagcacccctccacccgcaccccaaaaaaaaggcatttgtaaacaacatagtagtgataccgttataatttattttccgcctttaactagtacaatcttttgagagtatttggaacacgtcatcacttcgtcccttattatctctccccgcatttaatcgatattgactctcaagactattttggacatattatagtatcgtgtatttagaacacatcaaacattaaacccgacttaaaactccatcatccaataccgttaacttttatttttccgcttttaattgctacaacctcccgcgcgtatttgggatacgttattacgtcatcccttattacatcttcccgcgtttaattagtacgtatcacctctcatgcatttttctggacatattacaatatcgtgaatttaaggatcctcagcactaaactctaaaccctagttcctgtactctttaccatgccgaaagcgaccacgttgatgcgaagaagaggcagcaggttgaagcctctatgagagaaaggataatgctacaatcttgaaggatatattagaaatcttgtagggagtaaaatgcaaaaacgggggttctatagacggacggatgcggacggcggccataagaaggtgcaggggcagggggctctcctctcctctccctcggtctttgccaaattcccactccgcttggctttctggccgccctgcccgctctgcccgcatcctcgccctcagccttcgcctttcccctgcccgcgctgccccgacaccaccaccacccctcctcttcactctcctcctcgacttcccttccaccaccacccgccgcgcggcgtcgccgatgccaccctgcgcgctcgccgccggggggagcgcgcggcggcggcttcctccgcggcgctgacgarcgggggacctcgggggttgcgcgggtgggcggcggcggttgaaggtgcgtgtgtgcgcccggttgggggtgatggggaaggaggggaacggcgggaggaggaggggagccggaggaggaaggggaaggggaaggggccgggggagatggtgctgcagcaggaggaggaggacgcggcgcccgcg

SEQ ID NO: 6314 - DNA, 2000 bp, Oryza sativa
gtgatagcgtcgcgacaacagggcccagccttcctcccaracccggggcttgcaggcttccagcccacagactcccagagcgcgctttacgtcgcagtccaagcctcctttacttcttgcgcggactggccgattacggcccaacttttgccctcgggcctagtaactcctttgactcggtgggctatggaattttgtcaaatctcttttttgtttttttttctttcaggaggttttatcttgttttttttcccattttgcaaacaaaacgtatttcaaaattttctatcacgatacctgggctatggaattttgtcaaatctcttttttgtttttttttctttcaggaggttttatcttattttttcccattttgcaaaccaaaatcattgtcgacatctactcatctgcccgggaatataggggattatttctccttcatttgtccaagaatatagacgatttttgttatactgaggcaacaagggcagcaacaaactgatttcagcatataaggctctcacaaactcattaatactaatatgtagtgcattttaaaattcattcactcctaccaaactttagtagtttttttttaaagatgtactctatgcacatcattcaacgtgttaactatatatgtcttttcacacaatcagatttggtgtatactttcttccttaatttgtacccaattgggaataatcccatatatttctggatggaggtattattaaaaagggaaggattactataacttgaatacaatacataggaacgcataaatgccaatagcgataatactacactagccattggagttgttcgtcgtataatcatctactatctatacgcctaaaatrgacaaacaacataatgtccgcctataaatggtacctcatgcattagaggagagaatatgctcttcggtagacatgttaggttacatatgttatcttatatgtagatgggacaagaagaaatcatgagaaaagcgtttgttattcatgatagataagcaagatatccctcaagagaagctaacctcgtgcataagaggagaggacaaagaatacaacaagagtgtactgcttatatgctcaattatagcaagcgaattattgaatattccaataattgcgtgtcgaaagattatatattcagggtcgtttgtctcttacattaacccctcttaaagaaaaagcagtaaaaatcaaaatatataattctggaataaataatattcatcaacactttaattttgtaaaagagaaaaaaagcataagccgtagaggcaagccttgtaaaggaatgaaaataaaagcattctggatatataaacaaaccacaaaagatcgatcgcattcgcctcttgatgtatacacatggtcaaatccaaggaacatgtcgtgcccgatcgtaccaaaccaagtcacggtacacgcgtggaccgcgcacagattagccaaactctgaaagcaacacgcacggcaaacgggcaaagccggtgaccgggggacgcgcgatcgatcgatcgagccggcgcgcgcacgaagcaaaccgcaccgcatccgcatcgtcgtcagcaagagcaaacctgtcgcgtccccattccaagcccgccactttgtcctcttcctctggcgctcggctcgccggggagcagagcagcagcagcgaacccctctctcgccgcagatcccaacgccgcacacacacgcacacgcacccgcacgcgcacgcatttccagctcgcgacgacgcccatctcgacgcgacgcgatccccgccaagtcaaaccccacccgttatactctccactgcgatctcagaggcagaggcagagcccacgccgcgcagatccacctctctccgccctggattccgcggagcaggaggcggtcaagccgtcgccgccgccgccgggccgcatccgctaacgcaagccctcctycccgggactcctcctcgcccsgccttccgacgccgacgccaagaac

SEQ ID NO: 6315 - DNA, 2000 bp, Oryza sativa
tcagcgtacgttgagctcactctcgatcttagcatctcgctgcctccagggaccatccagacctgcgagagagaagaggaaaattgtgtgagagaggtcaggattacatttgaaggccgagtttcattgttgtggttgcctcaatgcctcgtcgagctagatcagtcggccaggtcctcctccgtgtgtacggccttggttgaggatcacgtcctcctcatcttcattctgtgcgccctcaactagatccatcagagggatgccagatctagtgtcctcggtctccctgctagtgaatagagcagcacaaggaacaagataaggaagcacgaggagcagctcaaggagtatgttctcacataggggagcttgcacggtcgctgattgcgtcacctagctcggtcgttggtaggggtgaaaacggagcggatacagacggataatgcttataccatatttgttttcatatttcttttactggatatgaaaacaaatacgaatagctcagattcaaaaataaatatgaattatcaagaatacaaataaggattgaatatggtcggagacaaatactgaaatatttttttcttggaacacgaaaatcacctcaacttctaataaaaacaaatatcatcatatataattagctcgttttatgtaaaatgtactataacttataaaaatatttcaaaatttaaataatattaatagtgtggactagtattaagagatgagttgctattaaaatctaaatagatagattaaaagtcgtagagttataaagaagagatttgctccggttcaataaaaaaatacctcgaggtacacctcctcctcatacctcgaggtacacctcctcctcaccgtactaaatcgtttttgattgttggatctaacaatattcatcttgcccagctaaatccaacaatcggaaacgatttggtaccatgaggtaccggtacctcgaggtacattttgctgatcgaagcaaaactctataaaaaaattgggtatgtctcatggcttcaacggatatccgaatagcaatcatcaccagatattcgtatccgtcggaaaccccgataccatatccgtatccgtatatgtatttgaactatctacgaattatctgctctgaagatattctatgcgtgaacatcagctctgctatgcatgaacaaatatacccgtcccgcggaacggaaacgcgggaccgcgatggtccacagatccaaaacgcgggaccatcggtcccgtgggacggttgcgcagggaccatcgcggtcccacggcttcaatccgcggaaccgcggtggcatcgatttttttactgcatcggcactgttcaaccactgttagtacactgttttgtactgttcatatgccggtttcgcacaaccgccgcgtaggatcgtcgtgtgaacagtgccaaacagtctcaaaaatcgctgggcagcgcggttcacgcgggaccatcgtggtcccacgttttggcggtgcgggaccgcgacgatcctgcgcgaccgttccgcgggaccgtctgtcccatattttggatccgcggtaccatcgcgatcctgcgtttctatcccgcgggacaggtatatttttgcaaaattttccgatgtatgtatataaacgtaaattattaaaaaaaataagtatatttgcaaaaaaatttcgtagagtaaccacgacacaaattttacccgagctttgaaggcattccatgtaacctgctgaaatcgggcgctttttcagcacgcagatgtgtcaacattgtccgatgtgaaactgtgacgaatcgtgccacatttcaactgggagtgccaagaaaattccaactgattgctaccgatcattgctagctgttgaattgaacctgacccatttgtgcaatccgtggaacatcctaatccacatttttgctatcttctcgctgcgatcgccacaaattgacatgtatatggtgacacgaatcgaattcctctataacggcc

SEQ ID NO: 6316 - DNA, 2000 bp, Oryza sativa
tttatggctaattatggactaattaggcttaaaagattagtttttctttttacttatatttaatgctacgtacatgtgtccaaagatacaatgtgatgtttttgggaaaagtttttggaggaactaagcagcccctaagtttgtttttttggataaaagggaaactttgttcagcagggttaatcggctggtggagattttgcttctgataaaaggcataaaattctgagagattttcgatgggccatcaggtcacaaattcccaccaagcaaataacaaaatgctagtaattaaattgccatgacatgaagatcatgccactcacgatgcgcgtaaggagtcccgatccactaccagctgatcacatttttgtgaatttcgctgttgaaatacaatcatgtcatacatacatataaatatacagcagtgaacaggggcagatccaagtaacaaaaaatttgaggagactcagttacatgtaactttctttaatcttcagccatttagggactttttagtttaccattcatgataaaaaaatcaaaaaaggtgtttcgggggtatctatgggtcttgtgggtgtaggggttggatccgcccttgagtagtgtacaatgtttgacctccaagatttatttttgttcttctccttttgtttttgttttttttaaaaagaactccattattgggagtaggatccatccagcttgtcgccatgacacgcggtgccagaaaaatgcaattatgcagacatgcagattactccgaacccatgtttgccacgacggcgactccaccctgcataattgatgcctttcttcttcattttctacttagaaaataatacaaggccttgttcagatcacggactaatttatgtttatatcacatcggatgtttgatactaattagaagtattaaatatagactattaacaaaactttgagcataattaattcatgattagtgctaattatggatcaattaggcttaaaatttttatcacgcgaattagctctcatttatataattagttttgttatgcttaacactccaaattaatgttcaaacatccgatatgacagatactaaagtttagcccctgatccaaacaccccctaagtagcattgcccattagcactaagtacaattagtgaatttgacaatcaagtgctactgtagactgctagtacagctctgcatgcatgcgacgtaccgtaagtactagtagtactctgagatgattaatggagtccaaaattgtacagcagcagtaaccctgacgcaagaatttcttttgcatcagctgatggtggaggtttatagtacgagtaccagatgcaaaagatgtgtcacgcattccaacccaaattctgcggttctgagttcaggccaaggccaacccaccgcccatcggcccggcgctgacagcagaatctgtgcgcggttttgctgcaatttttttttattccaacctcccaagaatgataggagtwcagctaagtwgagcaacggatttgttttcytgttcgtgaaaatgttgtagatgcatcctaatwaaaacgtcgaatgtgtcagcttttccttaaaaaatcagctctttccttttaccttttctctttgaagaaaaagaattcgtctccgaatctgatgttctcctattgaatgtkagcccttcgcggctgctgaattccccagaaargcccctcgatgaaagcgacaaccttgcaattgatttgacctcatcgttcttgtccccgtcctggtgccagctgctgctccgctacttcccactgcgcgattcaagaacacggaggaaggttgaaactctgaaagcagcagcagatacaggaggagataagataagtaaattaattggaagaaagaaatcagtggggaggaggctatagaagggatctttcatgcgaggaaagcgcctttctttgcgtttttagtggggagagcgtgtgagcattggtgtggggggagaagaagaag

SEQ ID NO: 6317 - DNA, 2000 bp, Oryza sativa
ctcatcacattctaatactattaatctggatatacttttgtttagattcattgtattagaatatgtcacatcctgtactagattcgtttttttcggaatagagggagtacactttattcattcacgaatcttgaaaagggattattattgcaaagaatgtctagtattgtagctggaaaaggtagaacattttccaaacacaatttggcgcacatatgcgcgccacatgtaagtttcaatattcccagtgagaatcaactgcccatagtcttaaaaaaaaccgcccacaacatgatcatctccttgcctgctttaccaatattcttagctgacctgaaaggttattatcttgtcttttgaagggtataagaaaattgtcttgcaaaattgactcagttataaaatccatgattaatatcgaactgaaaagttttcaggtattcacttcggaaaaaatatacctgaaaagttttcgcaaagggaataaaatacggtatcaaagtttagttcccctacccttacggactactcctttcgtttcaagttataagacgttttgactttggtcaaagtcaaactgcttttaagtttaacaaactttgtagaaaaaaataataaaatttgcaacccaagacaaattgattatgaaaatatattaattattgatttgatgaaactaatttagtattataaatattacaatatttgtctataaacttagtcaagcttaaaacagtttgactttgaccaaagtcaaaacgtcttttaaaacggtcaaaaacgtcttttaagacggagggagtattcattatcacgggcaaacagtacgatttttcctagtatttcttagaattattttttaaaatcaaaactttaactttaatttataataatatgttgttattcgttttaagcggcagtttcagccataatccataacaactttagaacacatagagtttgaggaaactccaaccatagtatataattttttgtcgatttcaaacaataccataaaatttcgatttcaagggtatcaattaatatcacatattgaaccaaaattatagcgcagtactacttttattgtcccattagaaagtcgtatggaacttatcacaaacatacatcgtaagctccacgttagttatagaatttcgagctccttcgaaacgcagaaattccacagaaatcagtccaattcccacgaaattcccgcaaaattcctccattccaaaggcggccttgatacgttcatttcgaaagggaaaagttccatgttctaaatcaagactacagctcacatgctttagggctttacatccatttaatttccctgtagttgcaaggccaaaagatcaagagaacacatcagattgactcagcaatccaaaaacaagcaatgatccaaacatatcttcactgtcacgatgcatctgtctgcatttttttttcaagaatccctgagccgctttctcatgaggctccagagaaagccacaagaatctgcaactttaacacttgcagcaaaaacaaccataaagtttcagaatgcccagctcctggtttcagatttagcagctttggctgatgattaacgagaggtttcagagattacaccctgaaaaaatccaatccacaaactgttattaccgatgtaattactcaacaagtacagaaacagctatagcgtttctgacgacctaaagcagtaggacacgatggtcgatggaataaaggctcagctcagcgaaagactcaagaagcttcgctgcaaaaaaactctcctctcatttcagaggaataaatcctcgttgatcgattgcttgccttctatgcgatcttgttcgttgcttgcggctttaattcatccatcaatcgattgatctctgaactttctgagaagcagagaggaggtagcttgacagcagctgcttctcgcatgtacaagaagaagaagctgaggttcttagccaccgtcgtcatcgctgctgcatcac

SEQ ID NO: 6318 - DNA, 2000 bp, Oryza sativa
aaaaaaatacccaacaacaatacggtttgtctagatccggagcatggcaaatcgtggcaaaatatttcaatggaaaatcattcaaatttacatagaatttcaacaaaagttataaaccacatggttttgcgctcctcctaaaatcatatctccttatatggttttgtccatcatgttttgattgttttttaattaaaatgttatatactataagttattcatcatgttttggttcaggtggttctccaaacacactcagaaagcmcaaggggttatttcgcctggctcatctaaagattgaatatgcatagtacacataactcgttgtttgtcattttgatctattatagtgatgattactcacgaagtgatgattactcacgattattcgaatatttcggaacaacggagctatatttgtggcacttctttccttgctaacaataaaaagtgagggtagaagctaaaaaaattcagcacaaaaaaaacaatcaaaatcggagccatgtcagattatctgacagcttccttgttcatcataccgtcgtgcagagcatcacctgccgcgaccaggatcggcggacccaccactcagtgtctgcgaacccagccacttcttctccactactaccaacctacacggcctcctgtgcttcccaccaagcacaagcatccgcgatgttgtgttcgtttcttcctccaaatcatccatggtcagcaaggaacagctcattcttggcacagcaaatgcaggtaatgaaccttccttgttctatggtgtttttggcagcctcagcctctgtttcaatttctctatccctgccaatgcagcaatcaacatcagattgattgttgctgcaacatgcatttctgaaacgaattgttctgcttaattacaggaaatgtgaagattgaagaaggttataagcatgagaaatagaggctaaccgagctgaagaattctcaagggcagggcaggatgctgcagcgggcggcgagcaacgcatactcgtggtggtgggcgagccacatccgcaccaagcagtccaaatggctcgacaacaatctccacggtttgtacccttcatcacaccatcttctcagtccatatgtatgcatgatcaacctctgcacatacaacaccctgttcaaagagggtgcacatacaacaccctgttcaaagaggagacaaaaaagaaaggatttcagatagatccgtttaatggtgaaacaaagttattccgttttaactactaccctgaaaaaatagttgaaatctgaagcattttgcacagctacagagaaaaacattttttttagtattgctgtcttgagttctcaatgtgaaattgagtcatgatttatgagtagtaccataggttttagatgtcatgccaaagaaatgatgttcagaacaggatgctgattccatggaagctggaaaaaacaccagaaaaaagaagagagaaaacaatctatacagattttgccttaattgattttcagttttatagtaaaagctggaagaaagaaacaaactaatggaaaattccctgaattgtagcttttgttggcattggtttgcatgatgttatcgtcaaatggtaatatgtacagctcagttcagtaataatgcgtgagccacttgacaacataaatgtatgataatattagtcatccagagaaggaaataatttgctttcccttccaattttaatgttcttggcctagcatatttcttggtgagaaaaatatctacataagcatcaatagcaaataaaaaacagcaagcgtaaatttcaaacaaggcaagcacataaaggaaaaggacaaaccactttgatatcaacaccatataccaagcaaaattgctaacttttacacttctatttggagtatcttataatatcttctaaaaacatatttctgcaattaccctttatttctaaccgttaaacagcacggtatttttttattgactttgctgttactgtgaagat

SEQ ID NO: 6319 - DNA, 2000 bp, Oryza sativa
gagaaaacaatccatgtgctctcctttgatgcaaatgatggacgttacgcagacaccagcaaacaacaccactgaccatatgcatgctaatgtgcaagcaaattccacaaacagtaagacacaatattagcactcgtcaataattgaaccggaaaaggataaaaataaaccagaactaattaagctcactttgacttcagcaaaaggatcggagccatcagaaaaatttctttgcctgcagtctacaaaacctttctaacattgcaggatcagatgaatacaaatgcatcttcagatccctgggtaacaatttactagtacggttttgtgcatgttagatgcaacccatcattaaacagtattaatacgatcaaataagtgagctatcacccaaacaatttctatggcaatgaaaaggacagtacagtaacacaatccaaattgtacctttctgctaatccactaggcaacaaacattgtttgtactcaacattttccaggaccatattaacctcgctgaagtaacaggtgaaggatccaagtccacataaatatcagcccaaatattcagacgctgacaggaacaggaacactcacaaaacataaaactttgatctcgctgcaaggagatgatatgccaacaacacattataagaaaagacactgaagtgactgtctgattcattggattccaccgaataatacggagtacacgataagtatttacaggaatgatacgaggtagcgtatcaatgcacattaatcccgatcaattggtctcatctgcygtggttttcttgtccagcgatgctcatctcggagcagctagcgaaaatgctccattgtttggatcgtttagaaatccttccaaagcagacatcgatcaaggagacccaaacagcagtacggcacctttcagcagggcatccggcaggacatctctgggagcgacagatgatgacgacgagtcgacgatgcgcttgcaagccaaacagaaaatatggtcacatatttgattggcaattgcaaaggaactcccatagatcataaaagaatacatatcttaggcacgttcttttgaaggaatgaagaattgattaatacaacacgcttctcaagttgctaaatgatatgattataaaataaatcttaaatgactatttaaatcgattctttcaattttataataattaatctattcatttctactctcgaacagtgattacaatatcattctactatttgggaaaaaaatgcatgtgcgcaatcaaagtacttcatctatttcaggtgataaagtgatttaattttagttaaagttaaactactttaagtttgactaattctgtagaaaaaagtagagtagtaacaaatcatatgaatacattatactagacactttattgtttaaaatatatgttttaggtatatgaaaataatatagtcaagtctatcttaatgaacattacataatagtacaattgtaaagtcttttgacatttataaaagagaatttgttggtgttatgttgacttttttttgggaacattactcccgcaaaataatatttagaaaaatgtacttcgtgcagtttttaggggacttagtaattaattaaaatatttagtactaataaccttcaattatatagcacattgcatttaggcggcggcccagtcagttgcccacccgctcaagaagccagcgaaaatggcgtcctcttcctcctccgcctcgtcgccgctcctacctcgccgaggccaccagctccaggagccagccatggccgcgtcccagatgcggtgcgggggcaggagggagaaccaggtaccagttcttggccggggtggagttgggttcccttgcatttttgctcgcgttcttggatcaaatcggttattattgctgttcttgttgttgctgctgtctgattctgaaaattctctcgtctgctccgggtggtggtggagaaggggcttgtgcagaggtgcgccgagacg

SEQ ID NO: 6320 - DNA, 1795 bp, Oryza sativa
gaataatttaaacatatgggttttcatatttttaagataaatattttagaaattatttgtagtcaaagattttaaaatttgactttatcattgtccaaaacaactaatattatcagaccgaagggagtaccttagactggacatcacccataaaggctagcaggagcgatgagaggaaagaacgaacaaacagtagcaaagagagagatggtaacacgatgattcaatcattttttgcaggccttatccgttggcgaggcaaaaggagacgtcgagattagagcaagtccaatagcaggctgcaaatcaattataagtatatatggagatgataagagaagagagaagtaaaacagactacagatttatagtcagcagtaacacggattgtaaaacgttgtgtgagtataagatatgagaccacatattaatagtgtagtatatatctatgtgtaactatttagctgctatataacgagatcttgttttcgattgggatgataccgagtaggtatcaggtgtgatacctatcaggtatcagacgattctacacatgtttcaggtgatacttatcaggtatcatgcgatttctaccacgtatcgtgtgatactcgcgaggtatcatgtgatacctgttaggtatcagacaatttctaccacgtatcgcttgatactcgcgaggtatcatgtgatacctatcaggtatcaaacgatttctaccatgaatcgcatgatatttgcgaggtatcgaatgatacctaccaggtatcaggtgatttctactagatatcctattaggggaggagcatccgacggcgcggctggcctcctgcaccgtcccctgtagacaaggttgggcgccttctcgccgcactctgacatgatgttcgccgcagcgaacctgcctgtggcggctcggagctccacctgcgagtaactccacaaatgccgggacctctgccctcacggtaggccaagcccgagccgacggcgccgcagaggaggcctggtgcacgttgagggtgaaggatgggcagcscaggcccaacggcagcggcggggggtggacscggcgctgcaaaggaggcttggtgcgtgtttagggtttcggccgcgtcccttgggtaagaatcgcgttttggaggaggagcatcctgttggggacggcatcccgtctctaaccattgctawatatttatatgtaactatttataaattagttattaaattggttataaatgaattgtagctggttgatggcttaattgctcttaccggttgcccgagcagatcgcagaccacgtgcggggacaagtgtcacgcgataaagggcatgtgcggctgcgcgtatcggctggatacccacacaggcccccgggccacaggtgccgatgcacctggccggcggcagtgacgccgatccgtcaaacggagaatcgcaggacaaaacgccggcgaaaaaaggccaaaaaacgcacgaccacaaccggagctacaacttcgttccaccttcctttgcagacatgcagatgcaggggagggagagtgtgggtgcgtggggcatatggtggtgcggtgcgggaggctaccaaaaacgcacgctgcctaagctatttttctctctcctctcgcagcacaaagccgtttccgcacgtgttgcacacgctccgctgggccatacaaatacacctctccccctcctcaccgcacgccacacactgactccatacgcacaaggcaagaaaaaaagaagaaacaaagagagaagaattccaaggaccaagaaatcgaggca

SEQ ID NO: 6321 - DNA, 2000 bp, Oryza sativa
cgttgatgtagcagttgttgtgtgctagagcacgcgcgagcgagccaaaaatgaccaatacaatgccatgtaatttttttttaaaaaaaatgttgccttagtaggacgccatgtaattttttttaaaaaaaatgtttccttagtaggactcgaagccggcacgtacagacgctaccaataggcccaaaccacctggaatagtgcaagtttctgattcctatttgcacaagacccgtacttaatatgagtaaaaccaggaattagataccctaataaattactcttggtatgtgagattatgtctaaaacgtcaagaattttgaaactagagagagtatcaactctattgattttggaaaaattgactacaatacaaatggcttgtagtatgcaatattatcaaagtttctaaataattaaatggacgaaatttaataatagctttttcgtttccttttttcttgtatctcttggtggcttatagttgttttgctctaactgataatctctcagcactaaatattccctaagtattcactaccatatatggaatttcatgattgtctagtgtcctataaattctatcttttagattctaaactatattaaacattaattagttcaaacatattcgcttatggatttgaatatttgaaagattaatcatttagtatatttaacatgatctatataatataaaaacacaattattattattatttgttgaggagggtattactgatccaattgcgtggtataggaaaatgatgttatttttttctttctttgttttggattttttttcttaataattttgggtttaccatgtattcagttctagagtactacagcgtagacatagacgtagtatatttaaagaagataaatggatgagagtttatataatttgtaaggggaaaatagttttggaagcctctagaatctatatgtgatattctgctctagatttttttcccactaatgattcttaagcatttattttatgtggtatgaattaatgatttttcttccaaggaaggggcgctacgtggaccaatcaaaagccagcaaaagagccagctttagattagtaaattaaccatgtcctcaaatcccctgtcttatgggttgagcgagcctcttgcatttgcctatctagaaattgaccagcgttgctaggtgagaatggtttacaaggaggacctttctgccatgatattagggataatacgatatttagctcgtggttagtggtcattggtcatcctttctcttctcagatctcaacaactcgtttttgatccaatagctcaaaacaacggctgagcctgcgagatcgatcccttgtctgtagctgaccgtaagctattaatagcacttaaccaagcaacctgaacgacggattcagatcacgatcgcagaactatattgcccctcgtactatcgcatgcatgctgcattgctgcctacggataatacagttttctcacaggataaaatgtccccgagatgcggggcttcaccagaacaccgcccggagtacactcgtacgacgtacagcacgtacggcagagaagctgcgacgatgctagtgagccttcttgccccggtagaggcgggagacgcgactgctcccggcctcatcctcaatttcacctcgtgttccaattccactccgctcactcgatcgcctgctccgctacgaatagccatgttgcgaccccctctggccccccaaaccgttggtcccacatgccagagtcccgttctccccctcgcatcgcagcgtcgcacgcttttcacgccatgccgtcacggtgccttctcctcgctcctctgcttataaatagtggaagcgctccacttggagcacggccgacgagagcgcagcggcaaatatcactaaatatcacacgaaaaccaaaccaaatcgaagaaagagagatactgctgtacttggagccaagcgagagagaagactgagacgcgacacgcgagca

SEQ ID NO: 6322 - DNA, 617 bp, Oryza sativa
tattttaatatttttaattttaaaaataatttaaactaataatatagatatttaaattaggtaattaataaattcaaatcaactatagtttagaataaaaaataaaatgatatatgccaagtacaatctaataacaatagaatgttagaaacaatatgaattcaatatttttaagatggagatagtacgattcatatataaaactaaagaaaaatatagatttatatataagtgagaacataataaaatgtaaggtaaaattattaaaggaaaaatattattaataaacaatgatgttgatgtatttctaaatattttcacgtattatttattaagtgtcaatgattgaaatggatgatttaccccagccactgccatttgaggcccacacagcgttggccccaccagtcggtctcacatcggctacaatggctagaaggttctgtgagtaaagccgcttccccatttggcccccgtgccattcccgtccgatttggccatcgtcgtctccgtctccgctgcgtctccgctgcctctcccgcgccgccgccgtcgcagtagccgcagaaaccctagaccccggcgagagagcgggggagctcacgggagagcagcaa

SEQ ID NO: 6323 - DNA, 154 bp, Oryza sativa
gccscagcagcattagcgtwatcttcaacgttttgcaacagaggcaamttcggccgccaagcggtcagagcgcgcagaggccgtgctgcttgcgggaacctgcaaggagccgtgcgccgcgccggtggagctgctgcggcaggtggcggacgcg

SEQ ID NO: 6324 - DNA, 2000 bp, Oryza sativa
gtacgtgtggcccatataagatgggccggaacgggactgtggtgtacgtgaggcccatataagttgggctggaaggtgtacgtgcgtgcagtccatataagttgggtcggatagggactgtggtgcaggtgcggcccatataatttgagccttaactggactggaatgtagctgaggcccatttgtgttggcccataagtggttcggccgccggtcgtaacgttcatccgtgtactaagcctcgcttcggctacaaaattttcgtgcggacggaaactattctgacttttctgagcatacgatcgattcgcacgtttcacatgactgcatgaatcactctccgttactgtccattacaatcagcagcgatgtgatacagtgatagtactggatgcattcttgctgttttcgtcggttgcttgtacagctgtactgaagagacgacgttcatatcaaatagtacgtggaaatctgagaagatacccaagcccaaactaaatccgcgtttgatgatacggaatcctccacgctctgttccgttcggtcccaggtgaagtccacaccacacgtacatgcaaatgcaacgcaagcgcgcgcgtacgtacaaactgggattgaacaggtcaaggatcgaaacgcgagccaaaatgttcacgacaaaagagcgcggcagttgcaaggaaagcgaaaggcgcaagcgcaagtgggggaggaatcgggagcgtatccgcggcacaggaaaacgccactttcgtggtgatcggcagcggatactccgagcaaaatctctcgtctcctctcctcgcgctcatgtcaaaaccatcgccgccctggaaagcgacgcggcgatcgaacgcgatatcatatcgaatcatctccacttctcgatcttcttcagttggccgtgccaggcgtcaccggatccgcgccttcagatttgggtgactccgcgaaccacttcgcgttccatgtgttttgccttcctactcgctgagtcgctgatgatatgataaggaaagttgctggctgcatcgccaagatttggctggggaaagttggtagcaaccgagaaatcgtccgatcaggaggatttcttggctggtgtggcaaccccatccgatccgaggatttgaagcctgattatattttaatcttgttgtacaggagatgctattttactaatcttcttgtacaggagatgcttatcaattattagcagtttgtttgtggctagatcagaattcagatatgtgccagcatgaccattagcggttaatctttaatttgttctctgaggcatggatgtgtgcagtattattcccatgcaagcatgcgacttcacataagtttgatgaaacgatgtgtgacagactgacagtgtgagtgtcaagaaatgactgtgattgtagcaatatatgtgttgatgtacagcaacaaatctgatgcagcaaactggcaggtcacacatggagaagaattttcttttgctttaccaaatcgcctaaaacgatccgcatctttcagtctttcaggtcatccaacaagaggacaacccaattaactaaaaactaaagaaaaaaaggatttgaaaaaggggatagggagcaaaagaaaatggtggaccatctttcttgctctagaatacaaagagtactactgatgttgccgggggcctattctttgtggagtcaattcctggcaagatttgcagcaaatctgcccgggatcttgctttccatgaggcaggattttctttggtcattacacctgttttccccatcagcttttcttcttttttcatatctccaagaatcctttcacatgcttatgtatatatataagctcaaccacacccaaacgcccttgtaaagcaaagcctttcatgccaagcacacacaccatctgcatcttctcttctaccattcttgctttctccttgtagtctcttctgttctttcagagaagagaaaaacatatctgtgctagctttgccttcttcc

SEQ ID NO: 6325 - DNA, 124 bp, Oryza sativa
gyacctgggcctacgaccgcgctccgaccctgacccgccctgcctcgacacggccgcccccggcgccgccgccgtccacggcagcctctacgcgtcgctgcgcaccaacctgccgcgcgagctc

SEQ ID NO: 6326 - DNA, 80 bp, Oryza sativa
ccttttttttccccacccctctctttgtctcgctccagcggcgggtggacttagtcgttgttgtgctgggttagctcggg

SEQ ID NO: 6327 - DNA, 2000 bp, Oryza sativa
cacgcgggcagatagagaagagaaagagacccggctgcgacgagtctaactgccaacctggcagcacttccagcaagcggaagagggtcggtcatatttatcccataatatggctaattttttttagaaaaaaagggaaatgagtaaacgacctggcggcgcggttagtcgggcccaccacccacccactggggagtgggccctccctcccgcatacacgttgcagctggacgcggcgttcacaccaactcaacgtgcgccaattcggaaggagcacccatctttcccctttctccttctcctcctcctactcccagccgctcactcgaaccccccccccaactttccttgccgccgttgccccgagggcgcgggagataacctsgccggagcaccgcgaccgccgctgtcgatcttsttccccgaggcaaagccaggaggtctctacctctctctctctctctctctctgaattcgtcgccccgtttctcagcttgctttaatttgtgtgaaatttgagttgatcgatattgcttcgtgtttcggtttcttgatgtggatttggtctttaggatgattcttctccctttttttttgtcagtggaaatgttgtgctttcctcccgcatctcatgtgcttctcctgaatgaatcctagggttgatttgtcgagccaggttttccagttttccatttttgttttgagcaatcggttaaattcaggtcggaagggagctcccctaccgccgattcctcaagcttcttacattgaacagatgatttcgatgtggagatgtggttgggagagggagaagagcttgtgccttttagactgagctttgcatgcttaatgggaatatcaattggatgaaaatgatccctgatcgggacaccattctcggttgattttttgttcaggcgttcagcaaaatgctggtagcgaactattgtttatgaattatgagattaactagggattagtgtgtacaattatcagtaacaggaggcgttgaccatcatagtgtagctacgatgaccatcatagtgtagctacgattatagtagattcttgagctaatttttaggctgaatgcatagtccctgctttattagaggtaggacattggttkaacccaggscgraagcttttwactctagaaatttagaggtagactttatgaatctaaaggtcaactggaacccaaaggtttaggttgtaaagttagatgctctttgattgcttttctatgactctaatatgtgcattctgatagactgcaacggccagctgactggcattttttactttgaaacatatttctactagatactgtgattgattgtgattttgctttattgtgccattcagaactaaatgcaatatttagcatcagatatctgcatatgtataattccaaacaaagtaaaaactgaaaggaaaaatgttcccaaaagaattcagaataactttctaaacttcccatgcaaatgatttttttcccctgtaaattaactagttccacaaaaaagaatccctgtctagcccttataaaacctgttgttcagtatgttctctctttcctatagagataagactaacaccatattcattttgcttccagtctagacaaactcagcttcatgagttcaagttcaggaaaagcactggcatccagcatctcctattcagcaggaaagagcagcattttcttgctctgcctctttgcaggatacttgggaattcctggccgaaaattccacttgctcaagaccgtttgcagcactgcatctccttccatcattggaagttgtggagggaaccttctttagactactttagcacaagtcttcagtttctattagtgtggaagcttggcctgcaaaaccagcaaccttagctacgtagtaggcctttggatgatggtttcttctcagacatcctctctgacaagaactatcgcacaggaccccgagctcttcacagcaaaaataattctccca

SEQ ID NO: 6328 - DNA, 2000 bp, Oryza sativa
tactctttatcctatatgcttgattgacatgttaaatctgccctttgcgttaagatcttgccgcatttaagtatattaggcttttgtttagtatattctacttgctttaacatcttaacatagagtggtatcggagtattagccgatacatgctagatctatctgatcggctatgctatgaacgtatatagtctaattattaatatatatttcgatccaagtgatttatactgtctcggtatggcgaccgatctatcccaatcacttgatttaagtatatatcgatataaggattatatattgttaatatctacagccgatcgagtagatttagttcttctttacgtattcatgactgccgatcgatacatggatgacatcggcccaaagataaatgatatgtcatcggcatctagccgatcggctatcatttatagatttaactacggtttctttgcttctatttcytgttgattacaggatcaaatcaactggcacgctaatacatccaaagacgagcttttggacctgcactggagttaagcagatctcccaggccacgtgttttctgtcaacacctatgtgacatgccaaaacttttcacccttggatctaaacacaaccttattgcttatccttttcttaacctgtacgtcatcacgactcctctataacttctccttctttactctatgtctttctcctattttcaaggtattgggtaaacactgaagtcagatgactctcaaatactctgtttgagaagaaggtgattttcttctttcttttgttatttgttgtagactcagtttttttcggggatagactcatagtataccatcaccgctaaaacaaggtaatatacgaggaccatgttttgtaatagaaaagagggtgttaagttgattttaggttgtgcatctaagattttttttgttgaaaatggattgaaaaccttctcaatgaaaagatgagatataacattaagggagaagggagatggaggtaggaagtagatgatatgcgagaaaatcattttttttattttgtaaagaaagtatatgacgtctatttatgcatatactgctgttttaaaccggtatcacatccggggtttacaaaatcaagtgttgtgaagtgatagattttattagaatcaaatgtatattatagacaaggcaatgttattttccttgctaatagtgcacaacttttatccatttgatttttcatctctctcccgctgccgttgcagtgctagaaccctagaacccgctcgcactccgaaaccttgctgattgcttcttgatttaattagcgaagggcattcttggtatttagaggattattattcaccaatttaaggccaccttctttcctttaacacttttagcactaataattttgcattttcacaacataacaccatcgagactaaaaaaccttgacactttcaaaaatttaccgggactacccttcgtccccattcccccttcctcttcagttcgtcctaaaacccctcgcgagaagataacagcggcgagctcctccaatcctccgccaccatccaatctctcgagcgacgcctcatccacccatcatctcatccctcgaattccattcctgctcgacctcgcgagctccaatccacgaatcattgctaggttttggagatttttttttgttttgatttggtgagggcgtgaggctccccccaattctacttccggagagctaaaacccggatcggatgctcgattaatctgctgggatcgcgcatggggaggaggaaatcgcggccggcccgggcggtaggcctaggccccggcgctgccgctgccgcggagcccgacgcgccgagccctagcggcagcggcggcgcctccaaatcgaggcgcgcggcaaagggcgagctaggaggagagaggatgtgtgcttcgaggtggatgatagcacgtggtgtttgagcgacggcgaccgccgggactcgcggattggtc

SEQ ID NO: 6329 - DNA, 2000 bp, Oryza sativa
cacaagttggcagtgtaattttcagcgtgtgcatcacatggtccgtatctttaatactagtcaattcatttttaatgtaaatataagtactatgtatatggactagtagtactttatttaaggtcaaagataccatggaagcaaataaaagacgcatgaaaaattgaaataccaacttatgcaataatatgccaatgcatgttgttctctccctatttatctctcagcgtctctatgtcttagtttaactaattaatgtaaagcatgtgtagtaattatggtgatataccattgtccagatttacttttctagaatgtgtcacatccacctgaaatttcttatattatgggacggaaaaaatattatactactatcttataaaaactatcactttataaaaaattatggtcggcatttttctaaaaaaaaatgcgacaaagcaaacttttccatcagaaaataataccatatatgataagttaatccttgttaaactttggtttcaaaacaatttcccacttatttcaccaaaaaatatatttctcattttttttacaaagggacaaatataccattatccacatgctaatttgtggtgtcagatacctgaatactccaaagtaaacaaaaatccaaagcctttgttgatgtcaaggtcaatttcgtagtttacctttgcaaagagagagaagcaaagaaggggcaatatggtccaagggcagggtcgtaaatacctacgaaaaaggccaacatggcgtctaaataaattgccctccttcccccctctcgaagccttcgaaccacccaaacacccaaaaaaaagaaggcaaaaaaagaaaaaatctcaccacgagcagcacaagaactcctctcctctcttctcttctcccctactccttgattgaaaacccacgcatcctcctccttcccattgcgcattccggctagtcgcctcgccgatccctctcccggcccggcgcggatcgtcgtccccttcgcggaggaggtgccaatccctgttcttgattttttttttaaaaaaaggaaaattgttctttgtactgtgtggagcggattttgggggtaatctggtgctttgtggtgttcgttgttagggaaagtttggttatttttgggtggatttttgtatgtcgtgctaaatgggtttagctttagggggagtttatggatttggtcaatgttttgagacaggagagtccagagttcagagttcagagacgagatgttcttattatgcgttttgttcgttgatttgggaagtttattaggtggattcaacgacaatattcagtagtaacgattatattgggttgaaactggaattgtttgggagttaaaggtttgcgtttgtggagcttgtgaaaaaaataattaattggtcatgagattgaggtcaattcgcctttttacttgtcctggttaatagttaaaaagatggtgttagagtcaaggaaaagtcggttgcctgctaagtgacgcatttgcaccaagatggaagctggaaaggcagcttttacctactttttgagaaaaaaaaaagaggacaatcttgtagtggtttgtgcatcagcaaggtctcaggtagcacgcatgatcttggtttgctctagagaagtaagagtacagaatatttcctttttttttcccactctggcccactggttgtattgccaagtaaatagatgggccaatttggttgtttcctgaaatactaaatttgagatgttcttagatcatcaaatttgcccatgtttacatgataactttttagacagtgatttataatgatggataacttgattggtggtactgtgtaaggctgaattttggattagtagcttcttgtcttttgaacagcatgatcgctttcttgatgcagtagtggttcataaatgtgtagctaagatcgtctatctaaacacaaattaatgcactcaatgtctcaattagtccattgtcttacttacatcctcctctg

SEQ ID NO: 6330 - DNA, 2000 bp, Oryza sativa
atacagggctaatagaagcctagaacgatggcgacctaccaactgttgctgcaaattttctatcggcgaagccctttttctcgccggcgaccatcgccttaattagcggatgtgtttggtaggcctccatcgatttatcaaattttcttttccatcaggattagcctcccggtgcatgacgactgcgacctccgagctagtcttgacgtggagatatccggcggcgagacgtgatcggcaggattagaacgaaacgactttgacgagccgtggcgtacggcgtcattagccgacagtccagtttgagaggagaatcgatgtggcaaatacgcggaaaatatcaatttagacacgaattttataagcaaattataggagaacaatacagctccagtactctgtactcctcgctgtgccgtatgattagctgaaataaccaacgtttcaaaagtagtaggaagtgaattcccacgcaaaacacgcagttttttgggatgttaattgcaggcttgtttggaaacttcacacaaattttgccagacgtttgtccaccaattgcagcacaaaaataacttttgtctgcgaaattcggtgtcttctctgcaaaactccgaacaccgacggggccacgagcaccacctcgtggtgggccccgcggcctgctcagcgccacgccttcacctcgcccccgatcgccgcctctcctcgcctcacctcacctgtyccgctgtmcgccgcgccgcccggttcacacggccacacacgcaccgccctctctaaccggaacaacgtagccacgtggccaccgtgtcactgggccccacacggcagcgtcacgcctccctcgcgggtaagatccgaaacctgtgccaaaaaaaaacaaaccccgccccgctttgctttgcccttggccgccccggtccaacggagtccaggctgtcaccgcgagggagccgagcttatcagcacgacgcggccgtgggacccaccgtacacgacgctgacatgtgggccccaccttcggctgacgtcccccccgcgtggaagtagcctagtagggcttgtgcggctgcgtggtggggccgtgaggccacgtgcccggcatgccacggtggagtggacacgcgtcgggcgctcattggctggggtggggcatttctaggggccccgggcgcctcctcgcgtccgcctccccccaaaatttccgacgccagagcgcgaggagacgcacacagaggtattccttcgctcgcgatctctctcctccccctctcgaattttgatctcttcccgtagaattttcgcttcgtgtgtgtgtgtttccgttcgattggatcggtgctggtagtacttgctagcatgatcccccgcgtgatctgtggccgtttggtgggatcgttttccatctgaattctcagctaaaccctgctgttttcgtagcgatttttttttgctaggcgtgctttagtggtaggtttgtctgcacgaatcgggtgggtctctggtggttttgaagtgatctgtgtgcggttgatgtgattttacggagtatggttggatccgtcaaaaacctgagttctgtaggggttctgtggttctggtccatgtttgcttctcagaattttgcttataattttgatttttctcgtcttgatctattgttagattgactctgatgtacagttagctcgggaatactgaagctacgattgcggggcagtaattcaaaattgctctttgaaatgtgctacggtaccaaattcaaaaatcaaacttgagatcattggcttgcccacttgaaacaggaattggatggatttcccaacaatgcatcattttctgtttttkgcttctgaatttatgcctttattctgcatcgtggattactctttaaattgtttgtatggatcctccaaagaacggttagttcatcaccgtttttgttctttgatcttgcagacttggcatttgtagagtttttagatttatagatagcaaag

SEQ ID NO: 6331 - DNA, 749 bp, Oryza sativa
gcttgttgtttcatgtgtttcaaatacttcacggaaaggataagaaaaggagaaatttcacatgtttaagtttcttttgatccctacttgtttcaaagcagcatgaaaataccgtttcagctaatcccgtgcatcacaaaatgttttcatgcttcggctttgactaattcttccgttagtactttatttatgatcatgtctgaatcatgatacctttatgctgtgtagtatgattatgtcacaacaaaagataaccatgtcctatatgactgttaattgcgtgctcttaactctgtgagaggattgcaggagatatgtctgatcagataaagatctctctgtttcaccaaacacatgcaaaattaggctctggcccttgcttcaataggcaaacctaattttactcgcgcgataatctcctggtctcctggctttctagatcttagaatgttttctgaagggaaacaaaccagtactgcctctttatttttggtaatggcgtaattgccgcattaggatgctgcggtaaccgtagtcgtgttgcgcatgtattctcagttaaggaggtagtagtaacacttattgcgtttagacgaagtaatcagttgcttaaacttggttttgatttctgtaattaacatcagcttcttctcttgcttgtgtgcaggtgaattactacttgagtagaagtggtacaagaagagtcgtcgtctacctgtgagcgaattatttcgaggttgtgcgttgcg

SEQ ID NO: 6332 - DNA, 2000 bp, Oryza sativa
aaagcaacgcagttaccggcttaccggagcgagccgccgccgccgccgcagcgcaagcggcccagggcggttcgttccgtgggaggaagactagttttagggcgggattataaaagggggaaggggaggagaaggtccctgtcgctgttgcacccaagccaccacccatttcggsamacccttccctccacttgccgattacttttttgccccccggsgcgctgggcgccttggctttggccctggctttggctccgctgttcttatcttccccactcgtgcctggctctctctctctccctttctcctctcctccaaggtcatggcaaaggagaaataacagctagcgggcttggggaagggaaaacagcaagtgggagatcggcagggagaggtagggagctcgatctcgcctttgcttgcttgctgctatccccttctctttctgttgtgggcttgctgttctccatgtcctcctgttgatggttgcttgtgttcgagtttttttctttttttttctttttttttcttggagaggatgtggttgtgttcatgataggttggtggtctgtgatctgtttgggtagatcttttgtcctctttttcagatatttcgtggatgctagagctgcctgcggtagccaattcctgtttggctacttcttcgttgccctttattcccttccaattttattccgtgattttctgttcttgtgcgtagaattgtttctgccaagcttgagtaaatccatggcagaggtcaaagcttagcttttttcagattatacgatttgctgccagccaaaggagaaagggaaaaaaacttagaaattttctactagttttctcttgttgtgttcattagatctcagagattaacctaatttaaggaatacatgttgtaaatcctgctctggaaatgttaagtggttgggtgtaaggaagcatcttgttttgcatcgagtttatggccaaaaacaatcattgatgcttcctctaaggcggtgtatgttttcctctgttctccatttgatgtgttcttgatccattttcgtctcttgttttcttctgttcttttagatggcctccgattccttttgataagcacatgggtacatgttcttgtttccaacagtccatgccggtcgtggtagaccgaaaaaataatccataaaaatatatcctttttctgaaatgtttttcccgtgcttttctattcctttttcatctcccactttgatctgatcaaggcttgttgtttcatgtgtttcaaaatacttcacggaaaggataagaaaaggagaaatttcacatgtttaagtttcttttgatccctacttgtttcaaagcagcatgaaaataccgtttcagctaatcccgtgcatcacaaaatgttttcatgcttcggctttgactaattcttccgttagtactttatttatgatcatgtctgaatcatgatacctttatgctgtgtagtatgattatgtcacaacaaaagataaccatgtcctatatgactgttaattgcgtgctcttaactctgtgagaggattgcaggagatatgtctgatcagataaagatctctctgtttcaccaaacacatgcaaaattaggctctggcccttgcttcaataggcaaacctaattttactcgcgcgataatctcctggtctcctggctttctagatcttagaatgttttctgaagggaaacaaaccagtactgcctctttatttttggtaatggcgtaattgccgcattaggatgctgcggtaaccgtagtcgtgttgcgcatgtattctcagttaaggaggtagtagtaacacttattgcgtttagacgaagtaatcagttgcttaaacttggttttgatttctgtaattaacatcagcttcttctcttgcttgtgtgcaggtgaattactacttgagtagaagtggtacaagaagagtcgtcgtctacctgtgagcgaattatttcgaggttgtgcgttgcg

SEQ ID NO: 6333 - DNA, 2000 bp, Oryza sativa
agagatttctttggagggttttcaaataaggtataagcgagtgcttgatctgaacaatgaaaacatttaagtgttcatttaaatgcatgcatgtcattttccttttgaattgttgatgagttattggtatagtacattcttggtcatatactgtaaaatgtttaaataatccttttggtttagttctgaatgtttkgtctttacaatagttttttgaaaggaaaatgtttgaagaaccttcaatttttgcaatagttatgtcatatgccaccattttacctttttccttcatgatttaagctatgctttcctggaaatgtttttagatttcccagttagcttcatgtaggaattgtagacttatgtttgttatcatgcaattgcaacttatcaataatttacggaattgcagtctgagaagatggagaaggctaaatcctatccagccttttactacccccagcttccacaatatagccctgaagttgggtacggctttcaatcaataaaccgaactatggcgggaacagcacagtctcctactggcaataaggagagggatctccagaaccctagaagacgtcaatctttcccaccttccggtaacataagtgatacacaccagtaattgctctgatgtatgccttcaaattcatccttctgtgcagaaaatagctgtagagaaatggaaactgggctgtttttatccgtgccccctaatatgagaaactatgcctccctcagatttttttggctagactaacagaaatatgagaatagcccatatcattgacattagatgcagagcatgggaaatgccaatgtggattggcttgtgtgtaacaactgacaaacatgtgctgtgcaattgtgaatactggagttgtacaagtggtatactgtaatactgttatagcatagcatcagaatacaaagacagaaatgaacacatagcatcgatgtctcttttctttatttttttctttggacagcatgccttgaattatttgccataatgtctccgtcccgctggcttcatcacaccttctttgctgggtttagtttcagttcatcgtttggattagctgtttatgaatagagatgctgtttctgtctatgttcactctcagggatgaacatagggcctgcactgtctatgttcaaactcagagaggaacattgggcctgcactgcagcggtgaaatggatccgtgtgttcgcgccaccagaatgagcttggggcgcaatggaacatgtgatgtcagttaaagttgcaggtaaggcagtcaccggtcaaatcacggcactcgccaaccaggccggagcatatcggctctgccgtttgtttgctcctatctgtacgtagcacgagctgttttccattggcaacgcctgatcgatcaaggcgttctactcccctcagcacatgacgccaacgggttgcatctgctgacgacaaatcgctacgcagactccagattttacagctgtgttctgcatcaaccatggggaattggcgacccaaagtgccaaaccatcacacgcaagttgccatgatcgatgcgtgaaccggaaattgatcctctaacttgtccccataatttatgagcctacgtatgagtaacccatagcatagtatcagagaacagtaagtcagataagccttttcgatctgcgaccatcaaaatcgaacaaacggcagcacattttagccgaaacgaatcagagatctgccccagatttgcaacctacacacttgacaatctcaacttggctgcctgcaatctgccattccccttccactgcaacatggagatagccccacccaccaacgcagccaccctacggaaaagcacaccgtaacgccgcccaccaacccccctccgaatctcctccgatcccgacgcctatagatgaataaatctcctccctcttctcactagacaagcccaaaccaaggccaaaaccctcytccctcctctcctctccattccgccgcc

SEQ ID NO: 6334 - DNA, 2000 bp, Oryza sativa
  misc_feature (1)...(2000): n = A,T,C or G
ttgattaacgtctacctatcttttcttattcatgtatttttcttgctccattcaaacaatcatttctgtagtttttacatgtttttctatccataagatttgagtatcagtgtcttaaaatttctgccattttctaaacagtgacaaaaaggcctcctatcattttcctggaccgaaacatttctttcatctcttaacccaatacctttcatgcctctccatcaagcatctgtacaaatcttgttgactaaccaagtccattagcacggtcaccaagaacaacactaaaattaaactgtcattcaagtatacaatacggttaataaataattcagagctgtcaatcaacgaaagtttggcatttttcgcatcaatgattggtggcgagcatcacatggccggcccgaccggtcatgtgtccgaaaacgcgtgaacatgtttataatttaaaagtgtatttgtaaattgtaatcgcaaaaacaaagacacgatgattttttataattattagtaaaaaaaaaaggagagactgactgacacacacacgaccaaagacatggattgattgattttttttagtgcaaagcgatccggatcttgaggtgatgcgctctttcttaattgtcgttccatgcgtgttcaggctcccatattttttttaaaaaaagataataaaaataattccaaaagtttgatttttcggcgtgtttttttggatgtatgcattttcttttttgcgatgaagtttcctatccttttcctttgtgaaaaaagttatgtgttttttttccaaaaggaaaaggaatagaatctctaggttctttttgcctttttcataattggtggatggtatcaagggaaaaagtaaccttttttttatgtgcctgttctaacaggttttatttttgaaagcgactttgtgttgaccgatgaaaattagacacacaacaccaagatttttcttaaactttagccctcttaactataaaattcatgaccaggagtccaggaccacttgaccgctaactcttttttttggtgcaaatctgataacctgtcttagcttaatctagaccggtctcggaaatccaaatatgtctgttgatcgcttccatttttactcaaccagccgctgcccgttggtgtattacgatattctaaagagccgtaatatttttcacaaacgttgaatgttaaaaattcgaaaattatgtacatcctccgcttaaagatgactatgaatagttgaacccacagaaggaggaaagaaagaaaaatctcgagtttgtgaggaaaatgtccaggcagtacttatcaatgaagaaactaaaatctcgagtttcgtccttaacgacgtcgttgacttttcacataacattatactaaaagaacatataatttttttattataaattatcttatcaataaagaaactaacttatattttttaacagggattatctgtaatactgctggtgcagtagcgagaacccccacgtggttccrcntatgggtccggacccatatgtggacccatgtgtcgcctctgctactgcatccgtrgttttgttaaggatatgcatcatatattttatatatatatatacactaagctttaattaaaataaaataatcaaacgttacgtgaaaatttaacgatatcatggatgaggacagaatagtatttttcataataacacaagtggtctcaaagactggtgcagtagagagaagagaatagtgtggtcagtagagaggaggaaaagcctcttgtcgtctctttgacccaacgaccccgccattgctcacctccacctccacctcacctcctcctcctcctcatcccctcgccggagcggccacgccgccgggagggagggagctcgccgcagccgcagccgcagccgcaaccagccagctactgcgtgctgcaacctgggattttcttttttcttttttttcttgtggatttgatctgaagtggaggtgggaggaggagg

SEQ ID NO: 6335 - DNA, 2000 bp, Oryza sativa
gtaaattgaaagtgttttcttttttttcattcgctattattttctttcctactataaagttcagttagtacacggaatacatcaactttttcaaaatttatatcctaatatgtactatgaatatcatacyatttgtaagattttatttgattttcttccttattatcaatttaaatttgaatttagatgaaactaatcmaaatctcagatggtttctactttcgaggctcgtygaaacccttaaaatttaacggaattcgatcgattttcgttggaattgtaaaccctagtcatatccacctaaaaatccattatattttgggatgggaagctggacgaaacgcgaccctagcacgaatctgamsggaraagctgacgacggagatcgcgcatgcgggtgccacacggcccttgccctgggctgcctagtccagataaaaaatacggcacgatacgtacacgtataccgtatatacgaacctacttatacggtacacgcgtcaattaataggagacgaggagagataaacccccccgtattcgcaggctcatcgacttctcgtcttcctctcctctctctcgtttcgattcccccgcgagagattcgatccaaccaaacccacccgctaccagcgtcttctccttcgcgagcaagtaattctctttcctcctcctcctcttcctctctgccgtatttttttttgttttttagtttttttttcttcttcgcttccttcgccgccgtcgcgggttcgtctaaaagtccgccagattcgtcggtcgtcctatcgccggtgggtagggatttcgtcggcgctgctccggtctgctgctttcgttcgttcgttcgatccgatcgatttatttgttcctggtttgggtctcgttcgattgactctagtaaagtctattctttttttcttggtttcctggtttaggttatatggagagcagtatttaggcgtttaggcttcagagatttgtttgatattaggctgatgtcgtgattcatgaatcatgagtagtttcctgcgtttaggggtagcatcactatgcggtactgctgattggttttcctgcgtttgtaggatgagattggcccccttgcagtctgtaggataattgcatgctaatggatatttccacccctaaaatcttcacttcattccaattcaactaccaagtttttttaattgttctcatgaattgcatgctcatggcttgaagacgtcgagtctttcctccttgtttttctttaattgcgactccacctaatctaaaagattcaatcttcaatgcttgctttacttgatggtttgaaattttactgtgctttgtggcgcaaagcggttgactttttagaggtttgttttacctattgcctattcaatctactgtgaaaaaaaaatctagctttatatccatgttgtgattttcttggggtttgagttgttcaatatagggagaggtgcttaatttggtttttttaaaaaaaagtttattgtgtttcctagacaatttagtgcaaggttacagactggtagcttgtaccctagccttggtaggagttacggtttaatcctctaaataatttctcatcgatgtacttgtggactgtctatgattggatgtatcaaggttttaccttttgtgtattatgcaatatgctggtctggttttcttgagcttgtgagttgtgattgtggcttacaacgagtcccttcacatatgtaagatctgtgatggaatgttttagccgcactagcggatagaagaacgggaataaaaataacaaacaagttgggacattatgcatcttatattatatgtttgagtcttttgtgtggagcattcactcaccatagtaagtattctaaacaattaaattcaacctatattaaagaaagaaaatattttagtaaattagtaaatatttattatttataaagcttttcacatgtatgcattaatcttctaaacaggttttttgagagtttgca

SEQ ID NO: 6336 - DNA, 576 bp, Oryza sativa
  misc_feature (1)...(576): n = A,T,C or G
cmmggtgccagaagacgscccararagctggcccntcccgttggatgacgggccagccactctggaaccccaaaagggactatttctgggataagttttttccaggggtctatttatgaaataagtttttcaaaaaggaccaaaatgtgaaaaatccaggtcagtttagggagtcaaagtgatcttattccattaaaaaaaaagggagggaaatatggtccacatccaaacacactagccaacagtttgggccgtacaaaattcccatttccgtcacgactctgactgccctcgctaatccaatttccgcatgttcgtgtacaaggtcgaatccaccaacctgacttctttttcgtcgcatctgcttcagtaagtccagtgccgatcactcccagtctcccaggtcccaaacacttgctagcctatctatatatgcggccacgagcagcactagatttcagtgagcaaagaagctttactcagttagtgtttggtcttaattaaacactggcctcccaattgattaagagtactcagggggagtactgactactgagaatctagcatcgatcaagc

SEQ ID NO: 6337 - DNA, 2000 bp, Oryza sativa
cgaggtgctcgaggtcgtcgagaggagcaacataaacgacgtggtcgcgttcgccgctgcgtttccggcccccgctgtcgctcctgctcgcgagcatcagcaaggggaacgcgtgcgtcgccggtgacgcgctgcacccgaatgacgcctgaccttggccagggcggctgcgcggcgctcgaggacggcgtcgtgctggcgagatgcctcggcgacgcccttctcggcggcggcggcgccgccgagagcgagaggatcgaggcgagtctacgtgagtacgctagaatccggcggtggaggagcgtcgagctcgtcgggacagcctacgtcgtcggcatcgtgcagcagagtaacaatgcggtcatcagctttctgcgggacaagtggttggccggagtgctcgccggaaggcttctgaaaatggcggactatgactgtggcaagctctaaaacgtgggaactcagttttgtacccaagttaataagattacgaaatggattttgtacccatgtgtctgaacaaatgatggaattggattttgtgataaaagctgcctcaaaacatgtatgggtttaggtctaaattttgtggataaggatgggaatctatatttctaggacactagtagggataaggtgttgagcgcaaaaatggaagaattaaaaagtctcagttgaccatagtaggaacaatagtatgactgcttaagttgtagtcacagggattgcacatgaaccaaatcccatcgtaacggtgcaatgcaaccgctatagtaacgggctgtagcacttgatttgcacttttgatctgaaaaagaatggatgagataccatggagtcactaacttgcagtcctagctatggctgcatgtgatctcaatcccgaagcccatacgacttgatgattgggatgaggtttatttgccaaatatagcggggccaacaggagagtaggatcgttggtggtagctaatcctatgaactctctagtgccaatgctacaactgtagctacaaccaggggcggatccagcatgagagcggcggggtctcgagcctccactactgacgtaaagactatgaaagaccccacaaagacccactacattttttttaccatatgtagatgggaggggggactgtaacttatctagtttgctcagaccccactgctatttttttctggatccaccactggctacaaccaccaaccacataggatcactcattaagccattcaactaaataagttaaccaatgaaattgatttgcttgaattggaaaaaggctttggttgatcagcctaaacatatggcttacccatgaggctctaaaactttcactatcagcaagtttgaggacataaaaatgatcaccataccctgggtctgtgctggatgagaccattgtcattttgtcaagtaaaaccttgatgaaggtgcatccgtggcggcagtggttactactcctcctatagttataagacgttttgactttggtcaaagtcaaactattttaagcttaactaaatttataggcaaatatagtaatatttataatattagattagtttcattgaatcaataattaaatatattttcataatttattatctttggttgaaaattttaccatatttatctttaaacttaattaaacttaaatagtttgactttaaccaatgccataacgttttatattcccatttactttttccctggaggctgctatcttgccgcaaaaaatgtgtccaagatattgtaaaacaatgagaaggcacgtcccgttcgacgtctgtccactctcaccggaccgtagtggcgcatcatcatcagcgatgacgtcaaagtgccttcactgctggcctgctgctcactcaccctcgccgtcgcagcaatcatatttaaactcctggcgctcactcgatttgctcacagcatttattctcatctctttcctgcagccaagtcagtttgcattcgcacaaagccagttgcaagc

SEQ ID NO: 6338 - DNA, 2000 bp, Oryza sativa
gttgaatgtcatgtcttcagctactggagaaatagtgcaagaaattgatctgagggcgcaaggcaaacggtgagaactgagaagatatatctgtctactccccttcccccctgtcgtgtgatgcgcacacctgaaaacacctgtgacgcaggggaacccatgaggcacgctgcgtgagccgcaccgcgctgctactggcgttggaggaagagctcccaagaggcaccatccgctactcctccaagatcgtctcgatcgaggaagacggcaacgccaagatcctccatctgtctgacggatcgactctcagagcaaaggtaaaaacacatgggcgtgcgtgctgtctctgtcgatcgatcggttgctgaggaggagatggtggcgatggatgcaggtgctgatcgggtgcgacgggatcaactcggtggtggcgagatggctggggctcgcgaagccgtcggactcggggcacacggccacgcgcggacgcgccaagtacccggacggccatggcttcgagcccaggtttctgcagttggtcggccagggattccgtgcaggcatggtgccctgcaacgacaccgacgtctactggttcttcacgtggtctccttccccagatggtcagtcacctgagctgccaagatccaagtgtcgaacactcgatcggctgcaaggaggacatgaacactgaatcgtattactgattaatgccgtgtcttttgacagataaggatgtcgacaagagttcagccgcgacgaagcagttcgtgctgacaaagctccggagcacgaacgtgccaccacaggtgctcgaggcggtcgarcggagcgagatgaacgacgtgctcgcggcgccgctgcggttccgatcgccgctgtcgctcccgttcgcgagcatcagcaaggggaacgtgtgcgtcgccggcgacgcgctccacccgacgacgccggacctggcgcagggcgcgtgcacggcgctggaggacgccgtcgtcctggcgaggtgcctcggcgaggcgctgctgctccgtaccggcgaytgcgccgccgaggagagtcaccgggtcgtcgaggccgcgctgcgccggtacgcggacgcccggcggtggaggagtgcgcagctgaccggtgcgtcgtacgcggttggggttcgtgcagcagagcgaccaccccgccgtgggcttcctgcgtgacaagctgttgtccggggtgctcgccaagacgctgctcatgatgcccgactacgattgcggcacgctctcgagttccggtgcttgttgacgtgatttgggttttggccgccgcccagctgcaagtctgcaacctgtaatcatatcgtcgtgctgtttgtgatgtttgtctgtatgtgctccgtctgttttactgttccgtcacgtgtcaatgatcccaaacctgtgaaacgctcctttttgtgtgcagaaaaataaagtcgagtgcatttgggtttttggtcggatatcgaaaattcccgtgtcaacccggaggggaatgggcactgcttgcgagcatacctgctgcctcaacaattctttttgggtttattcacaagccgccctcgtggctgtactcgtactacgattctagtacgaaacagccctgacagttcctttgtgccaatcattgaacccgggaatgctggatcctctgtaatcagacttgcgcgcaacgttaccaaatcgatcgagaggactaacatggaccaattgaccaatatttcgatgtgtactagtcatacaagaattcgtgaaagccgccatgttccagtttgtttcaccgctggcatgacggatggacgcgccgcctcgttggaatccggtcttctccgtccaatccaaccacccctcgaccgttttgctacaaaatgaaggcgcatcatagaaaaccctgaactggttcagcagcagtacagccttcgaccatcctcactctgtttccacttgcgagcgacaccaaccgcgggtgggggttcgcgaaca

SEQ ID NO: 6339 - DNA, 2000 bp, Oryza sativa
acgccgtgcgcccgcgccgcatgtggccgtagctgttgcctcgccatcaaatatggcataccccctctcggttctaaaataaacggaactagtatcggatattgagatattgattgatttattttagatcacattggagtatattggtatgtatattggtatggctcagtcacctcggccaataaggttatatgttagacttttttttcatctttcctccctctcaagagaaaaatagtaaatatagtttcttgatgccgattgagttgtatctacgtaacacacctaggtatttctagtcatgaaaagaacattcagaaaatagaatgtggtgtatttatatatactccctctgtcttgtgttgtaatatgtttttggtttgaaattaatttttttaagtttgattaaaattatagaaaaatgtaatagcgtttacatcatcaaatgatttatattaaatccataattaaatatagattttatactatatatttgttttgtgttgaaaatgatgatgtttctcataaacttgatcataaataaataaatttagcttacgacaatcccaaaatgacatgtaatatattctgtctgtaaagtagtgacacaggttttatacactctatagtctatagcttgtataaatctatcatgcattatagacttctagggataaatgaagttaatttttagttaaaaatgtcaacactcgtaaattttgtcttgaattctagtttcttaggagatataggttaagatgcaagattttttgctttacctgtattttataaactttattttgcatacattcctattcaaaaccctatgtgtttccctattcttgttttttggtctccgggcatttcaaaggtgtcttggttttctctaaaattgggctacaggaattcaatctatatgaatttggtgagctcaaatcctctaatcctaaggaaatggataagaaaatttcataggagttgtaaatctcattttctctgttctacacacttaaattaatcatcactcacctaaacgtatgtttcacaaaacagtatcaatatatacaaatcaaatccgtacaagtaatctggaggcttatgtttgtcacaatgaataaataaaatctgataaaactttttgtatattaatcattacggttttttaaaaaataagcgcatggtttgtaatcaaattattgtctcgctactataaaagcatccgaaatctttgtctatcactctatgccgtacaagggaggtgcctttagcaatttctatatgatcctatttgcaactagaccccaccattaatattattaaactaacaaccctatccaatcttaaaaaccatgaaattcataaacaagtacccctctcctgccgttccccacgtccgcacaccatccacctctccccgagtaaaatccccactctacccctcgtcctcccaacacggttcgggaaaccaccacccgttttcgagggcaagttggtctttacacgcgtaccccgtcgtaaacggcaacggccgtgcgccctccgtgagggacgcgtgtccctcatcccgcgaccaacgggctcccgcaaccccgccacgtacccactgcgcacccgggcccagcgcaccgccacgtcatcgtgggccccacctcacctcacccttaaaatcgcccaggtttcctcccgtttgaactcctctcgctccggtggtttgttgttaccttcgctttgcgcggcgtgtaaactgtgaaaaaaaagggaggaggaggagagggcgtcgtctccgccgctcgccggagaatggccgccgccggctccggagaaccaccggagtacgggtgctagtaggctgtggttggttggactggtggtggtgtggtgtggtgcggttggttacttgggggggtggcggtttggcggagatggtgtggttgtagtggttaggattcatgcgatcgatgccgttccagctcaagaacggtcaccaccaccacggcgcc

SEQ ID NO: 6340 - DNA, 2000 bp, Oryza sativa
gcacgaggaaccccagcgtacagcgagctccgagcgaggagatggaggagagggtaggagcggtgcgtgtccttgttgtcgtcgttgttgccaccgcggctgcatggcgtggaggtgraggcgaagggggaggaggscgakgcgtcagagttgcscttcgygggatagttgtccgagctaccaaggaccttcgaggcgatgaccatggtcgccgctctccaacgctctcactgttgtgctcaagcgggcgcatacacgtaccaccgccgcaccggcagcggctgcgtcgaggcgaagcgtcggcttcgagacgaagagggagaaaagagaagagggatgtgtcgcttacatgtgaggccagagcggctcggcctcatagccgcgcggtcgctggcaatggcatcatcatcaacaatggctccagcctgccccctttgtcatcctccttagtcctcatcgacatggacgccctccccgtctaggtgaagagaacgagagatagatgaagagagagagagaggagtgaagaggccctgatacgtggggttcacgctagctcaacactgttgactcgggtcaaattgccacatcggacaaaaccactctgtayactgttatgggacctatattgcrctggttttgagraacccgttgtattggtattacggttcaaggayraaaatcgaacttgctatcaaattaagggaccwaaaatyaacttattcctagatcatgatcaatcatcaggacatgcatgttgggctaaacttgagccaactttcggccatgtctcgtgtttcttgcagtttttcttcttctcgatgagatgatgaaacaatgttcaaagtcaagatgcaagatccgtttaystcgttgcatcgtcgccatctgatataaacgatgaaatgacgcagtgtcaacgtctcagtagtacaagcaggtaggatgtatatacgtgcaagaaagagcaagtttgacaaaaccaaaccagctctactagtatatcatagtaggaggaaagcaaggaccttgccggctgcgtccagctgctgcaagctctccataaacacaaacgctagtagtattttatacctcggarttgcaagttatatccatatcttatttggaataattcaatcttttttgtgtaatatgcttattatatgctccctcaattcaggggtagatctgctggttgactttgcaggaacaggraaaaaaaactaagctctacactctgctagccctgagttgacacaaggtaaattcttaatccctttttcttacaaatgaatcaatcaatgtgaattggcgaaatctccaatcaaaggtgaccaagaaagaaggtaaaaattaaacggataccaaagtttagattgggcttcaaaaccrtaagtttatagtcatactactacctaacaaaagtttgacaaaaattttcagaatatacaataacataagtacgtgtttaggttcagaagcaccatctaatatgcaggcgatgtttggcagctaaggccgtrtttarttgtttggccaaaawwwkttttaagtatacggacamatatttraagtattaaacgtagaytaataayaaaatraattacaaatttcgcatgtaaactaygagacgaatttattaagyctaattaatctrtcattagcaaatrtttattgtagmatcacattgtcaaatcatggcrcaattaggctcaaaagattcrtctcgcaatttacatgyaaactgtgcaattgattttttttcgyccacatttaatgctscatrcatgtrmccaaatatttgatktgacatttttgrctaaaaatttttgggatctaaacacaccctaaatcaaatccatggcagccagcttgcatatcttgtcatttaaaagtgtcttgatttcatgacgtactacgtatataaagttataaacagcacaggaggagagacacaggagcaaacaatcaagcgtgtcaggttgcgacttgtgacaaac

SEQ ID NO: 6341 - DNA, 2000 bp, Oryza sativa
ggtccgatgtgttcttacgtttcagatcgtgtggtcctttgccttttgagacgatgacactagcgtaaagatgtaccggaagctagagggagaatcaagcctgtggcgcagcaatggagccgcgaggcatcggtgacgcaacggagcgcgacttatcgccttttcgaagaaagcacaggaggaatgcgacgttcaactgcatatgtatggatggatagattgcagcttctttgataagcaaacgcttggaagcttgtcctggattcacatacaaatgcaggggcctgctgccgatgctgccgggttgaggacgtgaggtagagcagctgcacactgtaggcagattcagattcagattcagatgcgatagcagaagcgcagaactgaacatacgcacaagagtggtccagtccatgcagcttcagaccgtgcatcagtgcatcatgattgtgttcgttgttggggagattatctgccctgctaattggcgattagtggaggcattcgagacaagttggcctataaaattttcatccatgtcagtcagtaactcatcagggtaatcatcatggaatgaaatcagtagagtagatagatgaagggaatcaaacatctctggttaggctaggcatcagtttaatgcctagggtcaaacaaaccaaacagcacggcagagcaagctaaataaaagaaaatttttaaggagtgcttagagaagtaaccggagttgacacggtacagttggccctccaagtcgtagtagtttcgtatcatcaactgataagcacaggattagtcagtcagcgaagcaaccttgcatctatgcatggcttaattatgctagctcctctgccaactgatccaggactccctctactaggacatcaatcatcacatagatgtactgtacgtagttaaatataattagcaggagattgatgatgcatgtgtaacgtgttgattggataagggaggtcatcagccaatataatgcatgaaatcgatgatcaacatggcccggccggtcagaatgatgagctcatgcgcatacaagtaaatacgttatcctgctaaatttgttgctggtatccggctatccgcatctttgagaaattgtctacgttcgagattgataaacaattaagattaagggcctgtttagatctcttggcaaaattttacgctctgccacatcgaatgttgggacgcatggaatagagtattaaatataaacgaaaaaataataattacacagattgtgcataaattgcgagacggatcttttaagcctaaccgcgccatgatttgacaatgtagcgctacagtaaccatttcctaatgacggattaattaggcytaataaattcatctcgtggttttacaggcgaattccgtaatttaatttgttattagactacgtttaatacttcaaatgtgtatatccgatgtgacacgctaaaactttacacccctccatctaaacacaacctaagtaacgatacggaaatagactatgattaattgagttttaattattatgaatttgaatataaatttatttgctattttagaacaacttctatatagaggtccttattgattgactatatttttctaacaaactaaaactgtttattaaggaataaaattaatttatggttaaaatttatatatgtgttcttagtgacttaaaagtcaatataaaaaaagaactacgttaaatgtatttaaaatcaacttcaatttttttttaaaaaaattaaatttaaatttaaattttggctctgagcaactaatgggacttagaaagtttgtagtttgaaaaacatgctaacaaaaaatcaatgtagaattacaacttaattaggcgtgtgttttgttacttgtatatgggtagtaacatacacgtccctcgtgtaattgataaagtattacatacgcagtattttacattgtactgtatatataatcgcattttaggggagacaatggaacacaca

SEQ ID NO: 6342 - DNA, 2000 bp, Oryza sativa
agaaaaagaacgactatcttctcgatagcttcaatcactgatcaccaaaacatcccaaataacaacccaacaacacatgatatttaataaggttcagctaaaactcaatcctatatgctctgattatgagcgctccttttcaatcaatatagaacctagtcactacaagtccatggctcgccgccatcctcttttagcgtgtgtatactacattataatcatcatagttatattagagcatctctttttgaagggttgctagattacagaatccgattctaactatacctcctaccacttatttcaactacaagtccaattataacctaatatataggactaaaatattcgacaccaatgttagtagtatttattagtatcaacttcatattaagtataatgtggtatttattaattttgaatttttcaaattattaaatcattgataaataataattgagattatcaaccaagtacagctctacctataaaaatttgtcattattggatcatttaaaaaaatgaaaattgaatgatatataagctctacctagaccaggtgcatgatataagcgatgaggcaaaatttagcgatatgtaaagataaaaataatgttacttttctccctgctccttttagcgacggagtcaaagtaaatcttagaagcgttttttagatgaatctgaacgttctactcttgatttgaattagggatgcaagcgggacggacaagcgggttattttagcccgcttatcttacttataattcatttttttcttctaaattttatactagcatgtgggaaatgaactagcaaacgagtttttctacgggtagccggactacctacctacatgcatctctaatttgaatagctagtcgttatcaaggcttggaacctctgagcagaaagggttatctataggcttggcagccatccggccggtcaaaaaccaaaatcagcaccaccaccacgtacgcacgtgccaaagcattctatcacggtcacttggcttgatcgatcctatatatataccagcaaccataattgcacggaacgcacggcttggaatcgcctcactcacgaactcctacgtacgctacacaggccagtaaattagctagacagataacgtagcgtacatgcctgctgatcatatggaaaagaccgtgccaacagttgtycctgctcgacctccmaacagcgagggggaccggaagtcaaccaacttccatcctagcttgtggggcgatttctycctcaacttatgagccgccaaattgcgccacaggtaacatggttcagtgtwaaattttacaattttatcatatatcagtcatttaggggtatattatcagctgaattttcaatttttkgaatatataatatatatcacgatccacatttccatgataatcccactagtacmcmaaagattttcctggacaaggagctcccatttttcctagatggaacgttttcgcgtgcgtctgcaaaattagacttccattttcacgtgcggacccttaaaaggcctgcacgcaaaaatcaattttcgcaggcgggcctcttaacggtccgcatgcaaaaataagcctattttcgcgtgcggacccttaagaggctcgcacgcgaaaatcgattttcgcgtgcggtcctcttaagtggaccacacgcaaaaatacctctgcctcttttccatctcaatcacttcaaattttcaccttctctcttcattttcccttttattctccctcaatcacccccatcgttctctctctgcctttcctctcctcccctccccaccgagcgcacggggcgcgggaggcacctggcttgccgccaccaccaccgatgaggcggcagctgggagcgggcgggaggcggcggggcgggcgaccggccggatctgtgccgcgccgacgacgatgaggaggaggaggcgtccgagagtgttgatgcaaaaaacttgtcgttaacagggagcggcgacgacg

SEQ ID NO: 6343 - DNA, 1918 bp, Oryza sativa
gcagctgggcccacggcagcgggggttggacggccccacctgccagcggcacggacgtactcctccgtaggctggttggtccggtgttggttgtgtgtgtgagagtcaggtcagtcttgtgcggggcccacctggaagattcgccgggcggtggggcccaccggtcaattcctctgtgtgtcaagtgatcctctctctcctactcgtggagagctcgtgctgggcgtggacgcggtccatggaaaaacccgggagtacagcacagtgctttcaatttttatactagaaaaattaaaaaagaacagcataaaagtgagcaaaagaataaagagcgaaaagtgtcactaccgtactacttctatatatttttataagtggctgttactctcacaactaaaaatagtcacgttaaacgtacatgtcaatatatttatgttttcgtatgtaagagtaaagagtatatggtggttatgcaagtggttttattggaaaaattagttgtggtctagtcaactagcgtgacaagatttgggtggggtagacgagtgcatgaaaccgataaaatagcagagtaactagaaatttcttttccatacaatacgtaatcttacatcgcaaggcatacyttttatattttaatgtattaaaatacgtggagcacatgtatgtactatgtagcgaggtatttaagactttaagtatacaatttaacaatgtggtatgacataagaaatgcactaagcaacctaatttgagtatttccttgggcggattagttccaccagaccattactaatcaatcacatatatctatgcaaacgtcaatgtgttgccaataataaattggtataattactcactctcaaaatttaagatatgttagcttggtgagagatactcactttgaattatttagaattcataactgtaacattccattcacggagtctctagctggcaacttgtacgccgatctttttatcagtaatttatcaatgtactaagacatgttttacaactaaacaaatacaactttttagggcccctttgaatcacatgaatgaaaaaaatggaggaatagaaaaaatataggattttgataggaatgcaagtgtaaaactgaggattgcaaaaacacaggaaaaacatataaatgactatttgattgggtcataggaaaaacataggaatttgaggagagataaagactcaaaagattctttccatgaggttctacctcatgttaaatttcctccgaaacttgcatgggaagaggcattccataggaatttcataggattctataggatatattcctttaattcaaatggctatataggaaaaatttctataggaataaaatcctctaaaattcctatgaatttcgtttgaatcaaagggcccttaacgcgatcatgtaacaatgtatctaagcctatagttatcttaaaagtaaaataaattgacaaagcagcagataaaccagacacaaaagacctagtagtagcacaagcgtaacaaccacattcatgattcctccatatttgaactttgaaccgggagagtattttgacctgtatacagtcagagatgtacactactccagtataacagtactagtacactacaccgagaagaaacacgaagaaagatcacccagtccaacccatggacacggtgcagcgagcgcaaaagcaaagcgggtcacctcccccacgacgccaccacgctgccctcctcccctttcgtctccaccccccctcctccccctccctcgcgcatgctccaaaaaaggtgaagctctctccctcctccaccttttcccttcccccctcctcgcctagggtttccacccccaccatgcctcaccccccccgaaccctaacccctaaccctaacctagcctagtgcggcgacc

SEQ ID NO: 6344 - DNA, 2000 bp, Oryza sativa
acttcaagcatgaagcaccaacaaaatggccattacaggtttgcagggactttactgttagcgcaaaatgccgttgttgacttgttgtaaagagcggcttgtcagatgtttttcatttttcacaccgtgctgtaacttggaagcatgacgcggacggactgattattgttacgctgaccaattctagctctagctccgtcagggtcatcaaatgagtggttgctccatccgagaattctgcagcctcatcggttggcatatttcaaatagcatatttataagagataatccaagaaatgtgagttctaagaaatatcatcgacaagtgtaaattctaagaaatatcatcatacaaacgattttgtcctaaaaataccatcgtcattagggttctatccattttgcgccgttaaatacactgttcatcctatagaattttaatatcgtggaatgaatggaaccctaacggcgatggcatttttgggacaaagtcatttgtaagatggcatttcttggaacttatacttgtcgatggtatttctgggatttggatgcttgtcaatagcattttttgaattatctctatttataaataaacattaatttgtgaataaaacttctatacacatgttcttagcgatccaaaagtaaatgctgaaaaataaacttctatgaaaaaaaatcccataatcaagttgaaaattttaatggctgaaaccgcaatgatacaatccgtatattgttatctgagtgagccatcctaaccgtcaacgtgaaactacctctgcctcacactgtcgcacacacaaaaccttagcccacatttaacctgtttcaatcagttttatttaagaaacatgatggttcactggcacttaaagggccaaggcctcatatgttggtccagacccccacattgtcattctcacacaaaaaaaaatatgcttgtgatagtattttatttaaaaatttatccattgtaaacgtgtgtttggattggctttggtgaatgaaatggtatttggtcctcacctcatccccaaaagcatatactaccaaataggagggggaaaaaaggtaaaaatgcagtttctaaacacaccccaaataaaaaggaataatatgaattgacttctcaaaccgagctagaaattaaccgagctggtgtgtttagttcacgctaaaattgaaagtttggttgaaattgaaacgatgtgacggaaaaattggaagattgtgtgtagagaagttttgatgtgataaaaaagttagaattttaaagaaaaaatttagaataaattcggtagaggtgaaaccgagagaaccgagtagttgtacttacacatgagatgagatgagatgagatgagatgggatgggagtgcagtgtacagtaaaatatgtttggtgatgagggggtagagtggtggcagcacaccactggctgagcgcgtcgccacgtgtccacgccatttccaaggcaggcccccatcaacggcccagacgtcagcacgtggtgatgtcaacacccctacccactgtgtcactgacaggccggggcccatcctcctcttcgtcctccacccgccagccagccagcgcctcctcccctctcctccccacgcaacccgatccattcccaaatccctcctctcatcaactcgactctcggtcggcgtcaccggcgtcggaggcggaggcggaggcggcggccgcgtcggcaaggtagtgctgtgctggatcgagtcgagcagctggctgcgcgcgcggtttgtggctctctgtgtgagtccggcgctgctgcttcaattccttcttccccagggcacctcccgtgagccgccatctccctccctcacctacctctggattcgctccagatccgcccatgagtaggcccccacgcccaccgcctgctcgccatcgcgcctccactccaccacaccatgccgatccccaccacctctgacactactccgcccctccccctctctcattccc

SEQ ID NO: 6345 - DNA, 2000 bp, Oryza sativa
cactgcataattaattaattaattaattattagagagaaaacttgagaatggatttatataattttttaaagaaacttttctattttttttcaaaatgtattgtgaagaagtttcggaagcgtgcagatgaaaaaagagtaagtagaacgttgtcaacttgcaaaggttagaaaacacaagtatgaatttatactttataacaaccacattaattttcttaattatcacattactgattattaaacggtggactttaattgtcgtaacacatataaacacaaacgatatcgtctgcgtgcttgatcactcaagcttatacaccatatatttatacaccatgtatgtataagcacttcaaaaagactaagccgatatattttgagattgataaaatcgccggcgcatacgttgagattggcaaagacaccacgagtatttttgctagtgatgtgctactaccgaaagcataattagctgtaattatatatgtatacccacttattacacacttcaaaaatcaatttattggattgaatcaggataaacatttgacatttgttcagatatatgcttagaaacttgcatgttcagatatgtgtttacgctctccttggagagtatgtgtgactttttctttgtactaagctgagtacctagttggttgcaaggagatattaggtaagatcttttttattgggttaattggatccataccattataaatttgcttgttttgaaatataccattacaattcacgaagttagaaacataccattacaatttaacatatattagatatgtgccactgctttgaaagggtaagtagtggcatgtctcaaatacctcacaaattgtaatggcatggttccaatttaatgaattgtaatggcatatttcaaaactgaagaaattacaatggcatcgatccaattaacccttttttatttgtaatattatagtatcatgacactaacataggatcagaatattgtgaaattttagaaaatatatattttatataaaatacataatatgttgtataaattaaagcaaataacattgatttaaataaatttaattgttttatgtaaacttcagcatatttatttaaattattttcaatccaccttatgttaaaataatatttggggcctgtttgacacagcttcagctctagctctacctctcctggagctggaactcagccgaacaatttcagctctacctagaataggagcggagttaggtggagctctctcacaaaatgaacaagagatatagagctgggtttaggcatctccataactccactccagaccaaacttctagagctaaatttagtagttggagctctaccaaacaagcccttggtacgatgatagcgaatttcgcctacttattcgaaaactttccatggtccgcctccgaatcttagtatcatgatgatatataagattttgtagaatcgtgtgaaaattaatactaaaattaagatactttaaaaattaggatacgtgagaacgatatcgtctcaacttggtagacactcataacctatcagcagtgcatcattccggatgtacactacacgtgcaaatctgctatgctaactgccccacaaaacaagcagtacttgtctatccaacacaggtggtctccaccctaaccggattcgggcgcatgcccgtacccccggtcagacccgcaaccgaccactttttccatttaagaaaacgctctgctcatctcatctccacccgttttcctcgtctcgctagtcaaataatccatacatctctctctttctctctctctctcctcaagttgcttacgtggccaaccgcgtgcgtcgccgtcgcctccctataaatatgtacgcacgcgcgctcaccttaccgccaaccgccactcactgtactcatccatcgatcgctagctgcgcacgccactgcggccgcgtccgcctcacctaaccctggcctgctcgatcgccggccg

SEQ ID NO: 6346 - DNA, 2000 bp, Oryza sativa
tctttttctgctctagttactccatccattccaagttccaaattgatctacatttttcataagtacaccaagaccaagaaaaactaataactctctcatactatatttattctagcaacaaactcaatgcatgtactatcccaactattttctagccaatagcaaatcaaaatattgcatgtgggtcataaatacttgtgtgtatggatgcatgcatcaatgcctatttactctaatgcacaaataacgaatagacttaataaatgaacacaaatatgtactccctccgggttgaaaatacttgttgttttggacaagggtacggtctccaaaaaaaactttgatcactattttctattataatatgtataaaagtgttaacaaatatatgatcttattaaagtactttttaagactaagctatatatgtaattattttaaaaatgattcataactaaagattctaaaatttgacctcacccttgtccaaaatgacaagtattatcagcccggagagagtagatcatttaggaataacctcaaaatatctatatgtagattaatttggaatggatggagtatctcgcaaacgatacgaagatatccagtactgggatacaatagtgtaatttaactggtcggatgtcccggtggcttcttcctgattatcctcgctgattacgtcagaaaaataggctggaaaaagcatgagatgagacatgcttacgtcatttgtgcgccagagatatttgttagcccagtaggctttgacggcccagatttgaaaataggcacaactcgcggccgatgggaaagggttgacccaaggcccaccaaacgctgcccctcactgggaccgcggctccgccatggctcgtcgtcgtcgttggcggcggcggcggcggcagcggggcggagacgaggaggaggaagaggaagcgcaggtgaggtggtgtcttcacgcttagtacctagtgatgtcctgttgggcgtcatttcgtttcaccccagcaccaatttcggtttcgtatcgtcttgttccaaaggccaatgcctgcaagttttgtgattcctatgtttctgtgaattattccaatctggcgtaacatccttgtaccgcaagcgagattaccaaacatggttgagataagggactggattgatggaagaagagaaagatcgtataaccggatggagttggggaagagggaagctggagttagttctccgattgttctcttatattgcatatagctcttctcaaaatgtttatttcttctttttagtcttccataatccatggtcatctcgttttttgaaatatttgtttggtttgcgcgaccgcatcttgcggagtggaggttacgttacgttgcttgtatgtcgccagggagcagaagtgtgggatggagaatatagattagtcaggtcggagctgatggtatcatggaagggccgatgattattcagggtacagcaggtaagggactcaagagagacgagaattttgtggtattaaagtgtaccgtggaattggtatggactcaatttttggtccataatataacgatgactgtagttcatctggtcttggagcacaatagtcaaagtcaaaagtggtatgctccttttgtccttcagttgtggaccatgtttctgttgcaataatttgggaaagaagatatactattataccaccatggaagtttagcaggagcacatgtgaagatttaatttggatattgcttgttttctttctataacaagagtaaggtatcgtgtttcccatgttctctcttgtagattcattcctcacaagcaatcttgtttggagagttgatcttccaaggaactaaggtatgaaacttatgcttgagtatgcctcctactagttcaatctactccctccttgcattgaactggcctttttaagttttaacccactacttgctttgatctagattgttacgattgagccgctacctatatgagataggcgg

SEQ ID NO: 6347 - DNA, 2000 bp, Oryza sativa
agaggcgttccaaatcgcatctggaagctggaatctcgacttgcttgtatgcaagtgcaagggcgttggacgaaccagtccgggcatatatgccgccgggccgccaccggcgctgctgctgaatgctgatagtattccaacgtcggaaagcagaactttcacgctttgccttgtcctcccaagtacggctacttggctagtggtgacagttgcttaatgcttaattactacctcgcccgtgcggaaaaggaacaacggtaatctctggttctcgattgtctccttggcaacagggtaaaagttgtcttaactgaataaactgcctgactttgggacaataggtcagtattttacgcggaactaccagcaaaggtctgctaagattcttattctcatccagaacagtggactggaccctgtcacactgtgacactggaacgtcggtttgatcacccggccggccccggctgccccgacggatcaacgacgcactcacgcacccaccacgccgcgcgcttgcaagaaacacgcgaaacgcgcggcggccgtatcacgcgaaattctcagccgagaagagagaaaaacgagtgtccggagccgaccttgcgcggccgggtcgctgtctccgcgggacggggtacgttggcttcgccgagaagaaaacgaatcgaaaaaccaaccaaatccaccaggtgatcgagtccgagtccggaactaatccaccgcggagacagcgaccgcgcgtccgcgccgagggctgtgacgtgtcgaccgagccaagaaccctcgcccacacacacacacaacaggtggaagcggcagccggtccgaaggtctcgggaccaaaccgaccagcgaccccacggcgtcattccgttgggcccacctgtcagcaacgtaattaggagacgacgcgcgtcggcgcccctcacgtggaccaaccagctcggcccgcctggcgcttactataataggcgttgcacacgcgctcggaatttttccaagcccatccagcgccaccccaacccccaccacctcctcttcttcttccctcgagctcagcgcagaacgcacgcacgcggacagagagggaatccccccgttgcttgcgtccgctcgcggctcggagacgagccgcgagcgttccaataccaaaccagagcatcccccggccttgttggatctttccggcgccgcccgcagcgagcgattcgccttcgggcaggtgagatccctagcacccggccgctcctccgtcgatcgatatgatcctctcgggcggtcgggccctgctccgtcgaggcggtggcatatggccatttgaacgcgatttttattggggggtttattatttgcgctggatgtttggggttctgatcaaatggctttgcggaatgtagcgggttttttttttttgggtctggttgtgtgtggttgtccaaagttaccatttgttcatgcaatctggttgtgattggggtggcaatgcttcaaatgtgcaatagcatttattagtgactgatgatccattactgagattgatttgctactttaaagccttctcccggcctaccagtgttgcgtttccatctggtttaggtagggaatcgaacttttcaaatttggttgggtggcccgggtcctgcatgctcaaaggggattgctaaatcctggggtatttgttgctgttgtataggaatccatttgaatttgtaccgttgtaagttttgaggatgggtttctctacctttcaacttcaacggtttgatttttcggtttatagtttacactttggtttatttgaacttttttgaagctatttttataggcctaagttaatattggtgtccgaaattatcggtaagtttttaagagggcatgatattgattgatttggatcatttatggctcatcactggtttagattcttctagagctggtaggtgacgtgattttttagtgaccaatgaacaactgatagctgttgattgttgatcgct

SEQ ID NO: 6348 - DNA, 2000 bp, Oryza sativa
gaaaatttatgctagaattgaaagaaatgaggctactagttaagctaggtccgacatggccatgtgagtgtatcaggcagctctaattctgaggtaagtacctgaaagaggagaaaaggtaattctgagagaaccactagtcaacttctcgatttgtgtagaacttctttcaatttatgtatatacacttaaaatttaatatttttktgtgattcaaatttataccctaatataatataaacattagaaaatgataattctgctttgaattcctggacaaagaaaaataatacagttaagatacttctaagtatgtattcatatggctgggttcgtaatgtactatcgttactctcctttctatctacgatgagacgaacacctgtatcggcgatgtgataaatctaaccatttgtacaggttgtgaccgtcacgaggcaagtactgttcgtgaacaccatttagaccttctttgaaataaaagaaaaatgataggaattgcagaggattttatcctatgagaaataattctagggagacttttgaaacaaaggattgatttctacccattcctttttaaattcttgtgaaatagactattctaaagcaattttgaaggaaaataaacacttatcatgtatctaaaattcatgtgcttttcctgtgttaatcaaatgacagttttagaactactatgtttcaaaatcctctatgaatcaaatgaatataacaatctattactggcttttcatattactgtgttttcccccatcctcgtttcaaatggccttaccattttagtaccatcattgatcgtgcgtaaatcccaaagcaaaatgaaagaaaagaacactagtctagaattttctaaagcatttccttctaagaattgtaagtactcctacatacttcatatacttcatatgttccatattacaagtcgtttgactaagtttatataaaatataatactcccttcgtcctagaatacaacaacctacaaccgaataggacgtatcctaggactattgtttaaattcgtagtattagtatatgtcccatcctagtactttattataggacgaagggagcagtattttcaacacaaaacaaacatatatcaaaatatatgtaattttagatttaataaaactaacttgaccttttagatgttgctaaatctttttataaatttagtcaaacttaataaagtttgattatgggaaaaaaaataaactacgaagggagtattaaagaaaaatggagtagttggtagttcccctcaattgcaggttccttaaaacctagtaaaatattggggtagtttaaaaatgagaagtaggaatcttttctagttaggcgagcaattgacaagtaaaaggaaaaacccgcaagtcaaccgtcctccatctccaaatccaaaccaagggaagaaggaagaggcagctgcacttgtacgaccaaagacggaccgcctttccaatccctcctcatcttcatcatcttcttctccttgtgaattgtcaagaagagaaggggaagaagttgcggtctccgttgctgaccgagagacccgcgtgaaacctgaaaagaggggargggcggagcttcctaagaaattgagaagaagcccactgcccggccatatgtataggaacaaaccatccctcccttgtagtagtagtagtagaagtagtaggagtagtacatattggaagcagctgctgaggcctgagggtaggataggctgcccttgagcctggttttccctcgatttcttcgtcctctgcggcagcggcttcttcttcttcttcttcttgggttgctacctagctcgtactggagtattaaggaaggaatagccggccggcaagaaaagaagctcaacatcatctagctcgtcgctactagtaagtaggagtagttggcaaaatccatccatatatatgatggcaactggcggcggcgatggtcgtcggaggggccggcggaggagcaag

SEQ ID NO: 6349 - DNA, 2000 bp, Oryza sativa
cggtgaattactttgggacaggttacagttagctattcagccagtgtctcaaacccttaataaatgctaatgtttagggcaaatagcacttatcatcaaaactatgattcagatgagatccatcatcgcagcttgtcgccaagaccaccttgttcacttgtagctttttcatccttttccaataatagttgcagatttattcttcaccttgtccctctcatctgctaggtgattcaactcctgtagcagcagatctgtgcaatcctagttcacaaacaatacaaactgcaaaacaatccagatcatgcttgatgaaagcatgctccctgtaattatgaagaaactaattactagtaacatttatgaccattgttccactggtacatgcatgcaagtttgtgtaccataacgtagcgtttttttatcccgatgttgcagactaagttcctactgaggggaaataatcttgtgttgtcttttactcgacatgttgatggacagatgctaatggtgctgaagaggaggctttgcggagagttgtggaagccgaacgtgctgcaacacaggcaggagaaacagctgttcgtctgcgcagtagagctcagcgtctcatggcaaaggctgagctggtggcatacaaatctattatgccctcaggatagatctgagctgctagatatctgactcgtcacggatcttgtttgacgaccctcgactagtgaagaatgtgagtgagatgttcattgatttgtgtgaagagcatagtagccaatagtttgttttcctcttttttgccgcatcatttcaatgctacgtggtatttggctttcgggtaagctgtgggctgtgggtctcttttttcctccccacctgttttaactttgtgaagccaatctttgtagcggatgcttgaactcaactgtaatctcttgtgtacatgatagtggttagttagattgtgtgtatcttttctgtagccatgttttgaaaaagatgaacaaattaaaagcaaaatgaaaatcaggaggaggctaggtaaaacgagtcaactgaatgtatagtggttttcatcctgaagggttttcagatgaaagttactttcgttatgtctacctatttcattacacaaggaaataagtctatttcacctcccttgatatctagctcatgattgaatcgtcttcctcaaccgtaaaaccgggtataacacctccctctctttgaaaataggtgcaaattgactccttaagtggttttgaaaatatgtagcccgctttcttctctcagcaggtggaacccacatgtcagcgagttactactcacctcatcttcttcctcacctttccccttccctcttctctctctgcctcctctttctcgcccttccggcggctctcacgcctgtttctacttcctcattgctggcgcgcawtggcatcctctcgcacatstgcgtgcacttcgactccgcctagccgctacggcaccacagccacatccttatgatcattggcagggtgttcctccgactgttcattgtcgtcgtctccaagggcagtgggccggcggcttcttgttggtgacgccgcacggcatggttgattccgcctgtcctggaagggatagatgaacgccaacaccgatactgtccacaaactcaaccgtaaaaccagatataactcatattcgaagacggagaaagcatctcaaatatggaatgggcttgggcctgcagtcggatagaaagaaactgggccagatccggtccaaaagtggcagctcacgcggacggcaccgcacaccacgcgctccgagctccggggtccggctgtgtgagtcgcaagcgactttttttctcttttcaaacagaaagctctggctcttatcgaaaattaaaaaaagagagagaaataaaaggggatcgatccgctcttgtagttgtagagcgttccattccacttccacagcagtggactcagtgagcaacggaggaagcaacg

SEQ ID NO: 6350 - DNA, 2000 bp, Oryza sativa
gtcgtactttcatactcctttcgatttttaatatttaatagtaccttttacttttaaaaatatatttgaccatttgttttataaaaaatatgtaattattatttgttttgttatgatctgttttatcattaaaggtacttccagtatgatttatatttattatatttttataaaacttttaaataaaatgaatgatcagtccaatagttacgtcaaatattaaaaaccggagacagtacaacacatgcaaagtgaatttgttcaaaaaggaattaacacctttgttttggatacttgttgccagatccatattcaaacttttatcacttgattggcaaattgattaataaagcatgtggatttcaccaaattcaaataataccacaaaatttgttagagagtgccaattaataccatgacttccatttataccacataactagataatgtgtcacttttgccccctttctaactctcttaccttcactttttactcctaaatatcatgtggtattaattggtactttccaaattttgtggtgttttatattttggccaaatctttatgctaagagttgaattctcataaaaatgtgatcctcgaatttttaatagacaacacctttgacttgaaacatatgtttgactaaccatcttatttagaaaatcttgtacaaatatgcttaaggtacaattaatgataaaccaagtaacaacaaaataaattataattatatatttttgaaaattaaatgaatggtcaaacgtatgtataaaagtcaattgcaccattaaaaatcggggagagtatagtataaccacataactttcattcattataaccttactatttaaaaactatgggtgtatttagttctttaggtgtaaagtttttaagtatacgggcgcacatttgaaatattaaacgtagactaataacaaaacatattacatattctgcatgtaaactgcgagacaaattgattaagcctaattaatccgtaattagcaaatgtttactgtagcatcatattgtcaaatcatggcgtaattagactcaaaagattcgtctcacaacttacatgcaaattgtgcaattggtttgttttccccacatttaataccctatgcatgtgtccaaatatttgatgtgacgtttttggtcaaaattttttgggatctaaacaaggcttatataaaaattgaaacggtaatagtagccaatactgataaatattttaaaatggaaaaaatcatttcgccatggtagcgcaatccactgaattccttattccgattgcgtgccttgcctataaatatcacctcaacacctttggttttttaaaaaggaaaaagctgcacgtacatactaacttttttcttactaaattcttactagcacagatgttactaaattcttactaacatcgatgtgtcatgctatgagtgcatctagattttttataatttctatttacctaaatcaaactgttgaaatatgattgttagtaaaaatttagcaagaataatttagtacgtgtaccggtgctcttaaaaaatcacctcaccacgcagtactgtgcagagtgcaggacttctcattttcttactttcttttcttttagggacagagtgcacgacttgacccaacctggagtggagatcagaatcagatcgatcgtcctgaagtaatgtgcagtgcatgtattagaaaattttgaaggtaaaatattrttgttcgcctccgaaaatgtttacggtcaagtccacataaactaacccaaataattaactggattgagtttcctcagatttgccttctctctaacttatgttactgatatgtgggccttttacgcagcatgtacagcaccaattaatcgcagcacaaatgacttccttttttttttcattttgaaacagtccaagattgatcgatccagtgcgcaacattatatagcataatattgcgtgaattcttgatcagcaaactgccggcg

SEQ ID NO: 6351 - DNA, 2000 bp, Oryza sativa
agttaaaagcacaggtcaccgattttcctttgataagtagcatttccgtctcattttgagtaaatgacgttagattttatccgagtagagaaatttatcctcaggctaattaaatttgctctttgctttcatcgtcactgagccaagtgccaaagaggcgttcggcacgggagcaggcatggtggtgtgggtggtgcaagcgcattgcggactcatggcggtgacgcgtgatagtggctacggctcgggagaccgacaagtaggcttggcaaggcggcggtcggcstgggccgcgcagcggcgcaggcacaggagcgagcatcaagcagctgtgcagttcagcacgagatcgagcaggcacgggcgcgtcgtggattcaggcgccgccgcgcggcagtggctaaacgggtacaggaggctggcagcgagtaggctcaccgaggaaaacgaagggcaaaatattctaaggatagattactctacttcagtctaacgtcgtttgttcaaaatgtaacagaagtgttatatatagaagataaatatgtacgacctgtgttttttgatggaagggaaaacttcttgtgctatctttttttaccgggttgtttttttttctatgaattgaattttctctaaatttatagctgggtacactctctcatccagaacacttgatccaaaattaatcagacactcacacaacaaattgttcatcacaaaacactaaattgacgaaatgatttcacatctatattcctacaaaaagtacaccttaaactactaaattgtataccctaaattttagtttataaatccgaagccattaaaaatgtccccttaacccaaaaccacatcaaatgtttttttcacttaggcataattacttatttgtgctaaatctcttccttgcgtactttacatgagtatttataattgagataaaccctttttgctccttaattatggtcttgtccacacatgcaagtctaaattcgagctacaaatgaagaaattaaaataataaattttatctgcattgcacaaatactattcattgtctgattttattatgtttgttttagtggttgttaatcaaatttagtctttgcatgtttgtctatatagatttatgtcatcccaattggtgttactattttttttaacatttctataactatttaaatcacatgtaaataacggctgctatagcacctagttgtagaaaattcttgtctctaccatcttcctctcccttaagcatcgtctacttctatcctggccctcctactttgcccaacactagccgcacccccctyccccaaaaaaaagaaagagaatcattggatctcaatccgatcatcaatattgattgagaatatttcacgactgatttgagcaaatagtaatagattgggaaagtgattttatccctcgagggatatcctcttgttcggtgcatgccacctaaatagtcataaaaaatatgaaataattggcaacatagattaatatgaaatatatcactccacaaacatgcaaatttaaattcaacttctacaagttgtaacaaaaataacaaatatagttgtgaatgtacgataactatttttagtttaatgtactatttttattgcaacttgtagaagttaaatttggtcatacatatttatggagtgatatatttcttattaatctatattgttaattttttttaatttttttaataactattcagatgacatgtaaacaatgaggggaggttccctgtagggataaaaatccacatctataatagattgaggaatggaagggtgagaatgattggatagtacgttgtcgacaaaacaagaatctcaattgttctcatcgactgatacctttcaaattcggcctgaagctagctgacagtggcatttatagatcgcttgggtagagcgtggtatttgataagatactgctactacttctcacagtgatgcatctccatagtcatgcagccc

SEQ ID NO: 6352 - DNA, 2000 bp, Oryza sativa
gcgacaaggcaatcaaccatatctctactctacataaacaaatccggagccgttcacgcgttgcaatttcattaatcgcagttacaatttcattaatcgcagttattcacataggttctggacttctggttccgatgaaagccaggctcgtggtgctcgcggccgccgtggcggcggcggcgttgttggtgtccctggacccccggagcgacgacgtgccagtgctggagatatgggagcgcgacgtcgagcttatcaccgtggacgccggcggcgcggtcgggccgsagagcgtggcgttcgacggcgacggcgarggcccgtacacgggcgtktcggacgggagggtgctcaagtggcttcccctggagcgccgctgggtcgaacactcgtccgccgtcatcgagccacatctgtaagctctttatatctcttatctgtttctgttctgtgaatgaatgctggttgatccggcgattcatcccatagtactgttccctcgttctgcatgcatttacttgcgtgtgatgctactcagatctaagtacagttgcaactcctctcagcaatgataattcttggcatgtgtacttaagtctattattcccctgtcctacagaaagtaaatcaatttatgtagcagagctgccgcatcattgatttgcaatggctttcggcacacttccattgcatatgattcttcttcgataagattgcacgatgctggtagctgaaatctcatagtaataatcatattcactgaaaacaataccacgatgctcaacccgcatccacccaaatactacactatccatcttctctgtcttcatggacggtcaccggccgtcgcctgtagctttctttccttttccaacacacctatggcagcttgattagctaaccaaccaagcgcaaagtatcttgatacmtcatacatgtactgcawctctaacgacatgttatcttcatgggcacatggtagtcttacatttgctttgccaatctactgaaaactcacttatggtctcatctaccttatgctgtttacttttaatggatataattggaagctcttttgggaccatgccaacatattggcgcatcattctgtaagactaacgttctgaaatctgaactaggtagggtaagttcaaataagttatcgccgtgtttagtaccaaagtttttttttccaaacttcaaacttttccatcacatcaaaacttttctacacacataaacttccaatttccgttacatcgttccaatttcaaccaaacttccaatttttgtgtgaactaaacacagcctatgttgagattggttccttttttatgcattttttagtttcttctgaaaaaaaatgttgttttaggtcaacaacggttgtcgtttgtacacgatgggatcatgggatggttatggggcaccgaacttaaaatacacaatgtcgatcttcttttttcaaagttcagagatagatgtccacttttcatacactatctgttctcttaaaagaacgtcttattcaatcgacgtacattacaaagtagtagtagtcatcactatttaacgctgaatagagaagcatctttcaggaatagttgatgttgtacctaagattagcctgctgctcttcatgtaaaattgcagagaatgagtaataagaaactctaaaaaaatgtgaaacatactcgtatttcaggtagtagttgcgagttgcaaccgtgagacaggaacacgcctgtcagcatggacacagtggcaactattggaccgtacactggtcttggatctttctttctctttcaccattaaaattttaatggttgtagatatggagatggcaatgcattaactatcctaccatgatcaataaatcaacacttaggaagttaggatcggtctgcaggtagcataaaaccaacccatactctgcctagtkgrggaacactyccatttgtgggtagctcaccaaaagcctagcttacttagctacg

SEQ ID NO: 6353 - DNA, 2000 bp, Oryza sativa
cttaatctaattcgaagagaaaccccatacatggaatgagtaccacaagatgtataaacagtattcttgactgcagtcaatagtttaactagtcaactttactaaactaccatggtaaaccaaaaggtaattaaattgtggaacttggtacattgatctataaaaaatccttgtctcacccaaaattttaattaaatgaaagagagaagaggggttgaaaccacatgttgaatagtttcaacacttaaaaaatttagagcttctagatctctccttctacatctatctcttacatgtgggaccatgttcttatgggacccatgtgtcatacaaccacagccaacacatcatctgctcatctctcaacatatttttcttttatttctcaaaaggtgagagggagggagatagaaatacaaatcacacctaaactactactactctacctctctcatacacttagaatgtatctacatggacccacttgtcatcgactcatcagccataaaaccttggtgagtcacctctttgaatcctaaattctatttaacaaaagagaagtagagagagagagagagttatgtccaaattacacccaaaacttcaccatacctcttcactcttataggaaacatctacatggggccactaggcaacctctcttcctaaacatgggtgaagtgcatgttaggacatagcttttcaactcataaaaatcatgtccatgccatatcatgccacctctctcccttgccagcacaacaaccactatttggtcaaccacttcaccagctaactctgctcacttccaaggaagaacctagagaaaactccctcggaatctcaaagaacatcctcctcttttctcttagccgaaggtgtttgattcgtcgcaaatcttttctgatgagcttcgcgacattctatcactggaacgtaatcttagacaccatgcctaactcgttcatgtccttkgttcttaattttccatgggtcgaacacctggtgctaagctcatcgtcgccctcggtgtctagagtgttgccgtggattgcgtcgccgttcccgtcgacccatgccatctcagaccgagccactgtgccatgattgttgccaagaccctaggagcaagatcaccgaaggaatcgagccgagacatcgtcgttaaagagatcgagctcttcttgttcaactccgtccgccggccaccgctgtcgattccttaatcccgggtgagcttcagcgcaattcctcactcgtgtagcatcctaccgatttccggtcatttttctcctacgacatgtgggcctttttttacaaatcattctatatatattgctggtgtgctttgttggagtacttgaaattttgtgtgttttcaggctatactcagaactgacctcaaacaaaatgggtttcttcttacggttgtgggctttttcatggagaaaatatcttggactattttccttcagggctgtgggcggtgggccacaaaacatacaaagcccacaatattgtgatcctcagatttgtgagcgcactatgcccgtgaaaatttttgcgcgatccacaggtagtggagggattggagacacgtgtgtggatcgacggacaaaaacatcaaattttttcagccgtttgtcgcatagacagtaaagtacattacatagttcaagtggcggcaaaaccagccgctcgaggccgccgcattgcccgcctacctaccctgtggtttccagccaagcatacacgcatgccaatatgccatccatcccgsccccagaccccagaaccccaacccgcgccgcgcagctcatacaccccagctagcgtggcgcgcccagcccgctccacgtcgccgcgcgcttcccctcctacgtactcctctcccataaatcgacgcgcgccttcatttgctctcctcccgccggtcgagttcgtctctatctgtccaagcggctggtcgatcagcgaccacagacgacgcacgggtctcc

SEQ ID NO: 6354 - DNA, 2000 bp, Oryza sativa
tacgcattgccagcagttatctccgtatcacacaccttgcatgctctgctgcagataaactacagcttgggtgtgtttcgttcacgctaaaattagaagtttggttgaaattggaactatgtgatgtaaaagttgaaagtttatgtgtgtaggaaagttttgatgtgatgaaaaagttaaaagtttgaaaaaaaaaacttagaactaaacaaggccttgatcctaaactaacataatctagagaagaaatcatctgacgaagtgcagtcctctgaaacagctggtacaccgaatcctctgaacatggccttaaacgcaaaatacttctgttgtttacacatggcatagtttgaccaatatctcacatgatgaagcagcagcttggcaatcagaatcaatcttcaatctgatccaacagatcaaaggttgcctcggatgtggccaaaccggatcaaactcgatccgacaaaaccagccacatcatctcctctcgatcaaacagcaagaggatctaaaagctcggcagtaaatttccttgcactcaaaacgaatatcatcacatgacactgaatcactgatgacttgatgaggtcagtagcatcagagctagctggaatcctcctcggtggctgcaccgcctaaggaagacgacgaaatgggcagatactagtacgtacaagcatcaactagcaagtcatcattagctttcacgccaccgcctagttggcaagtggtaagcttggcagtaggagtaggactaggacacagcggcagtgacagttttcgcacgcgtttaagcatcgaatcactcggttaattacgaaaccaacagcatgtaggagtactatattgtgctgtgctgtaaatgtcagtactaatgtttttgttgtgttacaaactctgtgaatacaatctctcaaacgagagactgaaagtcttaaggcagttcgatagtagtgtacaatatttgcatatccatcagagatcgcgtcatgtacagagctctgaaaacaagattggatttgcctgaacatatctaatagcatgtaccagctataaatatattttaatgggataaaccatgagagagaagagtagcgggctacagatctatagctagctgttgcacggattacaagacacactgtgtgtatgacatgtgggaccatacattaatagtatcgtaagttactatcgtatgaattggctattagattgatttaaagctagtagtgggctgtactattagacttgctctgatatgagtagttcgctttggcagtatggcatttgtacacgctcaacaaaaactgtcaattcagatctcggcatgtgtttggcacgggcagacaaattcagacttcagagattcattcatttcagcagcagcagcagcagcaaagaagcaaaaaataagttccaccgccgcaacgggggagaggcagaccacggaggcgggaaagaatgttttccgcaaacgccatctgaaggcgtaaagtatccaagtgcgtaaagtatcaaagatactacagtaccaaacagtacagattctctcgggaattcagcacgattcacctccaattatttttttttgtcagaggccgattcagcatgattccctcctgcccccacgtgtcagtgactcagagcatacactcatcactccatcgcaaaccatcaaaaacttccaaaacccacgaggtttcttttctttttcttcttctttattacttttttgctagtcgcgtcgccatcgctatctcctaccggaatctggaaccctccacgtcatcgccaccgcggcttgacacacactgcccgccactgcctcctcaccatcctatctcgtctcgtctccttctcatccaatctcaatctcaccaacccgacctacagtagcagaatccattataattccgcagtaatccgcacggctccaactctcgatcgcgagctgttgttgttttggtggaagaatcggtccgtgcgtgatttgatcc

SEQ ID NO: 6355 - DNA, 2000 bp, Oryza sativa
ctccgaagtttcacaagattttttttaccattttcataggaaactattcaattattaccaatcggaaaaaacttcatgttcccttataacgcaattcttatatttccttttctatttatctagaattagaacccaacttgggttttcacttttcacaagcgcatgttatagagtaccaccgtcaagagcgttggagcatacccgagtttacttcctccattttcatattaaagtgttttaccgaaaataatatacaaacgaccggagcgtccgacttttggacaacgacgtacgcggcatcagcaacatgctatacgtcacatgaagcctcacgccatcatgtactgtgctgctttgccgtttcgattgtacaccgatcgaatgtagaagttgtacatatagcagggttcgtgttttacaaaaacttctaaagtatttgttattttcagaaaagatctactagcgattttgaaacgagcaatgtctaattgtcaactactctcttatttttcatattataagttattttgattattttcctatttaaatatagaaaaatttaacagcatctaaaacatgaaattagctttattaaaactaatatttaatataaaatatgtttgttttgtattaaaaatattactaaatttttctataaattttgtcaaacttaaataagtttaactagcagaaatagtcagcctataaaagctcataaaatttcaaattcgaaatacagtaggacctaatggccccagctcaccgttggcctgacttgcaagttgcaaccccgggtttctttttttgtaagtcattcattactggaaacaaacagacaattaattaattaataattataattaattaccggagttacttattctaaacagtaaccgactcctttccaacgtgttccccacgaagccggcaacccgaagccaaagccaccgccttccaactccaaatccaaatccaaatcctacttaagttaaaatcccactcccaccacggcaccacgctaagctaaacccacaccacctcgcccaattaaaccctcacccattctttttcttttcaacaattctctctctctctctctctctctcttccgaagggcggagcagttgatcggctccggccaccgccaatccgcgcctccgccgtcgtggtaagatgatccattcgttctccgattcactttccgcgatttctccctcccgcgggagcgatttggttcctgtgttattgatgggtaggatcgatgaggaagtggtgcgattttttggattcgggtttgtgtttctaacgcgtgttggcaatggcgatcgatcgtagactgcgcgacttcggaagcggaatctcgcgggggttcgcggcccgtcggaggccgaggcggaggcggaggcggagacggagaagggaggctgggaggcttcgtcttcgcgcctcctcggatccaatctgtttatatcaattccggtgaggggtctctctgttgcttgtgctgttcgaatcccctggccgaactcgagttcctactcgatttatatttttctcttctttcttttttttttttttgaacttmtacaaatgctgtgctgctgggccattggggttgtwgcaaaaacgawcctggcgcctttgcacgwttccttgggttcgggtgcraaatgcccaaattgttgctatgtggtttgcyraaattgctgctttgagtaccacgattgctcacctrgggtttgatgatttgtttcccctgaatgtgccagggttgaacgcattgggggccaagaagggattataggcgcattggtgtcaagcggtggcccctagggtttccttgttgataggagaccctagggtttgttttttcatcaatgggtcacatccactaattcatagtgcaaatagctgcttctctagtgctggtggctgtgcacttgtgcttgttgcatcagtagctttggctgccttggctgtgttgcttgagatcagcaaag

SEQ ID NO: 6356 - DNA, 2000 bp, Oryza sativa
  misc_feature (1)...(2000): n = A,T,C or G
acaaccgggcacgtgccgtagtgattcgtgctcctcacaccggccgggctactcccagagctacatgtgttaattggcaccaaaatggaccgagcatactcgagcaggccaacggatgaatgtcactagctacctaaaccgtatgtactgtacctatgcaagacaagagaaccctaccataactagttagtacctactcgatccgtctcataacaattaagtttattattaatcatttccatttatcctaaaaaagtttatttttaatatataatcatcgtatgggaatttgtgaaagtatggtatataccgtgtgagtagaaaagaagaggaataaccgcactgagatttgatgacactactacagaattgattttcataaacgagacccctagaagctccaggtgaaccataatggtgttcgcatgcaataatcaatttcctagtgtgagcagcaaacatcttaagaggcatgcatgccaaatagcttattttcataagcgggccattgagtttgcgtagtcagatgtttctctctaccgtagtgagtatgcggaaatgctcctctctctcgtgccattatttttttcctccgtttcctctccctctctcacttctcccctcctcccccgtccaacctctctccctcccacaccctctcctactcctactcctgttaggcctagcactcctccctcctagtactccctttcccacttctactcctggcaacgacggccttggactgttcaaatccctccagtagcatcgatgggagggacggatccggtggcccttccccctcctgtgaggatccgatggcgacggtgacgggaaggacagatcgatctgacgacccttcccaatctcgtgtagctctccccgcctctctgccccccttgcgcgcagatctgccaatgggagggacagatccaatgatttcaagcgatgacggtggaggcttcgacatgacaacgatgatgatagtggatttgggagtgtcgactttggcgttctagggtttttggattttttttttggaattctttttttcatcaaaattatttttgcagacatawgtcttamgcacccgcttgcgaaaatataatttttgtaagcggttgcgctacccgcatgaaagaatattgattttcgcagsancctatatgcaagcgggccacccagacgcttgcgtaaatcgattttgaacgtctgtaaaaatttattatgtagtagtgtacggtgggggtacatagttttttaggttttgtattggtatgtatagaacgagtgaaaaawmarttwawttwakkatkwartgartrgttasttcgccaaatatcaattagtcaattaccattgtccagtagtactaatgagctgcaaccaccagactaatcccctgccgtgtctaggagtactctacatgtaagttcgatgctactgagtactccctctatactaatatatagcaacctaaaataacacattctggaactataaatataaatatagttttattagtatgaatcaatgatggattagattgctacatattaggacggagggaatatcatcgtattcccaagcgttttcaatccgcgggttggtcgacagcaagtacgagtacgcgcgtacgtacgtcgtcgtctgcatgcatgttagaacagtggaattgaagtttccacgctgacaacaaaatgacaagctaggcctggcctggggtagtcattttccaatttccacaggatcgatgcatccattgccattgcatgggatcgaggatggcctgccatggcagctggctagcagcacgtagtaagtacgttatccacacacgtatacgagcagccctgcagccgggtcgtccatgcctaccgcctccatggacgcatcttgcatcaggtgtgggccaaatacgtacgtttttgcaggtgaatgcatagccgcacagtgcgcaccgacgttggaccgggggacgctgctgcatcgagccccgg

SEQ ID NO: 6357 - DNA, 2000 bp, Oryza sativa
atgtcaatgtctaaatcgacaagtaaaacggaacgggtagtagtagcagttatggtgaaatcacgtcacttgcttagataatccagaatttgactcctacttttatttctacgcgtttgtatttaattttgaatttgaactcatgacctgtgaactgtaaacctcaataggaatataggatgacctagtaggcagaactaagtcagcatttttgtttttttaaccacaaatactgactaacattaaccggcgttttttttttgtgaagctatatagggatcataactttaagatcgcccaaagcttaaattagttggatctgacaaaagtggcacggattgctacttcgtttgtcagcttcgtaggatccattgattaattagcctgcgtcagaaagttagctcacgaaaagtgtactccattagctaactttcctttctccaaaagctcgcattacaggacacttaccaagtgctcacaaagtagacaaaaaatttgttggtgtttcgttttttttcctctctcctttttggtgtacctagtttcaaacaggagtaacataattaatttcaaacagaagggaacattattattcwgcakrcrtgtacacggcatktagtagmtacgggcatttagggtacgacttggttgagattagtctagttggtatcgtacctgaagaatttggtacggcaaaacttggattgaactgatgtgtatcttccatccttctgaaagtgtattatcttcaagaagagaattaagattgcttagtggtactgattaagctcgttcttaaagcattatgctgtccaggtacaatgtgttttattatagggatgctaatgtgatgttacataggatccgacttctgcattactgctagctgtgcatgcatgcagctcaaaccatggtctgaaagtctgaaagactgaaactattcaacgagtgaatgcatccatcgtatctcctcttatttcttctgtttttgaatggaccctagttctttttgccgtcatggtgttggttttgagaagatgcaattggtgggttgcttggtcaaatcgaactgagatggcttggaaacccctcaaaaaataatgtacacatggacccatccccaatgctgaaaccaccttccagcctagcattgccaactcaaactaggaactccccaacctcacaaaccaaaggctatgcccacacaacactagtactagaatgcaacaaacaatactagctcaaggatagactaacatattcctcttttccatttttttttgcgaggaattgataaactgacttcactctcattatatttcgtcaatattattggtattcaaaccagcctttacaaaaccacgtggttacctcatgatttaccgtggtaaccatgcacgaccggttttttaaaacctcacattttttttcttggttatctcccgataaacacatggttaccgcattaactgggataccatcaattagcggtgaccctactaaatttgcaagaaaacttgatacaaacttataaaaagtgtatttcgtcaataaccatcatatgcgtggcttgaaactaaatggtcttcaatcagttacacaatataatttcttaccaaccgatatagatagggacatgaatgtaaattaggcttctccagaaacacggagatgataacacacgatatatgattccgaccgctaaaaagacatatagcactaaacagttatataacaaaaccatatggacagatttttcacattttgatgctctctaccgatcgatggtcccaccaaatatgctggaagatgttccatcatcagtgatgcttcttgctggccgggttgctctagcatagctcaacctctaaccgccactagttttttatactcttctctatagccatttaagctctctccctgcagcttctcacaatccaaaaccccaaaaccttctcattttttttgtagaccaagccaagctacagccaaagccaagc

SEQ ID NO: 6358 - DNA, 2000 bp, Oryza sativa
  misc_feature (1)...(2000): n = A,T,C or G
agatagcatatacggtaccctcaggaattcctacctgtgtttataattctacgttataattttgacaaggaatcacacagcgtattaaaaaattgtaggtattgcatggagctcccatgatccgtcattatttgcttctttatcttatgacggaagggtaagtacctgcagcatttgtatgcttatttgaaatatttgtcttgtgattttttaaagccagtttatctgatatctgaatcttgactctaatgatctgtgataatttcctctaatggtcaggttgttttagaatcagtcaagccctacttgcagagaaaatgaagctgcatgttctctccgttgtaagggcacataactccacttctttgctcggtatgttgttgatgcgattaccaatagtaccttctcttgttctaacagaccttcccttttctgctcaagcagacttgtttgttgtgcatattattggtgttgtagattttctccttgccatcctatatactgtactctggtacatggagttgatgcgatggcctgattcgacagcttgtgaccccagaacaatagcaagccaataatgtttcagtaaccatcttggcagaaatccagtgtctcatatgatctgccactcttgtgattcaggccagctgtaattgcaaaattcagcctggtacaattgccaaatactgctcctcgagtgattcttgaatgtcatatatctgagaaaggttggtgtcaattgttgcgttatgtggtgaagtacaaccgatctgaattttgtagaactgttgagattgacaagatctgagcttctgtttttcattcgatttttcactgtatgagtggttcccttactttagcaaagattaatatttcgtctgtatgttacaaaatcattcagggaatgagcaaattaacttcaaattgttttgggcatgagccacctacgaacttgtcatgcgttcaggacggcaggctcacatgctttcagcatttctttttcgcgaagattttgtcgacagtttctttttaaatcatatgtgttcgctgataccccctccgtttcaaaatatttgactccgttgatttttttagcacatgtttgaccgttcgtcttattaaaaaaatttgtgaaatatgtaaaactatatgtatatatgaaagtatatttaacaataaatcaaatgatatgaaaataataaataattacttaatttttttaataagacgaatggtcaaacacgtactaaaaaatcattttgaaacgaagggataaatttgttttagaaaatgatcaaccttttttaatgaaaaaaaacaaatcaacattttgcttgttttttttagtctggtcccatctgtcgccaaaatcctgaacggattgggattcggtgacatcaaatgagaatgtcacgggagaatgtcaccgaatccctcggtgtcacgggagaatgtcaccaaatcccaatccaacccgaacacacgcagacattcacgtttcctccatgtgtcatcaatgatggtagagaaattcgtgcttcaattactccattaaagggcaagttttaaccggaggattacagaaaaatttcgaccaatttgtactagctaatgtgaatacatctcctttacaaatgtacacaaaagtctcaattcctacagaaatcgacaataaatacctgtatccytttttagatgaaatatcttgtattcaaattgcatcgtttaatcgttacagttatatgtgctatgaaaaaaggaaaagaatttggaaaattnagtacaaaatttngcaatacggaaatccagtttaatttaataactgcacttgccgtgacacttggaacagtatcaccttctcgaaagttcaaacccactcatcgaaattccacaagtctcccatgtcgccgccgtctcggcgaccaccccaccaccaccgccgccgctgccgtcgcggcactacctccctagcctagcctgagatctccgggctccggagg

SEQ ID NO: 6359 - DNA, 2000 bp, Oryza sativa
ctccaaaacaagaaaggtggctagtaaactgaattcatagaagggacttctgcactgtgacaatgctctaaactctgaagaatttaggaccagtcactaattactatatagtatatatttaatatacatatatatgtcactccttgctagacacatggatcaaatcccaatgcagccatgccattgtcaatctctctgctctcctcatgtaactgatgaagcaaaacttcagttactgcgaagcttgagttaaacaattaaaatgcaagcgtaacacccgccatagttaagggacgatgacgcagcttttcttggagtgagatcagagtgctcctgcctgctgccatggaagagtgaagcttcatctgcaatcctccgctgatctctccctgtccggcgcctgatgccccggcggcaaccgacgcgtgattctcacggcgccgcgccgtggtgatcagctggtcggtttgagttgagtcaacactgcaaatctgcaaaccgttgctaatttgctatatatgcgagcttgctgatcgatcgatcgttgttgttgcgtcgagtttgatctgtcagagctcggagaagcttgctccaatggcggcggcaggttcttgctccaggttcttcaggcaggtccacgcgctcctcctcaagaacctctctttccaggtaggtgatggtgatgcaaatgctgtttcatccatccacgaatccggttcttgaaatcgatttcaaacttgttcttggatgaagataatgtttggttcttgagatgttaatatgttatcaagagcttgctgaatttttttcgtgttcttgggatggcagaggaggaacgccaaggcgaacgcggcgatcgcggcgttcccggcgctgctgtgcgtgctgctcgtcacgatccaggccgtcatcgacggcgagctggaccggccgccgttccggtgcggctgcgcctgcgtgcgccgcgacggcggccgcgcgggcccgggcccgtgcgcggcracggattgcggcgtgcagcactccacggccacgcaggcgctcagctgcgccgtgccggcgccaccgaggtggccggcggtracgcaggtgccggacgagccgtaccgcgcgctgacgcccgtgcacccggcgaggtgtcgcggcgacggtkgcarcggcgcstcggargcgccgtgcccggtcgccgtgctcaccaccggccagaaccgccggctractgaagktgcatgcaaaccagcaaatgtagtatatttttatgttgttcatgtagctcctctgcattttttctttcgattttttaaatttgttttttctttattgtatgaaagacgcacccatacacgaataatctgacattatgccattgtcataagtgggtttcacccaaatgccgctgtcaaaaagagattcgataaaatgccactatcaatatacggttacacgctagaatattatatgggaccaaattaccctccactcttctcccccctctcagctagtccaaacatttccccttacatgacaagagagaggagaggagagcagatcggcgatgggaccaaatgccggtgggccaacaactagagggagaggtagagtcggtgaggcccaaagtcagcgagatagggcactaaccattagcaagaaagcagaggccacgtcatcggcactcggtgtgcacgacaaggtgacctacactggagtcgatggcgaacctggtcgaggcaatgcttgatgtaggccatccttcacgagccgctcatgcgtagtgacgagaagagaggggtcgcactcaactccctgccgcgatagccagagcttgcctaggtggcgccattgtccccggtgtagagggaggaggcggcgatggccgaagcccgccgaggcgccgccggtatccctagtggagagggaggagaaggtggaggtggcgatggccggagaccaccggggcaccgccgctatccccggtggagagggaggaggaggaggaggcg

SEQ ID NO: 6360 - DNA, 152 bp, Oryza sativa
gcmcammammcccccccccccccccctcacggcggcggcgtgacgacgcagatttggcgggagccagttgaaaatggcggctataaagcccggagacgaaggcgatcgccggtgcagcgtagcttctccccccacctcctccgcctccgacg

SEQ ID NO: 6361 - DNA, 2000 bp, Oryza sativa
cgccgggaggacgcacgcgcgcgcamacgctgcggccgagggccgtggaattctgtcgtgatatctgtgtgtcgcgatcgcggtggtgggctggtggcgtgtgggcgaggcgagcacacasgcccgcagaaaacgaaagggggaagcagccaaagcccaagcggcacggccgtttraagcttgccgccccaaccccacctcgcgcgcgcgcgggggcacgccgyttcgcacgcgctcgcttcagttgctttgcttgcgccaggttgagaaatttgcgcatacatgccgccgcttggcatgccatggcatcatcatgcatgcatgttcttgctcgcggccagtttgcttacgtacggtcgccggtcgcgtgtgctccttagccaccgcggcgctatagccttggctcatgcagctcaggtcgtcgtcgtcgacgtcgccgtctcgtcgaggaggagaccggtacgaaggaaagcaggagtactaatactagttgtttggtacgccggcgagttaatgctttttctgttgctgtttattactgacagacgactgttaatggttcaggtcgcgagttcgttcactgtcgttttgagttttgacgaagctttcttgacagcttcgccttcgcggtctttttctcttccttcttttaccggcgtcacgtataattgcaggttggctcttagtttaaaatcgttcgatcttgctttgaaggtctgattgactgattcttctttgttgactttgtttttataacctttgtcatttcgtaagcattcagggtctgctggtttgcttgcgcgtgagtggcgggactctgcctgtgtttcttgcacggaatgttaaatggaagcgattttttactgtatgttgtgccgactccctccgtccaaaaaaaaaagacaaaccctagtttccgtgtctaacgtttgactgtccgtcttatttaaaaaaaatatgaaaaaaattaaaaagacaagtcacatataaaatattaatcatgttttattatctaacaacaatgaaaatacgaattataaaaaaatttcatataagacggacagtcaaagttagagacgcaaaccaagggtttgcctttttataggacggagggagtatgtgtctgctgtttagttcctgtacactggcttccactgatcatggttatttatttttattggtttccccattactgttgacagttgatgctatctgaaaaagaaattgttttatactcctcccatctcaaaataaatatatttattttaagatagaaggagtaattgtcaacataatcaatctaaaccgtttaatagatatattttatagtaccacctcaaatacttcaactaatgctaggagaatttttttctactaattatttaactcataaataaatgggtgagataaattctatttcttctactagtgattatattggtagataaaaacattaccaaacctccttgcttccttttctgacgaaacaaaaccaagtatacgctatttctctttgccaatcacttcccctttcttttgtgacgtgctattcagttctctttctcaccttcagtttcgtttggctcgctgttcttgtcttttcagttggagcaagagcaagagagaatccaggctaattcaggtgggtcttttttacattatctttctggaatcctcgataccacactgaagataaaaggcagtgattttctttggagaatcacccataaaaatttcatctttttctttgcccctatggatttcttgcactgatccttggcgagagagcgcacttgttcatagcttcgttgcttagcacaacggatgtagaagaacacaagtgaggagctcactagctagcatcatattcgtgctaactcatcctcgtactgaaaaaaaaaagatcttttggtttcaccgacccttcattctctcattcacatgcctccgctggaactcggacacgggggtgaatctgacgccggaaaattctttccgcc

SEQ ID NO: 6362 - DNA, 2000 bp, Oryza sativa
agccatgcggattgggtgtcgattaaaggacgtaaacggatcaatttacgaacccacttatttcagtgctaataaatggataatccgtattatgaggcattgaggctgtgttcgtttgtgtccggtgagaaccatccctttgacacataaaacagaacaacatattaatataatattaattaagtattaaataaaattactttaataatgattttttataattttttaaaagcaacttactaatacattattaattataagtattaaataaaacttctttaaagctgaattaatataatattttaaaagcaacttttttattatatttttatatagtttaactgtttaaaatacgtatgcgcgaaaaaatctaagaacacagccacccaaatatggactgacacgtttacacctttggttaattgcaggtcccctcgtcgggcggcgtcgcggtcgtcgtcggatcggacggcgtacgtgccgcgatatcgatcgatcgattgatatacgtatcgatatcgaaagcgagcgatcggatcggatcggcggtgatggcaacggattgaaccaccgggctttgaattcgcgcggatcctgccatgcacgccacgactgattgatacactacatggatggattgatttgatcgtgtggcatccagaggagatcgggtccagggtgttgctaacccagaagccaggaggttttgtcagactaaaaactaatcaaatcaaatatggccatcaggagaagcgattagtactagtatatttctttaatctttcccagcaaagagccagctgacctttcaggaatgctaatctccgaaggacaaaatcctctcccagatgttggcattgtctggttcacactccgtattgcctttcgggttaagtctccattttttttaatagtaaaaaaccgtgtttcaaacagagacgcctaaaaacaagcgatctgtatcatcagtcaaacccgcactgcagaagagatcagaacaaaacttcttccgaaccaacataymaaygatsrwwsrkaykwkgatatcgacgaatcctatttgaactgaactaaatcagccaaaccggatagctaaatccaagaccaatcaaaagcggattgtgcaatcgagagagaaaaaaaagcagagaagaatcgcacgcggcacccatgcatgcaaatctccggcacgtaaacaactctcggattcgccttctgataccgcgagcagcagcacagcaaccacagcattcaaaagcgaacattcaaaagcgaagaagaagagaggagatcaaaaggccaaaaaaaaaagaraagaararaaraaaaacagcygcgcacgcagaggagaggagaggagaggagaggaggaggcgaaagcgacgggggagagagaggggcaggaacggcttcctttggtttgaagccaattttgaccttaccaaaaattttggtagtgctaaaatcaaatcttgacaagttttgacactatcaaatttaaatgctattgagtttaaactattgtgtcaaaaaattgatagcaaactaaatatacatttgttactattgaacctaccatgaatttggtagggctacaaattggtacgaaaccaaccaagcccgaaaatcccaggcggatcgcggggtggcggtgtctggcgtgtggaccccgcggatcccgtccccggatcgagccgtgtgggtgtgggccccacccgctgtgagggtgagggggggtttactcgatccccgagcctcggatccctttggagatctcgcaggatttctcccatttattttttcttttttctttttcttctttttctaattacgagtcacacgacacgcatatcaccccgcctgtatatatacgccagcgatggctgcgcctccaactcattgcaaccgcaaagcctcttctcctcttcttctcctactcgcttactcaatcgctcgaggattcttggattggattattgggttggattttgagttgatca

SEQ ID NO: 6363 - DNA, 162 bp, Oryza sativa
ccgggcctccccctcaattcccctccaagaagagccgcaccatccagtgcagtagtacactagctcttcttcacaacagctaatcgagtagctagaaccattatatactcttctctcgacgctttctgtgctaggttaaccgatccatcttctggtactgaa

SEQ ID NO: 6364 - DNA, 2000 bp, Oryza sativa
ggcgagacgcgccgccgccgccgtcgttgaggaggacggcgaggacgctccagatccgcaccgctaggtcccgaggatgccgcaaccgcggcgttgggcaggcggtgaggagagcaccgtcggtgaggagcgcgggcaaggatgtgccgccgccgccgcccgccatgaccgctccgaggacggcgacgacgagcacgagccgctccactccagaatccgcccgccgccgttgtcctctcgcgctgccgccgctccagattcgcgccgccgccgtcctcctcgctccgccttctcgtcgccgccgagagattcgcggggacggtgtgtaacgtcccgccttcccccaggccgggtccgcttacatctgatagctttcataggtcatagactgccctcatagaccaacacatatcttttctgcatactttgtcctcactcgtgtgcacccgggaagaatttcccgatcggtcacccatcccaaattgctccaggccaagcacgcttaactctggagttctttggagattggcttccgaaaaagaagttgcaacttgttgatatgagtattctattaatcctattaagccctaggcacgcttaactctggagttctttggagattggcttccgaaaaagaagttgcaacttgttgatatgagtattctattaatcctattaagccctaggccaggatgttacaccctcawcccccttaagagagatcgacgcccccgtcgatcaaccctaggccaggaacgtcctctcttggccacgtcatgtgtccagtggcagcacatgtgccatgctgtgtaaccactcccggtctacaccagccatgcgcaccatgcctgcgcaactgcgacacacgcgcccgtgaaaccgcgagagtcggctctgataccaatttgtaacgtcccgccttcccccaggccgggcccgcttacatctgatagctttcataggtcatagactgccctcacagaccaacacatatcttttctgcacactttgtcctcactcgtgtgcacccggaaagaatttcccgatcggtcacccatcccaaattgctccaggccaagcacgcttaactctggagttatttggagattggcttccggaaaagaagttgcaacttgttgatatgagtattctattaatcctattaagccctaggccgggatgttacacggtgggcaacggcgaccagtaccgccgcgcgctccggctctgtcgggtcggtgggagtgaaagtaggagagggaaagggaaaaggagagaaaggggaaagtgggagagagaataggttggggtggttggtttggggatcccctgttgtaccctgcactgtgagaggtatgaattcgttgtgtatctatcctacgtggcatactgaggtaacgcaaatgaggtgcttgtactgtgaatggcctcacgtgggaactgggaacaacgaagtgaaaagcgagcaactgtgcaagcacggtcagccgagccgaggcaaagcatgcgcgcgcattgcgccttctgcctttcaggctttcaccaaccgcatggcgcgcaccaaccaggcaaccacggaccccgtgcgagtctgcgaccgagcccgcgtccccaaagacgaccacgaaatttcgacgtccacacctgaccctcctcaaaaatatactcattccatcgaacgattcacacatgttgtttgttcgttcttacccccaactaacaccacactcagcttcgtcggactgatgaggagacccagccgtttcgtcgccttggaccaggaaccaatctgaccaagccactcgtatcatatctccaagcctaatataaacccttccactccctccatttctctccaggaagagccacacatcccagttagctcttctccacagctctgaacacaccgctgcctgcatactcctctgatcaatctctctagtatcctcctgctcatttagcacaatcatcagttctctccggccgtctagctaactgca

SEQ ID NO: 6365 - DNA, 2000 bp, Oryza sativa
gtcaatgaagtcactcatggttgcttatctcattatcttaaaaaaaaaaaaggttgcttatctgaagaacgttgaagcagcaacattttcgcagctcctatatgaagaacgcaagtagtaggaggttggtggaggagatttacgaatgacgttgtctgaatgaacttacgggagggcccggaatacccaacaccctgtttggtgcgagcttagttgccaaccacaacggaktaratcgacctggccatcaagctgagttggtcaccatgagttcgttgttaccaaccacacgcaaaaagtgtggataaaaatattaagacagcccttttaaatggacaaaaaataatcacatggacgatgcattgctgtacctgcctcccattgaaccggctctttaatattttcctggttcttaaagtaagaaacgtggaatcttcatggttcaactgtgctcgtgctactcttcgggacaatgtgggagtaaatcattgtttataccaggttctttacgcgcaacatagcgcctgcttaactgcataatacacgaggaaaaaaactaaacaatttgcttcattttgtctgaactctgaaggcttcaacttgctttccttggaagttctctgttggtacagaatcaaatgcggcaacttgagctcaacgcgtctgtaccaaaagagagagagagagagttgcaaacacatcgcttggcttaacgctgaaaatgacttatcataaaagaaaattcatagataattttttatatgtatatttagcgattaaaaatcaatgctaaaaaaactacgaagaaaagccctaaatcaactctacaattaaaattttaaatttaaattttatagctgcataagctgttggccaaaatgcctccgtgtggacgtactacaagctttaagcccattttctgctgctgctgtagtgctgttggccaaaatggccctgttgaggcaattcctccacatctcgcacagccaaaaggtgactgtagtttctgaacggtcttgtttagataaaaaaaaattagccaaaaagtcacatcaaatatttgaatatatgcatgagacattaaatgtggaaaaaaaccaattatacagtttatatgtaaattgcgagacgaatctattgagtctaattacgccataatttaacaatatgatgttacagtaaacatttactaatgataaattaattaggcttaataaatagctcgtatacacacccttcgctctgcagcaattcgcgctccgaataatgaaccgatcacgtcatttcatcgtgttgtcctgatgaccacttgggtcagtcctgcactcctgcagcgtctcggatctcggagtgggtgcatgtgtaaaaacaggacgataccggatcgagcgaccgacggaccgacggaccgactgaccgcgagagaccgtcagcgttggctcagcagaggcctcccgtccacacacgcgctctcgctcgctctctccgtcccaccaacccccgccaaatcccccggccgcgcaagtctccagccacccaccccacacagctacgcaccaccgaggcaacacgcaacgcaagcgccgccgccgaaccaaccggttcccccggctcggcgcctcgccccaatcacaatcctgcaggcagagcagccacgcgagctggccaggtgggccacgcgtcgcgcatcgccgcatggtaagattggtaggcaggccccatccgacggcgagcgtatggtcagctagccaacaaccaaacccccacactgcccctggacgccccttagcccccaaccaccatcacccgtcgccacgctatttaagcgcccgttcccccaccgttcttctccaagaagagcatcagcttccaactcgagctcttcttctacttaaaagaaaaaaaacacgcatatctagtagtactgttctagtgttcttgtacttctattcgtgtgctactactgcatctgtgagtctgtgtgactgtacacatctgta

SEQ ID NO: 6366 - DNA, 2000 bp, Oryza sativa
atattaccgggatagacaaacttaaaaccggcaagaatctatgatttggatttatctccacattcgtttgttttgtacctaaaaaaacctaaaaatgttgttttccttgaattgtgattccgaaataagccaaacaagtcatctaccaatacgtagaacgcatacgcacgtctaccaatacctaaagcgcatgtgcacgtatgtcgctacatctttatattagttatcgaccgttacccccccgcccccactaaagttgttatttgtcggtatctcatcaaaagaatattgcgggatatacaaacttgaaaccgacaagaatctatgatttggatttatctccatgttcatttgttttgtaactataaaaataaaattttgttttctttgagttgcaactccaaaccgagccaaacaagtcgtctaccaatacctaaaacacatccacacatatgtcactacgcttttataacaattatgtaccgcttgaccccctcaaggtttttatttgttggtatatcaacaaaagaatattaccggtatagagaaacttaaaactgacaagaatctatgatttgggtttatctccacattcgtttgttttgtaactacagaaaaataaatttttgttttctttgtatcacgaccccgaaccaacctaaacaagtagtctaccaattcctaaaacgcacatatgtcaactccattttttttataacatctatctatatatcattgtccccttaaaattattatttgtccgtatctcatcaaaataatattaacgagatagacaaacttaaaaccgataagaatctatgatttggatttttacataaggttttccttaattagtacacataaatgcaatacctgctagagtgctggttataatctcttttaacatgatttggagctctgttcttttgtgatccttgcacaagggggagattcttggttgccattttgacagtccagcccgtgtgctggctcacacagtcagcaaatgtggaaaacaatatccaagcaaatgagtctaaaatgtctgttgaagtgttgaggtatatcttctagatatatatcgatctatcaatccttgttttgttttttttattaagagagacatatctatctatctctaaggtgtagtgaccttgcactgacgtgaataatcgcagagcgtgctgctgagtgcgaagagcaaatgattttctcttcttctttttttttgttcggcagagatgcacacgcaataattgtccagccaacaactccggtttccactcgagagcagcctggttttccttttcagggttggtgagatttgtccctccttcactttcctactggctactgcgtgatcaccaacaacagaaaagttttagaacaaagggaaaaccattggaaaacaaacattcttaaaagtgagcaaaagcatcggcaaatgcacaccacaaattcttttttctaaaaaagaggcactttcattcaaaaagtcccaaatttttcatcaggttggttagattactcgtgaacacgacggcggtttcaattttgaaagtcataatcatcgttccgtgtttggaccacgggcaatattatcgcaagaaatagttcgacccatatagaaactaagagaaattatgtgtttcaaatatggcccttcattaattttggccaaatatgataatgtagtgatgttcaagtgcacatgaaaaaaccattctccatggaacaaaaaagtaaagtaggatggaagttatatatcttttttttttatagatccaccatacaagccaccaaccaacccactaggcagagggagaagagaggaaaaggccttacctacctacacccgcccaccccgtccaccgcgccactatttaagcgccccctccgcctccatttccctccaagaagagctcactaccttctcctccggctcttcttcagtatcgaatcctcctcttctcctcgtgcccaccaccaccaccgtagca

SEQ ID NO: 6367 - DNA, 2000 bp, Oryza sativa
aacatgtggttttgtatgatctcaggcccaatctcttttctgaaatgcagagtaagcgcaggactggtgacaaggcaagaggggagaagaaggcactcaaagttaagattaaccttgccagcccggccaaaaaaattaaggtgtgcctcactgaactattgcaagggtcctattttgtacattagggtgtttccatcatgccatacagtacttatttcccttcaataatttctgtaagtgccacctgatgatgcagaaaagtagcaaaaagaagggcaaaaagggcactgttgctggcaggatagggagaaaatgcactctctcaagagattctaaagggcgctttcttccaagagagagtaaggggggagacatcggaggaaatgctacagagagtgaagttgattatgaccgcttcatgaactttcaggcacctgacttcgctaccatcttaagtattttgaaaggctggaaaggcatgaagcaatgtaacaagatcaggcgcctcaaggatcctgacttcgtccctctcatgaacgtcatgagcaacactggatatgtgaccgaggatgatggtcactatgatgtgctgaaagtcttgatgcatgcagatggctggtctgcatagtgattcaagctctcaaatcaaaacattcaggcctatggccttgttgctagaacagtggtttcttctttcacctttaaaacttgatggactttgttccatttatcttagaaattttgttgcccttgagtccggtggatatgtactggagtatgctatactgggtgatttaatggtgataatgttaaatcttgatactagttctacctttttgtatttgcctcaactttctgttttgtcaatctgctggtttgcatgtgtaatgtaaaatctagcagcaatacctaaaatttgcgatcttctactctgaagaattagaggcatgcttatcatggctcttgactgagctggaagttaccctgtctaaatctaggcatgtttgtacttcttttgtcctaaaatatagtaacatataatcgaatagcatgtatcctaaattgctatatttttatatttttagaacagattgagtatgttagaacaaaatagtatatcgagggtgctgagaacttaggatgaaaactatcttctctatagtttagaatacaaacatagattttttttttttcgagggaacagggagcccaggcaattttactatggaagaagagagttgatccagtttataagggaaatcggacctgamaaccttacattggcccggtgaattatttatgaataaccggcgaaaaccctgacatgggtatactgaacataagaatagtaktccaacaaggaaaaaaaaacycctaaaacaaagccttcaagaaacataaraatagtagtccaacaagggaaaaaaaaactcataaaacgaagccttcaataaggttacgccgacagaacgacgacatcgtccaatccaaaagaatttaaggttttcacccggagaattttcttaaagtgaagttgaacgagagctccaataacaacgactttcaaaaaggtgaacggcgtccgagggcgtcgccgttgctagcaccagcatgcagagcaaactttcacctcggaacccccaacaaccataatggaagccaccaaatacaaacatagatctgaatcacttcaattttatttacccacaaagcttatattctgaaaagaaaaaacgctggtttcgatgtgtaaatcgctttaaatttgagtgaattatgactgggagcattaagaagtacatttttttttctgaacgagtttttgtgtgctgctgcgtcatcccatacgcctctgcccggtggggtccccgtgtcagtgacacgcgcaacacagaagaaagacgaactcgaattgctcgagtcgagcggcttcgtcttctcgcttcctccattcctcgccaaaaaccctagcggattccgacgacgaactcgcggcggtg

SEQ ID NO: 6368 - DNA, 2000 bp, Oryza sativa
ctgatcaagatgcatagattttacctcggttttttaagcacttttttaaacgatgtgtttttttaaaaaaaactgtctatacatcagttgatttaaaatatcaaataaatctattttctaagttataataattaaaattaataattatgcactaataattagtatttgagatatattaagatgatgatgaagttagcgcacgcaaaataataaaacaattagggctttacatcggtttccattagtatactttttaaattgttaaacgatgtattttataaaaatgttacttttaattatcatgaagattcattttctaactttataataattaaaacttaattaattatgtgctaatgattttttttttagtgtcctaacttcatcttcaacataaataaacaccacctaaagtttgctttggtccagcccatcttagaagacccatatgatctttacatgacaaaagagtacttgtctcaatttgcatcatcgcagataaatacacccagcttaactgtaatcggagtttagaatttgatggtttttggatcgcggtgtttaccgtttctatgatatttgacagaacagttagttgcaacagttggaaaatacgaaaacaaggcacatcgactcaacatcaagcctggaagttaaccactgcgtatgatgaggatcttatacaaataagtatattttcatctcagttgtatacgatcataccctacatatgattacttcatcaatttcaagatatattgrtacaactggttgattgtgctcgtagagatactatatgaatacgagcgtttatakgggtgagtatgtacgtgtgtatatggatgttgcacgatgtacatgtttcaaaataaataataatttgatcgtaacataatcttttttttagcaaaacaaaatacagatgcagaagctcatgtaaaacgtgcacacaatcacttatataaatacactgggtgattccccgtgctttgctgcgtaaatttctaagtaacttttaatattattttaataatcgagttaacaataaaatatatattagttattaacaataaataaaacaggttatcaaactatgtttaaggagaaatacatttagtagactctatatgagattatagataaaatatgatattatgcactttgtttatatagatgaatatatgttaaggattataaaaatgatggatatatatattaaaaatattgtgaaaaataatgtgaaggaagatgattgaatgttgatttgtagaatttaaagaattatagatgatgttgcatgtttgcataagttttatatgtaattatgctagtggatgatgaggtgatatatttacatgttaagatttatgattaatggattataactttacactaatataggacatgtaacttatgtacagtagagaattttgggcttggtagtcatggcccagcaaattttgggcttaaaacaaatgaatccaagtggcccaagtcccaagagcccaattaataccaaaagtttcagagtactycccaaaatacattcccatgatctgtggaccaaagcactttggagtatagaccccacatgtcagtaccaaaggttcacccattctccgtaaaaagccaaaaaagcgacggctttaactctggtccgtcgttatgcgtacgatcataccattcccattcgccactgacacgtggggcccttcatcgataacgaagcggtgggtcccacctgccggtcaaaggtaagaaagcctcattcgaactcaccgcgtcaccgtgactttggcggcgtggttgtcttctctctcgaattaaataaaaatatttattagaaaatggcagacgcatactccacccacgcgtacaaacagcgagctcctccaccccgcgacgccgcgcgcctccgcccaaaaccctagccaccccgcgtcgcccgcctcggcgcgcccaaaccctagggcatcccggatccgaagctcccggcccca

SEQ ID NO: 6369 - DNA, 2000 bp, Oryza sativa
accgtttccccttttttgtgaaggtagttaatagacgaagagcagggggcatggcaccaccacagggagtgcaccatatgcggcgagcatccgcatactgtaaatgcatgcctttaccctgaaatgactagataatatcataaagaaagtatgatgcctgggattgtcacctacgcgtttattccatcgatatcaccttttgaaaatggctaggggtacggtagaattccgctttctattgtgataatgtgatattcaattgaaaggaattggtatgtgaaataatctgcagctgccacctttgtagcaggtgtaagtcagtagagctcagctgatgtactgatattttgagcatatgcatgcgcaggctctttaccttcctgagtaacctgttctttttactattgaatcatccttggatgcttcaagttggggatgcacctagtatggaatttggtgtttgtttatagccgtatgttttgttgattcagtgaccttgggaccttgcaaactaaggctagcattgttcccttctaacgccttatgttacacgaaaccttcagatgctgtttacaactttcctgggaataacttttttagtgtacaaaatatgttattgtctccaggtattatctactttactggatgtgtttcattgtgtgcgaccttgtaaccacggcagtgtattccttagttgcattattgacaactttatcatgatctgacaaatatcattattgtgtgtgcaccttttgcctcatcatcttggtggatgttttttttttccactggaatattgtttacctgtgggtctatgtgctttgatttgtcattgtcagcatcyccatgcccagttccatatgaaattgcagtcaaaagagttcacatttttttttgcatgaattaaacttggtccgtttttgccagcagcttcatgcttaggtccatgggattgtgtggcaatgtaaacatgtttttttcttctgtttactccttttgaccacaatactaatattatgatttttgagcattgtagatggtctctgcttctggagagtggagactctggttagcatcagtcacttgacccactacaaataatagaagttcctgggatgaagaaccaataactgtcagccacaaccctttgtttgcattcttattacctttgttacttagtctccgctagattatccatctccyttgattgaggttaatcatgtccttttgatccaactggtttaaaagttacaacttttcatctaggtggtgcatttgttattaatttgttaaccacaatccatggcatggtactattcaccttttcttgatacataaaacatttcattcaaaaaatggaagtggatcaggtttacacttttgtcactcacctctcctaggatcttcaactcagttctagcttttccaacctattttttctatcattaccacaaaaagattgccctttacttactggttacccaagtatagtgtcttttgcctatccctacatgcctcatgttttcttcatggctaggagtttgtagtgatatttcaagactagtgcaaatatttcatattttttcttcatgacaaaggggaccttcttaaaggtacatcgtgagaaacaggtggagttctgcgtcacacagcaaagcaaggcaatggataatggaggacagcgtcttgatataatttttaagttttcaacatattatcacatcacattacacttttcaatagaacactactagagggagttccataaattgagacactgtcgtgtccagaaagatagcaagtggatcatcttgcacaggctgcaccgtcgtattggttcagaatctttcaaataaagtcgaaatattaagaagatatgcttctcagaccatgcatcaccacactatataaggggcaaacaagctcccagtatcgttactttgagcccccgcctccccttttgaaataaggttgactgtaattctgcttttgttcgtaat

SEQ ID NO: 6370 - DNA, 2000 bp, Oryza sativa
cgagtcttcgtgcataaggaatgtcggtagtaacgcggttgatgatcgtgtagaatattcgagctgctatcgaagaatcgagtgatgaccattcattagtgattctttttccttgtaaatgattgcgcacatcgagctcaaaagtgactttcctctgttcatttttgtcaacaaagttttcgtgtgtaggtgagggtaagcttagcactcaccgctcagcgcagtgaggaccaaccgaaattgataagggatagtataggtttgtcaagtcagggttctttctgaagatttcatggatgataatgttctgaaagtccggcacggatgcaggctcagtgaccgaacgtttcaagctcagtttcaggtttttcttctgaaactaatacacccggatgagttcggatggaatttccactggagccagaacttaaactacaaggcattaattaatattctatcacatattccttccgtctcagaatatgttacatcctatattaggccccatttgattcaaagaaaattcatagaaattttagaggattttatttctataggaatttttcctacaaagccctttaaattaaaggaatgaaccctatgaaatcctataaaatttatatggaatgcctcttcccatacaagttttggaggaattttaagaagaggtagaacctcatggaaaaaatcatttgagtctttatctctcctcaaattcctgtgtttttcctgtggtccaatcaaacggtcattcctacgttattcctgtgttttgcaatcctctgttttacacttacattcctgccagaatcctatgtttttttctattcctctgttttttcattcctatgattcaaagggacccttaaactaaattattctaggatagacctatccaaattcatagtatcatatctcacactagattaatttattctgagacagatgtagtatttactcgctactcacacaaatataagcatttgtgaggtataagttctccaatatatccaaccaccattcatattgtaaaggtatcaaaattatttcatcttagctttaaatttttcttttgctaaaacttataagattcttctatctacggatggagggtgcatatgagacaacaacatttagctctcttgtccctcaaaccattgaaaaaattacaggctcatcgtttcgtctaattataaatcataacacattattcgtaaaataataatttataagtaaaacttttatatatgtatttcaatactataaataaattatgactctaaaatttaaacttaaaattaaaattttggttatggctaataggctaaagggcaacaacaaaagagagaacagaaaatgatacatttaactttaacttcctcgttttccgttagcacacttttcaaactgttaattggtgtgtttttaaaaaatagtttctatatagaagttgttttgaaaaagcaaataaatccattttgtaattcataatagttaatacttaattaatcatatgcttaataagatttttcgttttgcgtgcaacaaaaatttatctccaaaacagtgagtagtaagtaaaacaaaacagtgcagctgtgcacggctggcattggcaatctaggagcagtgtgcttgcagttttgcactccctggaaagaaagaagaaaaacaagaggaggatttcccccacaagaatagctcaaacctgtctgcatgcatgtctgtctgcactctgcatccatccatccatccatccatccccgggcagacacggattcagacgcgcaagaaatctccctcacctttacttgcaaacatatacccacaaatctctctctctcgcccgcttgtcttgtctgacttcttgttgcctcttgcctccttcttcttcttcttcgtcttcgtcgtcgcgaaatacaggcgtgtggggcgagagtgatcaggtggcagctgggtgtttcttcttcttcttcttcagctcgagttcttccttagcc

SEQ ID NO: 6371 - DNA, 2000 bp, Oryza sativa
ctgcgtgcgcccggccgcctgccgccgcactcctcaccggccacggctgccgtgcagccctccatgccggccaccacccgccgtgcctccccgcgtcagccgcaagccagcccggctcactctgctgcatgcgtgagaggatagaatagagagaggaaagggagaggataagaaaagagaggaggaggataagggaagaggtggttgctagaggataagtgcgagggattatatactatacgctgatttttagtccaaccgggaataaaaagagtggggggcggacactttttctaccgggactaaaaatgatatttagtcccggtttaccataaaatggctgtaggcttttcaactggggctaaagatgatttttagtcctggttctttttggaaccgggaccattgtgattttcagccaacccaacaaagatcagttctctccagtagtgagttttctataatctttataatatttacaatattttgtttaatatgcctgccatatttccttgataatacttctttaaatatgattgtctactcatgtcttgtagtctctatatgagagttgatatgttatctaactaagatatttcaaaattaaataaaaattaactaggtcatattttaaaaatagtgtaagaatataacttttatttacctcaatcttaatatgaacttttctgaaaatttgaaagctttaaatttctaaagaacaccttgtaaaatatacccaaaatatttaggcacttaaacaatctcaaatataaaaaatttcaactatacagttgtagatttcgtcgaggtctataattttagtgtagaacatatctccacctaaggtcgtttgaagaaaaaacaatattttttttctaaagtagatatgagaacttgtaatgaatatttagcccctagaagatatgaaatgaaagaactttcggctataaagttgtagatctcttgactacataaaaaaagttacgattttttttttcatattttaaatggttctctcattttcaagtgcggtactttatatagaaccgccagtataaattgatttttacccacggatttcctatgaacccacctataaaaatgtatttacataagtggtttaaggcattgaggtgacctcaaccattttagcaggcgtcttttctttttcttttggggcaacagtgaaaataaaagcctagcatcgaaaaaatgattattgtaatagtgaaaaatcgtgcatttacatggctactctacgtttcgtttcagtttatatgttttaactttggtcaaaatcaaattgcctcaagattgactaagtttatagaaaaaaatagtaatatttttaaacccaagataaatttactataaaaatatatttaattattaatttaataaaactaatttgttaatgtaaatattgctatatttgtctataaatttaatcaaacttaaagcagtttgawtttawgtmaaraamaaaamatcawgtaactagggagtacgtcgctacatgagcatctatcaaatgttaccgctattgaataactgaaatgttttattcctttcgccccgttgaggcgttgacgttgttggagcatcactgtcaggagctcccgctcatttcattagttaccagggggcgctcgccaatcagagtcgtgattaactttgctaatcataattaaactgcagcgcgatggagagagcgtcgtcgtctccatcggccgtctccccgtaacccgcatttattagtaattttttttggcttggtgcccaagcctgtgactcacaaaccaagcaaccaaccgtactttcttttttatacacgctgccggccgctgcaacgtaatcatatatcgcgtgtagagattctccattctctccacgcgcacatggcgaacgaattgacctgagagaggtgaccgatctatcgatcagagagctagctatggcggcggcggcggcgcraaaggcggcggacggcggcgacatta

SEQ ID NO: 6372 - DNA, 166 bp, Oryza sativa
  misc_feature (1)...(166): n = A,T,C or G
aargganccmaaaasggggssnngmmwsccttgggccsaaaaccccgaaanggtccaaantttccttcccsgaaggaaccttasttggggataaaaggggaaaaaggmccawtccccaaggggttcgggttatcgtcctcgtcgtcgtsgtcctggcccgtaacgg

SEQ ID NO: 6373 - DNA, 1095 bp, Oryza sativa
gtagacccggatgattttattttaacctctcatatcctctttattttaccagctatgaccccggtgaaaacaaatattagaccccggtgacattaaattgttgatttgttgtgttaaattccaattgacaactagaaacgatactggcagcagcaaatagaaaattacctagcatttatgattatacgtcagccgaatatgcatatactttgagtttttgagatttgagaccatgcataaggccagtggctcataacttttcaaattccctagcaaaataatttctataggaaattattttaaaaaccatattaatctattgtctttcaagttttttataagctaataatgcttaattaatcatgtggtaacctcgccctattttgcgtgctgggagggaagggttcagatcccatagctaggtctgaacacacccagattgtatcagggttcaccaattcgatttaaaattagattccaaatatagcaatatggctttttttttaccaaaatttgatatttttttattaatttggtttaattttacaatttcaaatttgaattcttgaaaaactattccaaatttcactcaaaatctacttttgtcccaagttggaacatcgaaattgcgttgttttcaatccgttttgtttgaaaacatagaccatggctagtaatgaccccgacgatcatttatcctggcttcgcccctgctaacacaccaaaagattatctgagaagaagaaaaaaaggcacacaaaaggacatgtggtggctatgatcccaggatgcccaggtgcactgccatttgccaccggcctcagtggcagtggcagtgtcagttcatgttggaaaagcaaagctgtccacgcgtggcgcgccatggcgggaggaggaagacgaagacgaagcagccgcaaccctacacgcctctctcacctctcctctcctctcctctctctctatatatagctctcgtcttcttccacctctcactcactcaacccaagcaacgcgcagcacaccatcaccagccaagtgttcgacagagttcttggcgagctagaggtgtcgaacaccttcaagagaggaggg

SEQ ID NO: 6374 - DNA, 2000 bp, Oryza sativa
tccaagttattaggcccttgttgatttggcggtgggtttagtggcctaataggttgtgtttgtggcgcaatatgattatactggccttgtctagtatcgggaggatatcccctagaaacatcattataagcattaggaatatgtgggggaacttggggattacttgtagcagtagatacaggaggatcaaatgttttaaagtaatgcaaataactagcattagtcattggatctatagcctgtattggaacaattgtgccggtctgaccggcccagggcccggtctgaccggcatcatgatgtgcggtcggaccggcctgagagccagtctgaccgccggggtaatacccggactgaccggccgtcagatcgacggctgtgtcgcggccgtgaacgccgttccgtcggttttactacccgtttgatctataggaggttgattagcagtggtataggctttatcatttaatgtgtaatcatccataagagaaccgagcctattccttaaaaatccatcaactttatccttaaacattacatctaatcgatctttaaaattagccatagatgaatctattgtagatgcaatttgttgttggatagattgtgatacctcgccattacttaccacgtcgggagcgagcttgggacgtggcctgggcttgatgatcacgccttgatgagtcctagtagttgctctcatcaacgcctcccgtgtgagctcgttgatgtactcctccatagctttacgatcttctccttcgaagttatccaatgtgaccggcatcacattagatggctccaccttcgtcttggatggcggcttcgtcatggcgaagtcgaagttgagttgacgatgaacggatctcctccccagcggagtcgccaaaaattgtgttggcaacttttttgacaagtcgacaagcacgatcgcaacacctaaacgccttgcggtgatttggagtcgccaaccacctcgatctagcgaaagggccaaatcaagatgggttttgtagaaaaacagctaaaccggctagcggagccgatttagagatcaaaatcagcctctaggccgatttagatcgatatgaggataactacctgtctcgtgggcaaaacggaaggttttcaggacaaacctacaaagaggtgtcacactctcgcagcggtggcggacggtttacggcgcaaaccgacacccttttcggccgcttgtgataatgcttttccaagtagtgcgggtgcctcgtacgtctggagcataggcctcaggctgatgcatgttggaccaaaatctgcaaacaagtacataaaccagcaccataggactggatcagttcaacgctgtttggatctctggcacacatacacatcgacacacatacagacatcgccctcaattaattttccgttttccagctcgcaatttacgaatgatacatacgatttgtttattcgtctttaaagatctagctgagatataaatctccagtgtgatttccttgctgattggcccataaattcaaaattttctatgaacttacaggtacagaagtcagttatcggccggttcttctctatcagttaacggtgaaaaatgatggttcatgcaactgcaaaaacgaactaagttgtacaagtgtcaaaatctgaataatgccgcttaggcgcttattaatttgtcacgacgaaatctgcaaaagaagacaaaacggaaaacaagaacgaagcagctgttccaatagcactagaaattaataatcaattccagctttttccatttctctgacccaggacattctctttctctccatttagttcttgaaaaaagttttcttggcgtagctaacatgcatcatcagaagcagtacgtactacgtagtccatgcagtacttggcaatgacgccgtctccaaaagtccaaaactcacaagaccttataaatctcgcctcgtctcttttccaagctgagtacgtgcagaaataaccgaaccaccaca

SEQ ID NO: 6375 - DNA, 2000 bp, Oryza sativa
ctctaaacaacgatgcaattaaaaaagaacctatatctgatagataacgattctatctatctacttaaatagaatattggacctaataagcaaaaaagctatagccaaaccgataaaagcgaagttgatggaacctacttccttactggagatcgaacctaaaaatcaaggcggcctaactcaatagtaagccccgaacttgatttccatcgaagatcgaaaagaagagcccgttaaaaggttgacgatgcgctgaaatgttattgtatgtggatgcccatacaaatgctttagggtatatatttataacctcgaattgatacaagtcttaatcgaacactagataagattttctaacaagaaaataaaaataaatagccttgcctacttaagatatgaaatataaaatcgtcttgctaaggccggtgtccatgatttctcttgaatccaaccttatctatgtaaattttcatttatcaattgatttttttctctaatcgaatccaataaagaaccgtacagatttttggtgttaacaataattaaataatatattagtaaaacaattattaataaattaaacaaatcgtcttatatttgtattttatgcaggagtggtatataagaacgataagatgaaatctaatgactcgtttattcgtataacgtggcttcatccaatgacttcttgaatcattaattaaagtatgtacattccttattctttgctcccgtggtaagaattaacttatttatatgtaaaagatcatcattaatatattaaattagacaatctgcccccattcagattttccgtcgtaataatgttatttttatagtacaagagatcatcgacttaattattttattataatcaattaaaaatgtactaatgttcgtcgatatatgttatcgaacgacgtagctagttacaaaagctcatcctactattttcattttacaaggaaattttttataaaaaaaagcaaaaataattagtacataattaattgagtactaaccgtttcaaactgaaaaatatattatattaatttttaaagtaactttttatagaattgttttaaaatacatttcaacagtttgaaaaatatgcgcggaaaaaacacggtatttttttctctgtccctctgtcaaacacaaccaggttatttgatccatagttacactttacaataactatagcatatggcaggaattttgaccaaacagtttaatgttgggtttgttaatgcactttcaataaaaacacaacatacaacttaatgacctcacttgtcatgacaagatacaattccagggcaaagtttggataattatcaactttttagctacaaaagttatagtaatccctccattttactatgtaagactttctatcattgcccacatttatatatatatgctaataagtgggcaatgctacattatgatacggaggaagttatgtgacaacctcgtctaaaaaaatttggcaaagtgatatattcctctatcgctgaataagtgtaattttaacctaaagatgttgtctttagtgtagttttagagtggtccgctagacttttttttaatatgacatatttttctttccatttttagtatcaattaaaccaataataatctcatcctcattgttttcttctcttctttttctcttcgtattaataaatgacatagtaatattttactttttcacttattatatttttgacttgctaaaactataacactactccaccaatcagcccagcacaccaagcaaagacccagagtttggttaaatacattttaattactactccaacaaaaaggtcattgtactaaaaacaaactacggtcccgtttggtaaggttatagcttctaaatttaactttaaaaagttagatttagggtgaagatgtggggctgcctaaacctaaatctatttctttaatttattttataaaaacactctaaccagttataatacatttttaaa

SEQ ID NO: 6376 - DNA, 2000 bp, Oryza sativa
tttgcttccaaatagtgggtaccatgccagggttcgccattcgcgttgagcacggttcacgtgtgcaaccttggttcacaggactatagtcagtgttcctcatatttagatttagtggtgaactccgtgaaaatcatttgctgtgttcggtgaagctcataccaaaatttacgacgcaataacaaacctctcatttgtgccattccgtggaggcaaccgaagggaattaccggtttgtcaagcagtgtggatatttatagaggccgttggatgtagttgtcgcggcaacgccgcagcttcctgtcaattgacaatctttatcactgtttgctttcattatgaagcatgtttctttagtctagttacccttccttttaacaaggatggtacaatgctttcacttattttgtatggcgatgtacttgggattattcccctgatccctgactatctctaataaaaatgttcttgagtcttaaaaaaaagaattcttagttctaaagctgcagaaaaattgaaattttcttgcacaccttaagacaatgttttagccttgatacctgcaagttatgaatttagcccatctttgtagtttatcatggttgactctctaatacttcgtgatggtgaaagctcttccaatatatatgcatggtcttaaaaaaatcataatgacgtatttcacgaaaaataagaagagatggcaaaaatgtatataagactaatatattgcagttgttctattgaaataagaagatctatcaaagctatgaagaaaatttttgtattaacgtttctgcttaaaaaaactttacaatctacttggtctaataaaagttgttatacatccatcctaaaatataataatttttagcattcatttttttttcaaaaacatatcaattccaagttgttgggttctgtatttgagaaaacaaaatcaaaacttaactatttgatgggaaacaccatatgaaatcttgcaaatttcggattggatcactttgaaattcatgcaataccccataaccataacacctcctctcctccctcctcactcctaccgctgccatgacttggtcaagtgagcgctcgatgccccacctcctgtgtcgttgtcgtccaccacactaccacccggctaaactggtggtcgaaaggtgccgacaaggcacccctagcaagcctcttctccctttcctagccctccttctacttaagggcccctttgattcgcagcatagaaaaaacgcaggaataggaaaaacacaggatttgaagtggtaggattttgaaatcctatgggaagagaaaacagaggaaaacataagaagatccctttgatagaggcatagggaaaaacaaatgaatctgcacatcacttcatttccaagaggtctgacctcttttttagtttcctttgaaatccactgataggagtgcaatcctatggaatttatacttgccttttctatgaatcaaagaggcttgaagaaaaaaaatcctttggaatcccattcctccaaaaatcttttagcattcctttaaatcaaagaggccttaagccagattcaccaataccacccgccattaacgttggcccgctatcttccttcatccacgcggctctctagcattgttgcctacccatgtccattatttctcattcatagtcgtatcactgtttccacaacaatccatttaaacccgttgataccctctatccctaaaccctaactttgtcagggcattgcatgttattaaagcttcgttggagtttaaggagaaggagctgagattgtgggagcgcgaatcaccgaagcaaattgtgaagtaagaaatttataaggttttaggcccaagtctaggataacaaccatttatccattaaaagaagtactcagaataaatccccttaatcccaaggggtaccgtgaaaaaaaggagtacggctaaaccctcgcgagtccccactcttcctctccccgttctgcatcacc

SEQ ID NO: 6377 - DNA, 2000 bp, Oryza sativa
ggcgtccatgttgcctgtgtcccctctcctcctagggggccttgtatttatacccataggtgtcccctttccaagtagaactagggaaaccaatatggatacaatccgactagtccttgtcgtttccatgtagaactctattcatcctttcttacgtgaaactcctactatatccgaaggttgttcccgtataagacatggtatgtggtgggtcctgccgagatttagtcaactactattagatatgtggtatcaataaccctgacacacatggtacctacccttagactattacgatcctaacgtttttacagaatcacattacttatcactttgactttggcctatcacatttttaagttgtacagtcacatcttaaatttatgagaattttatccatcatataaatggtgcatccgtttttctcttttgatttaggagtatgtcaaaatagttaataatgtgatttatgaaactttagatcataatacctaacattatatgtcacatattaaaatacctatggttttatataactttggacaatataatactccctccgtcccataaaaatcaacctagtaccggatgtggtcctaaatttgttttttatgggacggagggagtaggtgatagggagtaggtttaatgaaatttaatctttataaaataagtggcccaatattaaactcaaatttcacacatggagaggtcgcatcgtctccttctcgcctcaccacatagcgtctccttgtctccttctcgcctcctcgtcccctcgccttgccaccgcccgagcaagctgccggcgtgccgggcggcagcgaggaaggcggcggcggggctttcctgcggagaccacggcacggtttaggggtttaccgggtctggggctccggcctacaaatctggcgatgcgggaggtagcggggccatgggcggcggtggctggccgggccgcacgcggcggcggaggtggttgggagggacagaggcgcgggagttggcgagcggcggtggctgaaatgcacttggcgcgcagcagcggaggggtcgggaggcagtgcggtggctggtcagcgagatgtcggcggcgacgactcttcgagtgaccgtgggttcaatggagaacggtgacagccttagtgtcgatgcccagtcctcggcaaggaaaggcggttccagcgaaggtggtttcgtagccagcggctacactaggggcggcgacggctttcgagttcgagcagtgacctcctcggttgcggtggcgtaagcgccggtgcaaggtggttcaggtgaaggtggatccagttagtgacggcagccctaggggcggcggaggcctaggagtctaggcggaagatgatatcctctctgaccacggcaaaggacgccggcagaagtggcggcgggctcggagtccgagaggaggaggattctaacgttggcagtgaccctatgggtggcggaggcttaggaatccggcgaagcagatcctttcagctcgcgtctggttggctagttctgagtggacgatgatggatggctagttctgactagacgacgatggatgaaggtggactacccagcggcgcgtggcatcggttcacttgaagcagatgaagatggcaccaatggagattcgcagcgacaatgcactaggggcggtggcgactagacgacttccactcgtcgttttcgactgtttcaagagagaatgttgggatgcagggatgtgtcaaggttgtaggtttttggttttttttgttgtgtgttctcctctttgttgaggtgtaaatctaagtgctcttgtatctttttagctatgtatatccctcgtggatacagagggattaatggaaatccattatctaaagaaaatcaaactcaaatttcaaacccttctccctttccaactctccacatccaaacagcagactaaaacctaaagccgctttctaacagtcgcaaactcgcattagcgcttcgaaatcccaggc

SEQ ID NO: 6378 - DNA, 2000 bp, Oryza sativa
caaacatttttaactttaactattaatagcaaagaaataaaaaatataatcatgtaaaattgatgttactagatttatcattaaacaaactaacataatatgcaactatttttatttaaaacatcttacttttatagatattgtttgtcaaagtagcatctcggagactgtatcaggatcaaaaaatacttatattttaggatggaggggtactatttaagtaatatatctcaaggggatattaaaatccatttttcctaactaacattggttaaactggcccaacaaagaggtagtaggtctggactttgatcctaaccacgttaaggccttgtttagggcccctttgatttggagaaaaaaatatagaaattttggaggattttaatcctataggaaaattttgtatgaagccctttgaaacatatgattgaatcctatctaatgctttgaaattcctatgaaattgacaatcctatagaaattatggaggaaatttagcaagaggttcaacctgaacctcttggtaactttcctttgagtctctctcatccaattcctatgtttttattacggttcaatcaaatggttatttctgtatttttycctgtattttgcaatcatctgttttacacttagggcccatttgaatcacaggaatgaaaaaaatggaagaatagaaaaaacataggattctgacaggaattctagtgtaaaacagaggattgcaaaatacaagaaaaatataggaatgaatgtttgattgggccgcaggaaaatcacataaatttgaggagagataaagactcaaagtattctttccatgaggttctacctttgaatcataggaacgaaaaaacaaaggaataggaaaaacataggattctgaacatgagagagatagactcagaggaaattttccaagaggttagacctcttgctaactttcctccaaaatatacataggattacccattccataggaattttaaaggattggataggattcaatcctttgtttcaaagaccttcataggatttttttttccatcggattgaaatcctccaaaatttctatatttttcctacaaatcaaagggccctaatttcctaaaaaaacttgcatgggaagaggcattccataggaatttcataggattccatagaatccattcctttgattcaaagggccatataggaaaaattcctataagaataaaatcctctaaaattccctgtaaatttcctttgaatcaaagggccccatatattcctatcaaaatcctatgttttttcatattcctacgttttctcgatcctgcgattaaaaggaacccttatttcctccaaaatggcaaaagttttgctgttttagggcactttttgccaaaatagatctcaacactagtagcaaaagtttgtaatttggcatttgtcatttggaagtctagagtaacaaattttggtaaaaagtgtgttggaagccgtgctctctctctctctgcctttactagtaaaatggcaaaactttaccatgcatgtaaacaccaactagcaaaacttcaatgccaaatcttttaccaccaaaacttttttaaaaaaaattatcagaccaaattaatctaaacaggccataagaaaatgtactccgtacatgtagtacagatgatctaggcgtgcgtgcatgcatgcgtggcccgccatggacgcgtccaaagatcgcacatctccagaccgtcaaatacagctagctagtaccagaacagcagagttccctgtccacttcgttgtctcgccccgcggtgggcaggttgcgcgccactacgtactgcccaaccctcgccgcggtatcgtaactcgtaataagaggttgagacttgagacggggagacccaaatcgctcgtgttgcgcctataaatgtcgttgattgccgcatcattacttcacaagttcacatctccatccccatcgagttcttcgttttctgactcttgtcagc

SEQ ID NO: 6379 - DNA, 2000 bp, Oryza sativa
gaatgatgcagtagcaagagatgtaaatggaggaatgctgtaattgattgacattataaagtagatgaagaaattaaataggatatgactatgttggttaagatgagagagtaggtgtagaaatagctatattttatgagaaattttgaatgttaaaagcacctatattttagaacggagacaacaataacactaagtgatcctaagtgtagtgtgtgcgtttgtagggactgttttaaaataaaattggtacacagtggatactacttagttgctgtgtgttgctccaataccaagcaatcaaaagtagtatacattatagatataaatttgcatataaattcaatataaatttacgggtaaggcgtcatattttttttcctttatttagccaggagattaattaagcaaacatatatatagtgttaaaaagactttttttaacggtagtgttaaatagactaagcacatgagttctctgctttttgaggtctttagtctagaagcatccggattggtccaacgtgtttccactgtcatagatgagcatgatgatccaacggtgtattttcatttaccagttcatccaacggtcaatacattgtagatgatgtggcttatcctccttttagaaagcttgttgctttcatatatttagataccaagcccccagagaggggaggacatctaattacaacttgtaagtcatagatacaaaccacactgagattacaccacgaggaagccctacagatagctagccacataatacaacccactgccttgtttctcatgattaatttgtttgcttctcctttatactgaaactaaagtagtgttattacccttcttgagggctcgaacttagtatcaaaatcaatgttacttgtctctttattccatactggtgcatatgttggtatcagttgtacgctacgttcataaagtaccgttgtcgggtatataacatgtcgatacctaactccccgacaaaatcggcaaattaataaaaattcgtcgacgaagccgctgccattggtgcagtccgccatcatccccgacccttcccgtcggtagatctagagagatagatgtgcacgtggcggccgtctccattgctttttgtgccctcctgtggccgcttctatcaaccaatcgaatcccgacgccttcgcctcaaccgcttgaagcagccgtcgctaggaagggagaggggcataggaaagacggagaggtcgcctgaagaaagggaggcaacaggaaagaggccgggagaagtgagagaaagacttagccgccttttctgtggacaatgccttttatatttgattgttattttctcttcaccggaaaggaggcaacaggaatgagggagaagtgagaaggagacttagctgctccttttgtggccaatgccttttgtatttcatcgttattttctcatgtggtataatttttaaagcgaacatcttaaaagcccacctataaaaatcaacctatctataaatataggggcttgaacggagatcgatatatattttcgcatgagggtgattctctataaaatgacttgtgagttgtcagcaacacaagcgtcataggttttctccgagattctaaccagagttttactccattatatcagattagcgacaaacggtaagtcgtcaccgcgtcaggggctcaggacagggacatgatcacaggatcacaaagagcacagtaatataggatccattccctttggatctcatctcacccataaaaaacatgttaatttgttcaaagatcgcacttgcccaaaccttaaaatacaggagcagcactagcaagtggtagaagagttatattccggaggtccacttcgcgacctggcgcggtctcgcccctgcgcctgcgtctgcgcggcgacctaccctcctggccgcgcgtgggcgcgcgctccataaaaaccattcgatccttcactaccgtcactgcacatccttggttttcccagc

SEQ ID NO: 6380 - DNA, 2000 bp, Oryza sativa
gcgccaacgttcctgaccgaaggcctcgccgccggcgccaccggcatggtgtctctcagccgcgcccgcttcgctttccccacgcagctcgccgccaccttccgcttctcccgcaagttcgcgctctgcctcccgccggccgccgcggccggcgtcgtcatcttcggcgacgcgccctacgtgttccagcctggtgttgacctctccaagtcgctcatctacacaccactcctcgtcaacccggtgagcacggggggcgtgtccaccaagggagacaaatcaaccgaatacttcgtcggcttgacgcgcatcaaggtgaacggccgcgccgtgccgctgaacacgacgctgcttgccatcaacaagaagggagtgggtggcaccaagctgagcacggtgaccccctacaccgtgctggagacctccatccacaaggcggtcaccgacgcgttcgcggccgagacgtccatgatcccgcgagtgccggccgtggctccgttcaagctgtgctacgacgggagcaaggtggcgggcacacgcgtggggccggccgtgccgacggtcgagctggtgttccagagcgaggccacgtcgtgggtggtgttcggggcgaactcgatggtggccaccaagggcggcgctctctgcctcggtgtggtggacggcggcgtggcgtcggaaacgtcggtggtgatcggcggtcacatgatggaggacaacctgctggagtttgacctggtgggatcgcggctggggttcagctcctccctcctgttccggcaaacgacctgcaacaactttcgcctcggctagatgtgcaacgcatggcagtcgccactgcagcttagcttactatctcaaaaaaaaaaaagatgctttgcatttctttgtgcaatcgtgtgaagttgttggaataaattgttcatccattacaactagtcaaccagcgtaggcatttgacttggatctacttgttctttaccatatccttgatagtgagaggtggcgtttgactgaaacaacaatttggaatcaattttgctatatattatcgataaattttcttctaaaatattgactgatgtaattatagtacaatcgtaatgtaatttaattttgctatatatttatcgataaattttcttctaaaaatttaatatatataattacagtataattgtaatgtaattacactgtaacttgcatgcaactataatgtaagcatgtaactttcacataattttaaatcgttagatctattcaaatgaagaaaaaaagtcgctgtgtgcacatatgtgtgagggttcgttccacgacctccgtttgacggaaatagcatgttacggagagacttttgaaagttacatacaagctgtatgtaagttacagtgtaattacattataattgtattataattatatctatcaaacttttaagagaaaatttatcgtaaaatgtataggtaatctcaagcacttgaccttactttgtcagcaaatgtaatcaaccgtcgctgcttgtgcagtcttctcccatttcagctcccctcgctccagctgatcagcactggtccagtttagattagttggatgagttggataccatcatctcatcacccatacaacaatggccacccctgcaaaaggctgtgcagatggtttgcctgcctgcatgggtggcccgcaattggtcgagaacaaaggtcgcaattcgcacatgcccagaccgtcaaatactaccagcattttccttgctataacagcagagttccgtttccacttcggcgtctcgtacagtcgtactctcgctcggcccgcgactatacagtctgccctaccaggctaccaccgccatccatcgccgttgtattctgggatggtgattggtgcgagagccgaaataccaaaccgcgcgcgagggtgcgccctataaatatccttcctcgccgctgcaatggttcacaaccccatcggaatatcgcatccttcctctcagaaga

SEQ ID NO: 6381 - DNA, 2000 bp, Oryza sativa
agtgagagggcgagccgacaccggccgacagctgtggagcactgcctccaatcctcatctccgccgagccgtcgtcacccctccctcgccagatccagccttcacagctctatcccaggctcaccgccttccttcccctcgcacaccggcggcgcctcttcttccctccamgcgttggctgccgccacctcctacctccttccgcgcggctgtgccggcgccggcgccagtgccgcctcccttattctgcgcgcctgtcgccgatgcggccgttttccctccttccgcgtgcctgtgccagtgccggcgctacctccttccttcctccgcgcaccggcggcgtggcttttctctacagcgccagccgggcccacttccctccctcgcgccggtgctgccgctaccactgctcgcgctgagagagttagagagagtgagtcaggccaggaaagagagaaagagatgagagagaagtgagggtattttggtctatttgaataacaaattatttttttcttttttctaaagaaactttaaccatgtagagcaattagggtcaaacgttatgttcgatttgaaaaagtagggtcaaatcggtacttagtttatgaaacagggtcaaataagcaattgcccctttttttcctctattcatatgtttctttaagcccacggttcaaaagaaccctaaaccttatattgctatgcaccaaaatttattaacgcaagttcctagtaaagagcaaatctccataacaaaaacatatattagaaaaatctgattacctatctttttatttctcgtatttatacaatttcggcatcaaaccaatatcatattttaactcttttgcctattaatgtactgcctctttttcaaataatttacactaagcatattcatttttaaattttgtctcttaaaatattttaacatgctgaaaaggtaccacattatcaaattgtatggcgtcttaaatgtaaatgtaaaacatggagctctcattcattgtaatatggccctggccaattgagcccaatcaagatagttcggcccatcctagcttttagtccatcacgacacggggctggaccatggcccatatcccatggcatggttggactgcaggctgcagagcccacctcctccgtgcattgcaacctcgcccaaggttggaccaactttgccagcagatgaaccgtcgttatcgcctcgcacgggggacagtggacactgtacaggtgtggtccagttcggttccctgcagatccatggccgcgccggcgagtcggcgtgcacccgcgaccagaagaaaagctgccggcgcacgccccgcgtgccggatcagcggccaactttttactcctctgaacaaaagccccacgcaaaatagacttccttccatcccatggcctcaaggttgtgcccgcccacaaaatcccgcgtcgattatattctccatggagacgacttgttagttgtcggccacgcaaaagtttttcgctaacatgagttttttagttgagattaacgacaaatggttccgcgtcaccgggtcagaggcttatggcaggataagcctgggattgggacaagatcacgtgcgcacagaaaccatttgcctttggatctcgtcccatccatacaaaaatggcaacacccagcatccatgcttagcacgccaacgactagttgaaagatcgcaattcgcacatgaccaaatcataaattaatggaagcgccaaaatagaggagtatatactggatagtcataatagtagaagagtcatagtccggtcaacttcggcgtctcccggctcccgcccgcggctgcgcgtcaccacttcgcatcactcgctgcctcgcacgagtcgcaccgtcgcaagccgcggtatcgtggcagcgaccaacccgtcgcgccgcgcgctataaaaatccttccatgccacagagcttcttgacatcaccatcgatcagtcacatccttcgccttcccagc

SEQ ID NO: 6382 - DNA, 2000 bp, Oryza sativa
aattaattagatttggtagatattgataaagttttttataaatttgatcaaactaaaaaaaagttttactatggaaaaagttaaaaaaaatgaaacggagggagtatattactatggagtaccgtacatcaatccatccttaaaccttttcgcaaaataataataataacatccagaaataagtgtatgatttttatgtaaataaaatattatacaaggaaaaaccaaggtgtaaattagttggcgtgccaactagcgcgcggattttctagtatgtttcatattataagcgcttttttttcaaatcaaacttttaaagtttgaatagtttgtatagaagcatataataacattttcaatataaaataaacttattgttagaatatattaaatgttatatgtaaataaacttggttttgtagaggtttgttaaatttttctacaaactaagttaaaccaaaagaagcatattattaaaagaatagaaaaaggagactccacgttcgctctcatggcctagaaattctcacattaatcggagaaaaagaaaagacagagtccatatagaaatacaatttagaaatagctgaaattcggaataaaaaaataaggaatattagaagatcgaggagactagagtccatacagaaatacaattaggaaataaatgaaattcgaaattaaaaaataagaaatattagaagaggagactagagtctatatagaaatacaattaggaaataactgaaattcggaattaaaaataaggaatattacaagtagagtatggagttcatatagaaatacaattagaaaataatagaaactcggaatcaaaaataaagaatattagaagtagagtatagagtccatatagaaatacaattaagaaaaaaaatagaaattcggaaataaaaaataaggaatattagaaatagagtatagagtctatataggaatttaaaactaactaaaatttagaataaacataataaaattaaaagtagagtttagagtccatataaaaatacaatttacaaataactaaaattcgaaattaagaaaagccatgggaagaagagtttaaggtgaatataggaatacaagtataggaatacagtttagaagtaactgaaattcaaaattaaaaattaaagaatattgaaagatgagtttagagtccatatagaaatacaattagaaataataaaaattcagaaataaaaataaataatataggaatattattaatttacaaatacaatttacagaaaatttgaaattaaaaaaaagaaatatgaaaagacgagtctagagtccatataggaatatactccctccgtttcgaaatatttgacaccgttgactttttagcacatgtttgactgttcgtcttattcaaaaacttttatgaaatatgtaaaattatatgcctacatgaaaatatatttaacaatgaatcaaatgataggaaaagaattattaagtgtcaaaattttttgaataagacgaacggtcaaacatgtactaaaaagtcaacggcgtcaaacatttcgaaacggagggagtatataatttacaaataactaaaatttgatattaaaaataattaataactaacatgtatataaaatataatatgaaaattacacattagtagttttgtaaagttattgcaaaatttaaaattatgttgtcattttaatatatttgaataatataataagaaaacacatatgctattatatgagagaaaatataataatgctagccgcgcaatccgcgggccaccatgctagttacatggaaaaacaatatcaatgtatcaaaagcgatttacaatacgaaaaagagggattaccgttttgcgccacaatccacgttggttgttgaggtttatataagtgttcgaccggtatcgcttgctcacggccaccagcacggcggcagcactcaaacgttcattcaccgcacaacaccacactcgcggactcgcccat

SEQ ID NO: 6383 - DNA, 2000 bp, Oryza sativa
ccgtgacaagacctgcaaagcactgggcgggccgcctcgaggagatgtaggagtcgaggtcgccctaggtgaatgggagtgggaagggtgagtagggcggcggaggacctgttcacccacaagccccccctcaagttcaacggctactagagctcaactacagcaatgagttatccatcggatccggcaatgacggccacaccaaggtcgtggacgtcaccacgccaggtggcggcacgctcaccggcagatcacatcccagcggcggcggggacggaggttacggcgagggcgaccacggctatggaggcatcagcaagaacaatagcggaggaagcggttgtgcgtgctccaagtgcggtgagaagggccacatggccacgaacatctcccagggcggcggcacacaggaggagtacaacgggtgacgtcctcattcggcacggcctcgatggcagcaacggcggtggtgggatcacctttccactatgtctgggtcaacgaaccccaactcgacatcgtccatggcgctggcgttgttgtcgtcgtcctccaccgccttgcccctcgcctgtgccggcttgctccggccacgctgctctgcttagctgacctgctccggccacaacccaccttgctccacccaggcgagagagaggatagagagaatagggatgacatgtggagccaaatgggccccaccaatttttattattgtgtcttctatgatcaataggaggagataattgatcatatcctcattgcgtgctcagaatccctacaattctagtgaaaggtgcttactaccattggcccgcccgaactgcttccccgtggcgcatacctcattcatgagctggagggatgagagtcgtccgaagattgtaaacaacctcaggagagggcatttggcaaagtggtcactcttgcaacctagtcaatgtgaaaggagcacaacaatagagtgcttaatagcgaagctcagacctagagcaaggtggctgcaaccgctacggaagaggcaaccttatagcgagtgactgggcttctgtcctagctacccccttctgccggtcgttcttttcttttagttacgagcgataaccatctagcactctttctttctttcttgccgtttttcctctctgcttgtaacgcgtgatgtaaaattttcacaatcttaataaaaaatacgtcagtcgtataaaaaaaaggcaaagtatgcgtacatgtgttcatagatatgaatatatgcatattacgagtgtatactactttgctcagccaaaacaactccggtttgaatagtcaaatgtgcccaataaaatctgccacgagaaattttaatcacaataggtaggctgtgttaagttcacaacaaaattaaaagtttggttgaaattggaacgatatgacggaaaagttaaaagtttatatgtgtaaaaaagtttttatgtgataaaaaagttagaagttcggaaaaaaactttagaagttaatacggcgaatgactgtatcggaaacagatcccctcgcgtggtgcagtttgcaggggatcctcattcgactgtatcctatcctgtgcattcgtgcctccttcaggccttgtttttccacttcgctgggcttgggcgggcgaggagccgaggaggcgtgcacggctggctttataagccccgaaccccgagccctcgagcggtttacgcgttggactccccccctctcacctcgccgccgcctcctccatccatccaatctcccacccccctctaaacccgcacgcgaagcctagggtttcctccacctccaaacccccccaccaccctcccttcctccgatcgatccgcctccgaggtaatccgccgcgcccctctcctcctcctcctccgcgagctagggtttcgtcacttttgctcagatttcttctgtgcccggttgcaggggcatcggcgtcggcggcggcggcggcggaggcgagcttgctgttgttgttgtgtggg

SEQ ID NO: 6384 - DNA, 2000 bp, Oryza sativa
ggaacatcccaccattgtgtaggtatttcttcctcaatagctcaacacacaaactcttatcaggggattcaatcttaaacaactatttagctagtaaagcagtgttcagtattctagtttcagtaagccccagtcccccaaactctttaggggaaagctagatcagaccacttcaccatgtggtatttcatgccttgtttatttcctagccaatagtatctaccactaattaagtcaaagttatgatgtaatcattcataaagttgatagaaacccatagcatatgagggatagaggataaccatgcattgatgtgtacaactctacctgcatgtgaaagagtattatcagatcaaacacctaatttcttctccattttttgagctaagaaggacggtatgcaaattaaaacaatcgaaaatcatgcacaccttttttgctttcgtcatcatgtatctaaaatctctattagagcaagtttaatagtatagccaactacttgcttcaaatcatatatagtcgatttaatagctaattcatacaatagttacatataacatatagtacacaattaatacctagattcacttatcataaacacatgtatcttggagcccatgctgtagctggctataaatctgtagtctactgctcttctctcttctcttttattttcttaaaatatgtttatagctggcttatagtctactattgctcctgctcttatattcttagagctgatcagcttgagcaggagagcaacatgaagggtacagtgcataaatatgaatccacgaaaagtataggaagaaaacttcagtgccatgagggaccccatatggggccatgctatacagctgaaatgtgcatgcctttaaacattcacagtaatcaacctcttagaatatattccaccaaaaactattatctcctcgacggttgccatgattgtacggacatgcatgtatatatagtgaaacagttcaccctgtcttttcttcagatataatattagtactcatcagtcgtcaattaaatttgaccaatcaaccaatcgtactaattaaattatattaattgcttgatcgccatgtttaaagcagcgtgcctgtacgtgcatgatcgacctacatataatatttcctatgttttaatttagtgctttagtttaattacactcttttggggatcttaattaatttcgagaaaaacaaagcacactttggcagaaattaaaaatatatatacctggactggatgaaattaagaggactcgaatgtgaaaataaaacaagtttgcgtggcctgtccttagaacagaatacatgatcagaaaacatgcacaaccacgcgggaaggaacaggaggcccagatggatgcgtacaggaaaaagtacatactagtaagtgtgcatctttcttttgcctgaaagcgacaattaaattgtttcaccaaaaaaaaccaattaaaattatcagtaaaaatactaaaatagctaagaatatatgtatgctcatggaccatttctgtggaaaaagcatgctggcttgcacgaatcaaatttaattaaatatggtacacatcaaaactaaataatagcatcgaccaaaatagtcgattactaacagagattctcgtagccacacatgcctaaacagtaggcacaaacgaacacttgcctgaaaagatcacgcaaaaaatatagcataaaatgacagtctcaacagtgtaaagtttgcaagaatgtgcaattagaagctaacataaacacaaaactagctatcatacatacgagtgaagggctggaagcagctaagctgaaagctcaacacaacatatactaccaatctagctacaaggccactccaagtcgcatatatactagtatctataagctaggctgttctctctttccattcgtcaagaactaccacgacgtcgacatcataatcgtcagagagctcgagaaattttttagtatctttgatccagatcgatc

SEQ ID NO: 6385 - DNA, 2000 bp, Oryza sativa
aaacagagggagtagttgcttactatactattaatatatggtctcatctgtcatacatgtactgcgtcttggagtccgtgctgcagctggctacagatctgtagcctgctgctcttctctctcatcttttatttctttaaaatatgtttacagctgtcttatattctgctattgtacgtgctctaaggggttgtcattaaatttatccttcctttcttgtacaatcttgaggcgaccgccatgaaaacctagtcgctaatggatactatttgcacatatgaaatatctgtgagatatatcgattctagtatttatatgtattagatttattagtattcatcagtagaaatcatagcattgtaaaacttggatccgtataatagcaacccctaaatataaacggcaacaatatgtattaagtctaaaaggttttgtatttggagtcagagagagttgttaccaagggcaagtagttaaccaacttttagtactccgtccgtgtgtgtggattacagcgctagctcctgtcgcataatttattacagcacatgcttactgtacttctcgtcgtgccacggtaattactgctccactaactactatacataccgttactactactcacttcttcctaaaaaaacaaaccctggtttccatgcccagagtttgaccatccgtcttatttaaaataattaaaaaaaaattaaaaatacaagtcacgcataaaatattaatcatgttttatcatctaacaataatgaaaatacgaattataaaaaacctcatataagacggacagtcaaagttggacacgaaaacctagggtttattttttttttggacgggggagtatgcaaaagagagtttttgacaaatagtgtgacgtgtcgaaatgctcatttgcacgatcgatatatctgccgttctattcttcttccgctgctgttggagagacgcaggcaggctcagctccagatatattctcttaccttgtttacgcatgcctagtagtagtaatacttacaaactggctagtaaaacctgttctgaatatgctgatgcttacttccttcgtctaaaaaacaaatttaatataatcggtattaaaacagatacttcatatgttcataaaaaaagtcaaatcccgactctaaatcgggatatacatatgtttagattgatatataagattgtttattttttattttggaacggggtggagaagaaaggagagcaaaacggttactagtaattgtggagtttatgtgttttaagtagaaaaagaaacggtttgtttcattgtatgggccatgaatcagattggttacttggctcgatctgcagatgtcactaatgcaagatcaaagcttgatgagtaaacagcagtcttttcaagttaagtatagtggtagtaggctagtagcaaaagacgacgaccgtgtgagtgttaagaaaatgtgcgtaggtgacctccaaatcaacacatgcatgttagcacgtaggtggcgtttgtcttttatcaactacagctcgtgataattatactgctactgatagtctgataactgtgtaacaaagcatccgtgactgactgatgataaatttgataatacgcgtcgttagtttcgcaacacatctggcgccacacaattttcaattgctcaccatgattccttaatccccttcacctcgtcgatgcttacatgtgttaacaaatggtgattcgatttagttaaggatgcacatcaatcgtactgtacagattggggttgctcagtttgttaggtttggttaatttttctttttaacctgtcgccatggatggatgaattcatggatttcattgagagcagctggagaagaaagaagaagagtgacgtgatccattcattcgttcgttcaccttgactgaccactgcaacttcgtctcctctccccttaaattccccttcactctcctcactccatccagctcaccaccagcagcagcatcagcagca

SEQ ID NO: 6386 - DNA, 2000 bp, Oryza sativa
gtttaatatataatacacttcgataaagtgacatctatttaagtatttattattttttacaaaaaagtagtcgaattctaaatatgaatattgtttggtgacaaggataaaagaacaaatagatattatgcataatgatgctattttattggttttggtagtcgttatcttttgtaacattttagatggcgtagcacctgtgtaaccatttgctaatttttttatttgttttatcttttagttcaggtagtcattttgtcagaggagatggagacttttcccatcactcgatttttctcatttttgactctaaagcttattggttatgtgtctatttacataagccgaaaacataaaaccatttttcactataaaaaagagtgaagtacgcggatggtacctaaatttgtacaggtgtatcatcaacatccataaactttcaaaatggattttcgggttcctgaacttgtctttgaagtcatataggtccaaatagtattcaaactgctccatacactgaaatggcatcacagtggtgcctacacgttagtcacatagaaaataaaaacagtaaaaacttatttctatatggttgacatgtgggtcacactgacatataagtgccaccgtgatattgccatgtcagcacacaaagtgaattgaaacttgtttgaacatactcatgataactttggagccagaaatgtatttttaaggttcagacacacaggtaacatacccacataattttagagaccatccatacacttctctaatgacatagggactactcctatatatgattgttgttactgtacttgccaccggtttggaaggaaacaggtttcaagttgacagtgtcaagaatttaaacttttcaaaaaaaaaattataaaaggatgagaaaaacgatgaaaatttgccagaattgcccctgctcctctccatctatctccctttcttccctcgcctcaccctgtctgaactctgaactctctctctctctctctctcctcctcttcccggcggagtcccccacctcgcctcccctccctgcgcgcggcaccaccggcgggaaggtctccggagtgcgcggcggtgtggacgtcttcctaccctccccgtcccaaccccgcggccgcttcgttcttggtcgtcctcggtgtgttcttgttgttgttgttgttgttcggatcgagttgatttcgtgcccctcccattatggaatcaggtttcttcagggtttctctgatgtagggtagaagattgtttggagaggccaagaaaaaaaaagttcttttggagttcagctgaactcgttgttaggtcgtttgcccctgatttagattcgattctgaggtaataaagttgcggaattgtggatgtccggaggatatccgagggttttatccgctcaatttgatgtgatcaagcaaaaaattcgtttctttttatgtttaaaggccttaatactacacaagctagtagtagtttgttttcttctgctctactgcaaaagtaagtactccttgtttgcatcccttggtggctttccagtacctaccatctgatgttgtagctccttggaaactgcttgcttatccctttgtcatgataagaatgtggtgtgaggaagaaacctgtattctttgtagttatacgctttatttgctttccttaaactctgtctttgtctgatttaatgtaaatacaagctgtcgcgcgaattcgttatcttgtcatgacttgtcaagaacagaagaacagtcctttctatgaagaagttttgagcctattgtatgtgatcggtagtgactaaggaatgctgatttggatttaccttcttgtacttgtgacattgcagaagatcaaccgtctggccgggagcctagagttgttaactacggtgtttcagagtttttttgttatctcttctgctgttgtgctgacttctaatgggatggggaaacaccttaaccaggcgcctcaaagtcttttcc

SEQ ID NO: 6387 - DNA, 2000 bp, Oryza sativa
atcatacatacattgcattttaaagtccgtgctgttgttgactataaatctgtagcccgctgctcttctctctcctcttttatcccctcgaaatgtgtttatagctggcttatagtctgctattgtaactgctctaattgttgtgcaaggaaaatgacagatgtccatgccctaattcaatgaaggaggggttaggagttagaaggtagttaggggtaagatttgaacaataaggggtggttggggaaaagcagtatctagaaaatacacttattgtgtgacaaaaatttgaatgtgctataagtgtacttatttagggataaaatatcgtgtagattgattgactgctctagaatttcctatttctttcactacgtagagccccatcggttgccctaataacccaaagcaaaagccaaaataaatttttgaacttgattttaagatattttcgacgtaatttccttttaacgtttgcttttaagtcgctacgaacaaatatataaaaattttacttataaattaatttgagtaaatttcacaaaactacagatactatgaccaaattattacaaaactacagatttaactcggtgtatcacaaaactacacatgtaacaccaaatttatcacaaaactacacatttaagatgaagtgtcacaaaactacatatttagtaactaaattatcacaaaactacaggtttagaatcaatttaatcacaaagtaattatgtttatagctccaccataataatggtgctagggatttaaactccaaaagttgtagttttatgataagttcaatattaaatatgcatttttatgatacttaatctaaaatctgtagttttgtgataaatttggtgctaaatatatagttttgtgagacaactccttaaatctgtagttttgtgataatttggtcaaaatacctgtagttttgtgaaatttactcaattaatttttattccctaataagttgtttggcttattagagaatatatgggtaaccgatgaggctcgtacttttcttgctgagcattttgtttgaatttataactagtgcatgcatgggttaatttgatagtatgtggtgtcgcatatgtaatgtgtcatatatgaaggctacgctagatatcctgtttacatactgtaaaatgcatggatagagaccagagagtggtacttacattacatatatggccagtcttccaagaagaaggaaaattagtaggactacaaaattagtattgactggttaatcaacttgaattgattaaataattatgaagtataaatgggcttacaggtataagagaaagatgccatatataagaacggtgctagctactcccttcgtttttcgttttaggttataagatgtttttgactttggtcaaagtcaaattgcttcaagtttaaccaagttttatgggaaaaaatatwaatattttcgacccaagataaatttattataaaatatgtttaattattaatttaataaaactaatttgataatataaatattattatatttgtctataaacttagccaaacttgaaacatcttataacctgaaacgttttgactttagttaaagtcaaactactctaaattttatagaaaaaagttaaactactctacattctaaacttagagtagtttaacttttaaccaaagtcaaacgtcttataacttgaaacggaaggagtatctagatgcatatatgtctttctttttcttcattttggttctttgcctacatcatatactcctctctgttttaaaatatacttacttttgtgattcaaatttgaaatgaaggcatcatgcatgtgttgatgtactacccctacatggctataacgtgcttaccatgcacgtatgcagttagctatagcttatagctgctcgtacttgcaagcacgctatatatatatacacgtttacgcctgtatatatacggtacatgcatgcatatgctgtcacatactcac

SEQ ID NO: 6388 - DNA, 16 bp, Oryza sativa
gaagtttccgtgggcg

SEQ ID NO: 6389 - DNA, 512 bp, Oryza sativa
taagtttgatcaaacttgaagcagtttaactttaacttaagttaaaatatcttataatctaaaagggagggaatgctagggaaaaagcctagccgaaaacagaaagacaaaggaatagctgtgggacgaagcaaagaggatatcagtaaaacaagacatcatttctgccaggaatatatcgtaccaaaaaaggcaaaaaagaaaagaactccaacgtgatccgtcatagagaggaagattttttttttatcactcgagtggtgtttggtgcatctagcattctagcagagtgtcgtgaggtcaagactagcaaaggaaagaaaccccaagccccggagtaattaagcgagtgattaattaatttaattaacccaacggcaaaacaaacctcgcctcacctcccctccctccctttcctaawtcctccgcccccgcgccgcctcgccgccgcctcccccccacctcccgcttcagatccccccaaaaccctagcccccccacccgccgccgcc

SEQ ID NO: 6390 - DNA, 2000 bp, Oryza sativa
caagtattagtttagctctttttcttatctacccygaaaagccacccataaaaaatatgagatatactagtaggaaggttaaaaccaaaagagaactgaattactctccatatgaactttgcaaaatgacaatccataaatagatgttgaatagactcattcttcatacaaaaacaacacctcaagctgtcattccaattccgcctcgccaaattatccttagttaacacaacccctttaagcacgtaccacatgaagatcttaatcttaagtggcatcttaagcttccaaacatacttattcctctcgatatatccattattaattaaagctaggtacattgaccttaccgagaacttacaattctgatgataatttcatctaaagctattagaagaaatattcaactggacatgtacaatagaagcacacaactcataccaattaacaagattctgaccaactaaagctcttttgaaagaaacattaagcggaacagattccatgacagtggcaatagaagacgatttccttcggacaatagcatataaagatagatatttatccttgaaagccaagttgcctagccatttatttttccaaaatctaatttgtttcccatcattgacaatccaagaacccgtatttaagaaagtacttttgactttcataagtccagaccaattcttgtttcttgtcaacttgggttatagacttattataaagatactttctctttattaagtcttgccaacccccttcctcattaattaacttaaacaaccatttacttaaaaaatatttattctgaatttccaaattatgtatccaaagaccccccctcccccttggtgctcgggttggcaaataatatcccacctagtgagcctgtacttttcttatgattatccccttgccaaaagaaccgcgatctataataatcaactttttgaagaaccccttttggtatgtaaaaaaagataccataaacatggctaaactcaaaaatacagaattaatcaaaaccaatctaccaccaactgacagatgattgcctttcgaactactaagctttttctcaattctttcttcagaaactttccactcttcatttgaaagcttcctaaaatgtattggagttcctatatatttaacaggaaaagaacttaacttacaaccaaagatattagaatattgattttaacactcctttgcctgaccaaaacaaaataattcactcttgtgaaaatttatttttaagccagacaacttttcaaatacagataaaatcaatttcatattctttgcctgttgcaagtcatgctccaaaaagatgatggtaccatctgcatattgcaagacagacaaaccatcatcaacaagttgaggaattaccccattcaaaagtcccgcctctttagccctcttaattaataaagcaaacatatcagctactatattaaaaaaaattggagataaaagatccccttgcctatgacttttgtaaatttgaaaattgttaccaatttgatcattaacttttataccaacatgaccacattgaataaaagaagctatccactcacaccatttaggagaaaagcctttcattctcaacgtttgttgtccaaaagaccatttaactttatcataagcttttttaaaattaatcttaatgagctgaaataatttgaggaagtaaaattttatatatatactccactttaaatgaactaaagtgcgccaattattgaatgaactaaagcgagtcaaattattacccgtgcatatgggtcatcccactaccatccctattccctaatctgaaatttgaatgagaggttgtaaaatctcattttcataccaccagtttgaactttcggcagtatatgacccccatggggggtctatatattcctaggccgatcgtagaggtcgccccgtcgactcgcgggaggctggactacgtaaccatacgtgatacacctcctgtaccaccc

SEQ ID NO: 6391 - DNA, 1294 bp, Oryza sativa
gtktrtgcgtgtacrcasatrcctaaaaatgcacmcccctsgatacatatatatatatatacmcacacacacacacacacacattaatatctaaatgaatgtggataatgttagaaagtcttacattgtgaaacggaggaagtacgtacttttgatcttgaattttaacatgtagataaacaaataaccaaatgtttgttatatatgtggaaaatgtaattactatatatatttttcataaaaaaattttatagatacatttttagtattttttggaagataattctaatagtttcttctataaatataagactagaacccgtaatcaaacatgtagtatgtcagttgaagaattttgcaagcataaaattgaaagaaagaaaggtacgttttttttttagtacaactgctactcccaccgtcccattttaaatacagttgtgggttttcgtatttaatgtttgactgtctattttatttgaaaaatttataaattatttttaaaaataagtcatccataaagtattattcatgttttatcatctaataacaataaaaatactaattataaaaaaattaaaaagattggcggtcaaatgttgaacacaaaaacacacaactacacttaggcctgtttttccaaaagatatcacatcgaatctttagacacatgtatgaagcattaaatatagattaaaaaaactaattgcacagttatgggggaaatcgcgagatgaatcttttgaggctaattagtccatgattagtcataagtgttacagtaaccgacatatgctaatgacaaattaattaggctcaaaagattcgtctcgcggtttttaagcaagttatgaaattagtttttttaattgtgtcaaaaatcttttcctacatccagtcaaatatctaatgtgacataaaaaaatttcttttcgtgaactaaacaggctcttaaaatgagatgggggaatagttggtaggagtagttgccaaacgtggttctagctagtacctactcccagtctccttctatacatatacgtgtaccctctgcttcaaattttacgtggtactagttgaaaattacatgctcagacaaaaacaaaccagaaacgatttattcacatacatagctcgaaatgttcaaattttgaatgaagcaagtagttgtttctcgatatttttcccccttgactgtccagaagttgcttacatataaaagcacaagaacacattctgattcatacaaagcagccgcacagcgtgcagcagaagcatcgttcgaatccaaccg

SEQ ID NO: 6392 - DNA, 2000 bp, Oryza sativa
cgaatttactctatatagtttcttatttcagctcactcacaatataattatttctactacagagagttactcctcccgtttcataatgtaaatcattttagcaatgaccacattcatatagatgttaatgaatctagatatagttctaaattaagttactttcttttgtataagttacttctataatatatgtaaattaattttaagctttactgaatttacttttatatgtttaagaagtaacttagtgaatctagaagtaatttagacwtagaccatcataaaagtaatttgkgatttttcatcaaaatataatcatgkgagatcttgttgtaaagatttaattgttacgaacacaacggtataatcggattataaatcggatgagtaatttaagagaaacttctctaagaaaaaaaaatacatagatattgagtgtaccagtagctttttttttttgaaagaaaggtgtcycyctttagcmctatccagctaacmctatcggtatagttgcgtcccatgaaaatactatagcmcaaatgtgggccaccctcatcaaggggatttttaaagtaatdgaaaaatgagcctccacgttcgctctcacggattagaaattctcatattaattgagragaaaaacaaagtctatatagaaatataatttagaaataattaaaattcggaattaaaaaataaggaatattagaagaggagactaaagtccatatagaaataaaattaattaataaaaaaattcagaattaaaaataaggaatattagaagtagagtatagagttcatatagaaatacaattaagaaataacagaaaatcggaattaaaaataaggaatattagaagtagagtatagactccatataggaatttaaaaataactaaaattcgtaataaacataataaaattaaaagtagagtttagagttcatataaaaatacagtttacaaattactaaaattcaaaattaaaaacatgggaagaagagtctaaagtcaatatagacatacaatttagaagtaactgaaattcgaaattaaaaattaaagaatattgaaatatgaatttggaggccacatagaaatacaattagaaataataaaattcagaattaaaaataaataatattggaagaagagcctagagtctatatagaaatacaatttacagataacaaaaattcagaaataaaaaaagaaatattgaatgacgagtctagagtccatataggattataatttacaaataactaaaatttgatattaaaaataattaataactaacacgtatataaaatacaatatgaatattatacattagtaatttcataaagttagtacaacatttaaaattatgttaccattttaatatatttgaataatacattaagaaaacatatatgctattatatgagaaaaaaatataatgatgctagccgcgcaatctacgcgggccaccatgctagtttggttgatatgatatatatgtgcactgtaattttgataaaaatattgtgtaaatagatatgtattagttattgtcttctgtagtccgttggaagtaaatctaaaaataaaaaattttgaatgtttttttgaaaaaaaaatcacccgccgacaaaatgaataggcagttccccgattgcaaggcagagaagagtaaagggaggttgcgggctggtggcccgagaggcccgtgtcgcctctggggccggcgggggcgtacgagacgcggaagctaccgaccggttttttccgtatatagagaaaaaatcaaaaaagtaatcacatcaagagaaacaacaagatctcgcacgcacggatctcaaagcgctccagaacctaccccatctgccacgattcgtgtaagcggataataaaaaaccgagcgcagcagagcagagcagacacacacgggtcttttgcctccgccaatctccctcccatccctactcctcgtcgttgcgcctcccasgcacctcc

SEQ ID NO: 6393 - DNA, 2000 bp, Oryza sativa
tccccctcaaggatgtggctgggccaccgctgacgtcgccctggcaccgaggcggaaggcgatgacgaccaccactggggaggagcgcgtggcggtggcggccgtcgaggaggagtgcaactgggggcggtgggactcgagtggcggaggtggaggagctcgagcgacactagctggaggcgatggccggaaagggaatcggcggcgatgtacaggtcggtgatgttcatagggagctccacgcagcaggccggcatgagctttggcggcgagcacgcacaacagcagccgtgcccccccaccgccgttcttggctccccctccgccactccgagctggctccatcgtccccgcctgttgccgctgcttcgaggtgccttccccgtccctgcccgctaccactgtcctcagctccccttccgccactgagctgcctccctcgatgatgcccgccatcgccatccttgactcctcctcggccggttgctcggtgatagagagagggggagtcgagaagagaaagagaaagagaaagagagaggtgaggggaaagagagagaggatgagactaaaaggtgggacctatcgatttaaagaaaaagaattgctgactggattgccacgtaggacaaaaactgctccgagtttgagttagggggtaattcgtccggtattgatagttaagggtgaaagatatctggttttcgggtttagggggggggtaattcgtactcacccaatagttaggggtgtaattcagacttttcccatttatttatcggctccatgttgacaggctaggtttgatcaaatgatgtcaaatcatttcaacgtaccagaacactgcatataaggggcagatgactcggtatggcaagctgtggcgctcgccataccttgatctgctagtgagaccccccccggggcgcgtcctccttcctaggacgccgcgccgcaccggcacgatcgagagagggagagtgagaacatggcgcgatcgagagagagagagagagagagagagagagaatgggcctaattagttggcctggttcatcctttatgtgcgaaggcttgacgagttcaaagtttgtcatgatttagcaagcctagcaaaaaagatggctgaacttgagagacacattgtatttccattggtatattgtctcattgagttagtattgcttttactggtggcgactagatcagttgagagggccttctaggtaatgaagattatcaagacggagctacgcaacaagatgtccgatggttggctcaatgacttgatggtgtgctacatcgattcaaaggacttgattttcaaaaaaaatcaaaaaaagtatttcagaaaaagaaaagtaggcaaatgcaattgcctaaatctcctagacctctaagcaattaaataaatgtttggtataccttcacattttattccaatcattgctctttatgttatcaatcttaagtatatagtatactaattaatctttgcaatttgttttgcagtttctatatgtctatctatcctcactagtctctagttcttatatgtgatgcattgctgacagctggaatcttagaggtattatttacaattttggcaaatggatgatgaatgtgaacctatggctagtgcttgttgccatgtttgagattgcgtcatgatcggataatgttgcgtcatataatatagtgcattaagattgtttttttttctttgtgctagtccatgggccacaccggcgacaccgtcacacctaattttttttcccgtcctccaccactgtgcatatataaagataagcagcattattaatttgaaggtgcctctaggaaaaaaacagaacaacaattttctacggcgagtgcccgagcggaacgccacaccacacaaagataagcatgcgagatttaggcacaatgctattcttagtgccacaatgcagcaccgacacctgccaagcctaaccgtgaatcccttcttaactcccgcc

SEQ ID NO: 6394 - DNA, 2000 bp, Oryza sativa
ttttttaaaaaaaatccactatcctcacatgatttatacctttctcctttatatcttgtaccacttcctttattagtaatagataaataatattttaaaatgtgtgtagataatatgttttacttaaccatgaatatcactttgaatctttttcattaaactcatagaaacgacaaggatagatttgtctttgaaaatagttctaaagtatcttaacttttctatattttttttcaccgtatcattatctaaaaatgtcactatttgccaccattatcaaaccttactgaggcagcgttcgttctgggagattggagatagaatgcacatcgttttccgcgcgtacgcttcccaaactattaaacggtgcgttttttaaaaaattttctataggaaagttgctttaaaaaattatattagtacatttttaaaatttaaaataattaatactcaagtaatcatgcactaataatttacatcgttttgcgtatcttcccaatcttatttatctcccctttctcaaacacagccacatgatccgtcctcctgacctcctgcacgttcaaaaccgcactaaactttaaaacagttcagacatggcaaggtacagaagcacgcaataaccatcgtcacggggacccgcgcgttgacgacgtgtgcgatccaaggccgtcgcatgtgcggttccgcctgtctcccaccaacgcaaaaaaagcacggccccccgcaggcggcagcatctccccccttccctccgtaccgtgccaggaaatcaggaaacccaaggatccgcgcagtacgcttccgtcccattctccactctccgtttccgctcaccccccgcctcgagcacgacgagccgaatatttccgcgtgccatcgcccagggaaaacaacgttgtgctctgctgtgcgcgcctgcgtgctgagctccgtaccacgccgcaggctcgatctggttgcttgattccccaagcgtgcgcgaccgtgcgaccatccgacgcgctgctgcacccgacacgttgagtgtccgtgtcccctggagcactggacgcccggcggatcggctattccagaacttctctggcagacggctctgtatttttcctttttataaaaattacacgtggcaggatgctattggctggagtggcatctccaggatttttccttgtgatcgcggcgtggcggctaatggttggccagactgacgtcgcgccccggcagcagattccttgcgtctcccgatccgcgcaaagcggcgggggagcgacgaaagtagccactcgagtggcactgcgagtggggccggaagcatgtggcccccacgtctcggtctctctccccggtcatggagagccttttttctcgctttgtcgcgggccaaatgggcctctgaaaggcccagatcccaaggggcacacgtggcagcacggggcgtcatctggtgacgtcgcaacctcccccgggtcaagcaacgcatctggttaaaaaaaacaactgaaaaactccgttgcttaccggttaattgaccccgcccgttctatcccatcgtcgcatcgagccaacgtagccgccacgttgacgagacctacctctcactgacacctctaccccaccctactgtgtccccacctgtaagtgtacaaactccgttgagataaagagataaaaccagataaaaccagcagtatttaagcggccattgaactacagtgccaattatattttcttcttcgtcacgatcgatgggatttttatttacccgagcgagaataataaagtagtttactccacgaaagagaggggaagggagaaaaagcttctcctctcttccgcattgcgttgcgccaccaatctcctctccccatctcggcctcctcgccgccaccatccgcctctagggtttcggttccatgcgatctcgccgcggcggcggaagggaaccctaggtaggaggctctcctcttgttgagtttgaatctgaggttcgtgaacca

SEQ ID NO: 6395 - DNA, 1639 bp, Oryza sativa
tttttgggraattcccggggraaagaagggsgggagggggtctagtagtattccttcaccaagtcagcaagcccatggtcagttggtcacactccaagctctacatgttcgaggacatttacattgggcaggtggattgcagccttatgatgattattgttttgtgcttctaccatcttgtggctagcatatgacaacaatggactgcaagattgcaaggtgaggcttcatggcatctgttaacctcgagcttaagtagcgcatcgcagtgggaggccaaaggttgagcacgacgatgggcagaggacgaggttaagcaaggtgcatacctccggtgcaacttgcaaccatggtaaaaatatgaggcccaacatgcaatttactcataaataaatgccatagtagtatcaaacggttctggatcacaaagtgcactgatggggcgcgggcggtcaaagttccgtacactgcctgttcatgtccacggcgccgaactgccgaagtgaacccagaatccaatgggcggaccggctcccacaagccggttgggttcgtgtcattctcacgagtgagtagaggtggccaaacgggcggcccggcccggcacggcacgggcacgggtccggcacggcccgtttcggcacggcccgttaggcatggctcatgaaacgggccgtgccgtcccgacccacgtgccgagccgccggcccaagcacggcccgtggatggccgggccgtgcccgtgccggcacggcatgcgtgtggcccgccgtgtcagtacgggcccgtgaatgaaaaatgggccgtggacggggcacggttggcccaggaaccgaaatggcgcggagggatgcgatgcggacttgcggaggtggctggcgggctgggccatcagctaggaggggtgctcaacggacttgcggaggcggctagcgggctgggccgtcagttgggagggatgagatacggacttgcggaaggatgagatgcggacttactacagtagccgtgccgtgccgtgccggcccgcgggctcggccggcggcccaagcacggcacggctactcgtgctgtgccggcacggcccgttactgtagcaggccgtgccgggccgtgccggctacaggttccgccgtgcctcgggccgcccgttttggcccggcccgtttggccacctctacgagtgagtatacccagggaagttggccgccgctgcgtagccgaagctccaccacacgacaccccgcaaaacgccatgcgtgctcctgctgcacacttgtcccccgcctcctccgccgtgccgtcacgcaaccacggactcctcctccacctccgtttcctactctcttcttcagtttctcacctctccgcacgagaaaattcgaatcccccttccggctgctggttttcgtgccagaaacaggcgattttaccagtgccagttagctctcgccttcctcctcctccatcgtgctactactctgttcttctggaagaacactggtctcctcgcctacctcagtcaccactcaccacaccaggtgcgagctataaaaaccggcacgccaaaaatcttcaaaaccacacagaaacctcagatctccgaggcttcccaagcgagtcgacgaaaatgcccgtg

SEQ ID NO: 6396 - DNA, 2000 bp, Oryza sativa
atggctgcgaatcagttttgatatatattactatctcatataattatttgatggttggaacaatataaatggcttatgtttatatatagacaagattatcttacgattcgcacagttttttatagggagtaattttcacgcctcgtgtttttatatatggataaaaaaatactatatgaattggaaagggcatatttacggtgactctaatttacaggttaagtcatagacttatgagcattcgtatttacggctatttatccttttagtagtaagacggcgtatttgtcaacaacgagatgtccatataacttcgtcaactagtctagtttttttaatatgcttataaagatatggtgtgtgtatatgttcatatcggtaagtgtttgcgttgtactgtgtaattctaaaaaaaagtgagctaggtagcgttacgagtatattgttgggaaaattgatctctcggtttgaaagatcacgctagaccgttttccacccgttgtctacgcaaaatcagagcgatccaatctgttaattcccgattaactatgcgccgtgatcggtggcacccaatttatttcctattgagtcgcccccgattccccacagtgctaaatataaaaggggaggccggcccaacagtagatgacaatctctctcggtctcaatctaaacccaatcaacattggcgctggaggggaaacgtgtggcggttctaggatagtgtaggtggcaaccggaaggctgccgctaccccgcaaccggcgttctcactgctacgactacttcccttacgccgacgatcacggagcagttcgagggacttcatcctctacttccactccggttgatggtattggagagggaacaacaagaatcgcaacggtggtttcaaataacggtcagtaatcgtaaaattccgtattagggtgatcatgtttagactaagcactcatgttaatagatcagtagaatctacatatatgtgttcgtatcgggtttctagaaaattttacaacgaatagggtaatactccctccgtttctaaatatttgacgctgttgacttttttaaatatgtttaaccgttcgtcttatttaaaaaatttaagtaattattttttttcctatcatttgattaattgttaaatatacttatatgtatatatatagttttacatatttcacaaaagtttttgaataagacgaacggtcaaatatgtgataaaaagttaatggtgttaaatatttagaaatagagggagaggaagtactgatatacggagtaatcagcaaaaagatggaccatagccgctcgttgttggactcctccatgtaagacgacccggaacagcgaaaagaagaagcgcacgtaagaatcggcagggtcaaagctagtttctcaaaaaaaaaaagataataagaataatataataagaaaatwaaaagaaaaaaaatccccatggagacgaaacgtggacaaaaatcgcagccgtcacgtccatctccgcaagaccgcggcgccaaacgggtcaaccacccacctctcttctcctcatccccatcccattcccatttctctcgcgcgcacggcgccgcgcgcracgcgaaacgcgacgcaagccatcaccaacacaaaaacatggcgtccaccacctcctcgcccacgcgcgcaccctcctcctacccgtaaacgacacccacaccgacccgcctccgcctgcgcggcgagaaaacccaagaaccccccacgtaggcaagacgaggagaaagaggattgcaagacgctgtccatcgaagcatgccatccatggcgcctcctcggctataaccaggcgagagagagagagacgagacgagacagccaagaacacgcgcgtgcgcgcgtgcgtgattcttagtttagcgccttcccccccgcggccgataataacacggtggtgggggaggtgttcgtccgtggcgcgttcttttgtcccaggcgtgcatggccgagacgcc

SEQ ID NO: 6397 - DNA, 2000 bp, Oryza sativa
ggttctgttatgtggacactctttcggtggcctcatgctgaagaaagtcattgaaatggtattttttcaaaaaacttcatactcaggcttccagatggctattaattctcttgttgtaacttatgagggcaaagttctctcttttactgtagattgcactcttcaatgtactagcttcaactagcaattcaatttgattattgtccttaacacagatactggcattgttcactaaatttgtgttttttgtttgaaattaaattatttatttatgtcttctttattatttaatagagggccctagcggtaggttatccaaaactggaatgtactacttaacagagaactgtgactattaggactttaggagtgctttttagtagcaatggcacattcttgtaaaaaggtattttacgcctgaagcagttccttgtatttcacacagcatatatcataaaacaatagattatgtttctacaataactatgcgacatatatttaataaaagtgtattttcaagtcatttctattttacttatcttctgatccagtggggtgacaccaacaatcatgccagtttttctatttttactatgattaggcaagatgcaccatttgcaatggagaagttgatccggccaccctgtttcctaatctcggtatatttctgactactaattttcttccacgaaactggcattatctatgtctcacctgctcacgtactgctgttagtattttggatataatagctttaagagcagtagctacagtggtgaagatggaagatgataggagactctttcataatgctgctcttcgcaaacacaggaaagaggtgaccgaacgtatggatgtgctgaagagcactggaggtagcagagtacgtaatgctgtggctgtgattgtgaacataccctcaagcaatcaatggtggtgcatggatctgaataattactttcattgttttaatcagggcaatggtgagctggtgttggatgctgaaaaccctacatcacccaggggtgtgcagtatccatttgtagtgggcgagagggtcctgatcatggtacaaggagcacagttgcttttggctcttgcattactaagaaataataaagggcagaaatgaattcttatcgttaagagcatttgcagggaaacagaaggacgcctgataaatttgttgggaaggaggcagtcatcacatcgcagtgcttgaatggctggtgagtccatttggatagctcgctttgaaaaacagatggcatttttgggggtgatggaagaagatgtatgtgaagttgttgcgacttagaactaattacaaatggtgaatcgcaggtatcttgtgaaggcggttgatagcggggaaagcatacggctgcagtatcggtcgctgaagaaagtgtcggagctgcagcttcagtcagagatgaggttgcagccactcaccttcctgcacaacaaataccccagtagtggcagctgagttgattgactatcatcagtcttaaaacaaaaaaaaaagaaaggagaagcatatactgtagcagaatagtcatgaggcatgcatcgccatcaagcgtgttttgttgtagtaatactaataaaaaggtcagttagaaaagtgtggtgatagttaatctggtgatgatatgaaaagggtctatcctattggaaggagaaatgtcatgtgggggttattaaaaggacataaagagtttgctaggaagttccaaattcctagcggtggatgcagcgggtcagccaagccaaaccacaaaccaaactgacttttctactgcactgcaacgcaccagtagatgccagttggtaattcttgatccaagcgtgaaaatgtgtaactggaccggctgggcacttgcagaaaaagtcgataaatgtgttgtgtttgctgtgacatcactacgtcagtgattgtttggatgtatgctcctgggaactcaattggactcacgataccgccatccatgtcc

SEQ ID NO: 6398 - DNA, 2000 bp, Oryza sativa
ttttctacggaatttgctttaaaatatcaaatatctatttgtcaaatttataatgattaaatcataattagtcgtatgttgatgatttttttttcattttacatgcgttaacttaatcttccagtctcatcagtttcatcaattcaaacataacatagtatatcgtggtcgcgacaaaagatatgagcaagttggatttgtggtgtttgtgcaacgaatcagcaaaatcttacagccagatcgttggaaaaggtcgccacggaagaagcagggagagtaccatcagcaggacgagctcacgagaacgagtttttcgtcctgtctctccaacaaccaaagcgtagaaacatcgcgatttccacgtgcgcaataattcatcctataataatcttcttcttttttggaataatccgatgatagtgtaggatgtatggcacatatgctgcatagtcctataagagcaggtacaatagcaggctacaagccagctataaacatattttaaagagataaaagaagagagagaagagcagcgggctacatatagtcagctgcagcacggatttcaagacgtaatatgtgtatgactagtgagactaggtattaatagtatagtaagcaactattgtatgaattggctattgcgttggttatagatgatttggagctagtagtggactatactattaaacttgctctaaagcactcatcgactgcaacctactcccaaacatcaaattacacggtttttcttataagataaaagtatcaaagtgattgtaccaaatgcattttggagaggcattaaattacaccatgttgtaattctatactaagggcccacgaaggattggtaaaaaaaataatcataggaataattttcttaggatttttcttcctatataccctatgatttttttaaaaaaaaatggatatatccggcctctatatataaatcagatatacacagtaacacagctattgatggaacatgccagttttgcgagcgcttaggatccaacctggatgggctacgtgcacgacggtaatgctatccaaccaatcaacatttagttcccataccctttgatttatgggaaaaggacgttaaacttggtatagtattacattcctataatcaattctaaagagaattaagtgagaggttagatatcttagaaccttgtctgtgttttctactccatattataggattaaagaaacacgctacttcaatttatatgtttttcctatcctttatttctttattcctataatacgttttaaagggggttaaccatttaaggaaatagttgcctaataaaaagagttagtacggcagtagatcagatattcagatactgtagtttcaaactttcaataactgtagtacagattattattattcctgcatactccctccgtccaaaaaaaaggcaaaccgcgggtttgcgtgccaacgtttgactgttcgtcttatatgaaatttttttataattagtattttcattgttgttagatgataaaacatgatgaatactttatgcgtgacttatctttttaattttttttcataattttttcaaataagacggacggtcaaacattggacacggaaacgagggtttgtctttttttgggacggagggagtactcatcctatgcaacaaggctgcgtttagttccgtccaaagtttggattttgattgaaattggagatgatgtgactgaaaagttgtgtgtgtatgacatgttgatgtgatggaattttgcaaactttagatccaaacacacccaaaagtggaaaagaaaagtgaggttggtggcgagcagatctgtttcagtttcgcagccatccctacaaaatccgctcgctcgcaggtctccgcctcacaccaacacacgggaacactgggctggcttctctcttcctctgaagtctgaaccccacccccaacccgcacgaatccactcgccccttgcgtcgcctcgccgcacca

SEQ ID NO: 6399 - DNA, 2000 bp, Oryza sativa
ctacagtaacccacatgtggtaatgacggcttaagtaggctcaaaagatttgtctcgcggtttccaggcgagttctgaaattagttttttcattcgtgtccgaaaaccccttccgacatccagtcaaacgtctgatgtgacacccaaaaatttccttttgcccaactaatcacagccataggaacgccctaggctgactgcagaagactcaaatcaagtcaggggagaccaaggacttgaccaaactcctgttcatacattccacgaaatccacatggcagaatgtgaaatgacgataccatgtgatgctgcaatgggacaatgcccaaaggagcccagtggtggagccagctgagctactatactagccaccgtactgccaacgtgccaatggcggctatggagtatggagaacgcagttggtggcaggctgactacactaatcccttaattattccaccaaaacagaaattaagcggcaactgtttcgattgcatattgaccgtcagtctcccgtcagcccaatagtattccactgtttgaggcctcgttgaaaaattcagcgaatttcaatctgaaccaccacgtttcaaactacgaatacctgcaaattgaaaaaaaagttgtcccaactactgctgctctgaccagctactccctgaatcctgagagagaaagcaagaaggttaggcaggccacccattcgttgctgatcatcagtcgaccgttccaagaacctgtaaccaccccccttgtaaatgaaaggttacttcctaccagacatccggcaagttggaatcagtctcgcttagaaaaatgcatgcaacgataagatatctagcagccatcgcataaacaatgccaattgaacccatcactttccacatgcaagaaatctcgattctattattaactcgaccccaattttctttagtccgttcttcagaacagattgttatgcttcaaagttgttcttttccggtccacgagaaattgttactacatgtatgtttagtatgtttagttcacgttaaaattggaagtttggttgaaattggaacgatgtgacagaaaagttgaaagtttgtgtgtgtaggaaaattttgatgtgatggaaaagttggaagtttgaagaaaaatttggaactaaacaagggctacggctgtttagttccacgtcaaaattggaagtttgaaaaaaatagaacgatgtgacggaaaagttgaaagtttgtatgtgtaggaaaattcgatttgacggaaaagttagaatctaaacaaggcctacttgggctgtgttcgatactagaagttgggaacacatatcatccggacgaaaaacagagcgcggagcggtccattagcgcaagattaattaagtattagctattttttaaaaaaatagactaatttgattttttaaaaaacaacttttatatagaaaacgtacgcatggaaaactagggacaacctagtgaatcgaactgcagctgcagaaaaaaagaatgacgagctggtcactggtcactggtcagccgaggaatgcgtcgcgcggtcgtgaggccggtggtgatcaccaattcaccaacccccgctgtgccgcgcaccgcaccaaccacagctcccgcgaccggtgctcgcgccttgcggccggaagcccgcgacaacggcgaccacgacacgaaatttccacgcgcgcttgccaattggcctctcacaaatcgtcacgcacctactccgctactgcttgcgactcgcgagacgcgagcgcacacacacactctcgcaccaaccaccaccaccaccaccaccaccgagttacccaaccgtttcacctatataaaccccgcctcccccgccatttccctccaagaagagcagcacgcaatccagagtgccacactacccagctcttcttcttcttcttcttcacagcagcagctaaccaagaagccaaagcttccattgatcactcgctctgctcacattctgatactgcg

SEQ ID NO: 6400 - DNA, 2000 bp, Oryza sativa
tagatgaccctgttttattagtacttgcaaatgatgcacacttcgatctgcgatatgaagcagtttcccagcttctttacaaaatcagctgtttataaagggaatgtctccattttgatcaaggagaaggtggtttttcaaacttaatttgaagaacaatctgataacagctgaaagcaacatggcaatgagagatcatcttgcctctgtgaacattagttacctgtagaaaaggcacaaaaatcgcttcaacttggtctgctcgttctctaaatgataattaatgcttaatctcctgctcctgctgcacatctgtattctgtacccttgatactggtttaatggattcttcttctgaaggaagtagcttgatctatgcagcctgatattcatgacatgattaataactaatgggcaataccgacacaaaaaatctgactcattaataaaatgcttgcctcctgtccaaatataaacttgcccttggatttgcttatatttcatagtaatctgttgtgacttccagcgttgggatggaatatagtatttaattttgataactaaattgttgacactttcttgtacaggcttcatctggagattacatactctggaacactttaggaaaatgtccttctgctgctttgcctaaataattatgaataccgatggatgttcatcaccggacatattcatgggcgcgtgttctttgccgtacagaacctacagtatggttccccaattgatctctactcacatcaccagacctatgctcaaagtttttgaattttgttcaggagttattgtttcaagggaaaaaaaggaacccaacaattctggatatatctatgtcagactctggtattctaaacttgagttcatgattgggtgcaataccgttttcgagaaaaaaattgattgggtgcaatattgaagccatgaccttattgggcaataaaattccatttcgtaggattactagcagcatgttgagataacttccatgtcaggaaatatggtactatatcagcaagaaaaaaccaactcattgtccacaaacatgagacttggcatgataaatctgtatgattactggtgattgagcccaaacaggtcccaattttctgggcctccttctctaggttgttagatagagatgtttcatctttatttattttgtcagtccttgacagaggaatgtcatgttgaaggtccattgaaccgagacattttcttttgctaatgtcatgcatgatgccattgagatagatgatgtaatattcggattgcattgaaaggaataacatgaccggccaaaaaaacaaggaacatagggcaacattttcctcaaaaagacagaaaatttaggtgcaattttgcatttttgtctctaacgtcaacagataaaaatattcccttactcagtgctaattccagaaatgggtgatggagaaaaaaaaatcgaggcaatgtaaatattatgtgccaaatgttccaaataggtcatgaattcatttatattttatttcaacttctatacaagtacacaacacttaaaatatatttaggctgagtttagttccaaactttttcttcaaacttccaacttttcaatcacatcaaaattttactacacacacaaacttctaatttttccatcatatcgttccaatttcaatcaaacttataattttgacatgaactaaacacacccttaaacaaaatttgattccaaactgacttttttttgctgtgctaaatttattcgagttggaggcgcactcacagaaaagctgaacctgacccttcaactttcgcgcagccccctccactttcctcgaaattgcaactcccacctcaactataaacttcggttcgacagttcggcactcgacaatctcgcagagagagtgaagctgagattgcaatttgcaaatatcccctcgagaaatcataatttgtttttcactccctaatccccctccagtccaccgcccgcg

SEQ ID NO: 6401 - DNA, 2000 bp, Oryza sativa
ggagagtccaagtaggaatacaatttaaaaatagctaaaattcggaactaaaaataaggaatattaaaagatagtccatagaagaaccgaatacgagattaattaaaattcagaataaaaataaaaataaaaccaaaattagcaaaagaaaataaaaggagagtccaagtaggaatacaatttaaaattaactgaaattcggaattaaaaataagcaatattgaaagaagtttccatataagaacacaatacgagattaatcaaaattcgaaataaaaataaaataaaatccaaaattagaaaaggaaaggagattccaagtaggaatacaatttaaaaatagctgaaattcaaaattaaaaataaggaatattaaaagaagagtccatataagaactcaatacgagattaattaaattcagaataaaaatagaaataaatccgaaattagtaaaagaaaataaaagaagagctcaagtagtaatacaatttaaaattagctgaaattcggaattaaaaataagcaacattgaaagaataattccatataagaacccaatatgagattaattaaaatttagagtaaaaaataaaataatatctaaaattagaaaaattaaagagagttcaagtagaaatacaatttttaaaacaactgaaattgaaaataaaaaataaaaacattaagataacacaatacggtactaactaattttttttaaaaaaaattctgaaattagaaaaagaaaaataagatttccaaattaggaatacaatttataaataactaaaatttgtgataaaaataaagactattgaaagaaaataccatctaaaacagagtagagtgttggcggttgatacgacatataaaaaatgttaataaaacaccaaatagaatcctaatgacgattaaaaggagggatgtcaggcaggccgtgaagcaaacgagtaagacggttatcgggacttctagaaagtaaaaaaaataaaccacattgataatcatatttgatttttaaaatctcaatgacaataaaaagagaagcagcggacggggtgtataagagtatagttgcagagccgccgacggttgacgagacttctagaaaataaaaaataaattccaacgataattatgttcgatttttagaatcacaatgacaataatgagtagggggcggatgggctgtagaggggcatagtggcatcgtttgatggaatttctaaaaattataaaaaatgaaactacaagtccaatttaaaaagtaaaaaaaaccaatgataatcatgttcgattttgaaatctcaatgacaataaaaaagggaggcaacgggcgagtcatataggagtataatggcaaagccgctgatggtttggcaggacttttagaaagtaaaaaataaaccaaacgataattattttcgatttttaaaatctcaatgataataaagagaagagacagtggactggccgtagaggtgtataatggcaacatttgacgggacatctaggaattgtaaaaacgaaacacaacatgacaataaactctaaaactataaaatccaatttttaatgattccaagaagaatgaatagaaatagtgataatcgagcaagcaaataaagaagaggatgacataatggatagcaactggtgtgacttttaaaaactatatatttagaaacacgatgatgataaggtttggcctttcaatgtcttaagacaatgagatagctatttaataaattttttaagtaaaatcatacttaaaaatatataattttgtttggggtttgccgcgcaattgcgcggccaccagctagtttttataactcgtattttgtttgtgtagaaaaacgttttccagaatttttttccctgagattagtatccaccgtcgattttctgatcgaacggtagggatgagtcgaaaggttctcgaaggctcgagactcgaggtccagccgcttcgtccacctcctcttcccagactccc

SEQ ID NO: 6402 - DNA, 2000 bp, Oryza sativa
gaccttcacaaactttcccgggacatccacaagatctttggaagctcacgggcgacacctaaccgtctaggagaagatctccaagagtaataagcccaagtgatagcccacaaggtatccaaagtgctcaaacaaacctaatcttcaagccatctccaaaacactcctacactctcatctaatctctcaatctcacaagataggctctagatttgagtggaggaagcaaaggaagcttgggagtggctagaaaaccctagaacatgaaagagctaaagtggaatggccaaagggtgacctggggacgaaatccatatatataacggctaggtgatgtcatctagccgttactcacaagtttgaactggaagcctgccaggaggttccgggcagaagtgccaggaacttccgagcagcacttaggaaaaattcgcttttgaaatagcgcccggaagttccagccagaacctccgggtagccctctctgtcccggggagaaaaatcattttttagaaatgattccaaaaatattttgactcatggatatgactaagagcactttgtataccctagaaccacacttgaaacccctcttaatagtacggtttttcctaaactcaatttcgaaagagaaaaacctagtctaatcaccttcggtatttttcgcacttaggaacattcaaattggggggtctccttgcattcttagccatcacaacttgctttgggagtaaactcctgtgaataaacttgataaacacgttagtcccctttaaccaccttgtcattaatcactaaaacccactagggcgtttaagtgcaccttcggttgttttgctagttctcttctctcactatctcatactctgctgtccaatttattggcttggtgtgtggtgtgctgctgcctgctttggcactactatatgccatgtgctctgcaagcttgttggtgttgtagggctgcacatgtgtgcttgctgcaagccccaaaaaatgctagtgctgcttttgctagtgttgtgtggaggatctagtacttttgctagtgttttgtgctatctagtggtattatattggcaagtagccaagtgctgtttgttttattcatttatcctggatggcttttagtgctttgtcgtttgtgccatgcagccatgcttgtgctgtggttttgtgactttgtcaataaaaagaacttgccaacatgtagtgtccagtcttcatacagctcttgctccaactaccattgctgatgtcgttgtcaccgctacgtcatcatgcataaggccgaaagcaaatatttcactattcgtcttattaaaatattttacataattataatttattattgagtgaattgcactttgggccggttattattgcctgagttttattttggactaggttatatctaacgttttcactttggtccaggttttcttaccttctactccctccgtattttaatgtatgacgccgttgactttttaatcaatgtttgaccactcatcttattcaaaatttttatgcaaatataaaaatacttatgtcatgcttaaagaacatttgatgataaatcaaataacaatwaaataaattataattacataatttttttaataagatgaaaggtaaaacgtttgtcaaaaagttaacggcgtcatacattaaaatacggagggagtattacacattggatcacttttttgtttgccgctcgttgatttcattagcgagtttacccacagcacaataaactaatgaatattccatctgaccttgatttctttactccttgatttagttgcttgtcttctaccatatttccccttaaataatcatgtgagcttagaacaagtcactgtattgagcttgcaggcgacagctacagcagccagctaccaccaggcttgatcttgtcggttcctcaagctcgggaacagagcagagagagaaggaatcctggtgctttgtttgatcatccctcagtcagatcc

SEQ ID NO: 6403 - DNA, 2000 bp, Oryza sativa
ccaaattggttagaataaacatataggtagtaaatacatatatgatgcccatatatgcgggagtgaatgcgacaaaatgaggcgaccattatacagcaatgcacactgctattcctgataagttgggacatacacatagtggggtttgagctatccacggtggtcggaggtgttgcagggtgagcagacaaaacgaagcccaccggttttgcattttcgtgggcgctggataggccaacctcactcgcttttagcgcaaaagcaaagtggagccgccaataattgagcgacacattaccaaggtccctccagtgtgctggcccggcaaatcccccactacgtgtgggagtgagtgagcttcttctcctgctgctgctgctttgcccgttcgtgcagcacgtaacatcatcctcacaaagacaaagatgggttccatggacgatggatcatgatcgattgatcatagatgctgcgtcatcatgctttctgtgcttgggattagatcaccagaatcttagttacaattacagacatcccatggagttcagttcaggttcactggttcaggacttggttgacatcgaaggcacaggattgactatacttcatccgtttcacaatgtaagtcattgtagcatttaccacatttataatgatattaataaatctagaatgatatatatgtctagattcattaacatcaatatgaatatagaaaatgctataatgacttgcactatgaaacagagggaatagcttagtagtagtatatgaggatgatgactgagacagacagccgaccccacaaaaaaagagtgggacccacgaagcaaatctgagtcactgaggagaagcagcagctaccaggtggcaacttgtccgtggagcagcaagggaagcgagcgagtcactctcagcgtcacgcaccgcgcctttgcaaaagctaaagctcgcagcggcagcgccgccaccactcgcactctgctttgcttccttcgtcacactgccggcactgcactgcctgggaggctgggattccagattccaggttccactcgaactcaagcaagcatccagccactcgcgggcaggcacacgcagtccaggctgctagctagtactcagattcttctcgtctctactaggactaggcacaggttcccgcatcatttctaacaatctagctgcaactagcttgaagctggcaactgattcgtactccctccgtcccaaaaaaaaaacctaaacctagaagagaatgtgacattttctagtacaacgaatckggataaatggttgtccagatttatkgtactaagaaatattagatgtcacatccttgcctaggttaagtttttttgggatagagggagtattaattatccctctgatcacagcctctttgtagtgagagagactgttactgttactgttgggctgaagatgactgtgctactgatcggacctgggctgttgagttagtgatcattctgacaattagactcgtacacatgataagaattttttttcttccctgatggaagtgcgctcgcaaagtgaacgtcatctcagccttcagatcaagcttgattcatcatcatttgttgcgcatgttgtcaacctctgcatgccactttggcaaagtgctctaatccccagtgaaaatggcgccttttgatcccccaagcttttgtggagatgcatgcggccgcacttggggagagcatatttgcctttgcatacagctagctatctctaacctttgtgctgtgctgagcacattccatttcccagtttaaaagaatcaccttttttttcttcttcctttcctccctagcttgttgcagctgctgctccaagtagtgtgtggcgatccttagttttttgcacttagggagggtgcactctgctgatcctcttttacttggttcagtatcagcagcgcctctcctccggagtacatgacctcggcgtcgacgcagttcgcggcaccggtcaga

SEQ ID NO: 6404 - DNA, 2000 bp, Oryza sativa
aaaactgaactaatttgaagcaagtctagcatgctagttcattaacatgtaaatatttgttagttttgcttaagtacccttgaatcagcagaaaacatcacacacatgtcaattcattccactcatacactaaaaagaacagtattggaattggatcaagggttgtaatcactcgattcctacagctaagaaatgaaggtggtgatatcaagaacttaagcatttcctatcatattgaggaccattgtggagtgtgaagtcccaatcattctggccccaactgaagctaatggtttcggatatttcctctccttacacccaaccaactatggtccatagtttggtaaccatccacaagaatatattaggtatacaaataatatgtaagcccatctggaatttgtcatggatatgtaagttcctcctaactagtagcatttatgggtccattgaagtatctaaccaaatcataatttcatctgcttcctgatgtccacggccttttagttagtacagtacatattaatatgtgaaccgctctgtactctgctaagcaaccgaaaacacatgttaaagaagtggagggggtccagatcatagtttatattcctattaaggattaaagataatgttaatctatcaccatgcagttttgtgtatataattaatgatctgatataaataatgatatccatgatctgccttgttacagaaagaaatatgaagcaggtgcaagactgatgagtttggtgaatttttaatctagggttgaccaaacagatgaaccaacttatattagagtataaaacagaaagttccacatgaaattagtttgatgggagcatgacaatagctatgattctggaagcagaattattatagagaaaataaagaaataaggtgggtggcaaataatattcatttaggcagtgtgactgcaagatacctattccggtttatcctattttattgaagaataaactaaggaaaaagtctatgatcagggtttccgttgtttaggacctcaccctgtgtttaataagctcatgggtttgtactggtgcaccaaaatattttccttgttaaatgatgaaacgctagaattttagagctggtgagatcagggcatggtatttcatttttttaaaatacaaggatgacccgtatacaaccactctactactatgtgcgtggtatacggcacaaatcattttcaatgttgacataattctgtcggagaatggaaacaacctccatgaagtactcacctcttgatctgctcatgtaggcaaatgggaatcctttggtttgaacacagtggataagtcgaacggtttcaatagccgagaagattcaatacccggttttcgagttaaggggcttttagaaaaaaaacacgatatttcagggtggtaaaatggatttgtcccccacaaaaaagttagctgaacctaactaggaacaaatcagagacatggaaggggaatgaagcatcaatagtggtgatggtggcgtggtggagatgatcagatgatgcagttagttagctgttaaaaccgagagcgccaaagggatggaagagaagaggaggtaggcgtcagccatcagggctggcagtgtcaacaccatcatctgcctaagcccacggttgggcgctgctggcttacctcactttacacctaccttgaagggttttatcaggcagaggctccacggctgctgcctgtgtgtcctcttcgctttggctttgcaggtaaaattaagctggtaatccagtgatgatgccatgacctgtgcaaggaggaggcctaccagcctaacctttttctcaccaactcagcctctagaagacctccccaattgagtcaagtccctataaaaatccacccacccatttgctgcccagcaacagcagcagcagcagcagcagcaacttccactgaaacaacccaccgaggcagcagaagaaaggaaagaatcaagaaagcttcatcgtcttc

SEQ ID NO: 6405 - DNA, 302 bp, Oryza sativa
  misc_feature (1)...(302): n = A,T,C or G
tttysgggggnaaaargggggggggattcttgccatttctcgccgattcggagcccgcattggatgccggagatcgcgtccttakagctgggttgggggraggcgagctttggttggcccgaggtggcgtctcacggaggcaggtgctgtgtgcgcgaggaggagaatttcgccgagctgtgttgagtggtggcgaggcgattccccccgcgcgggagttcgtggtggaattttgacgtgcgcgaggcgagatgcttgttgggaggcaataatagggtactgaattcgccggtccacgctcg

SEQ ID NO: 6406 - DNA, 2000 bp, Oryza sativa
gggaaacgcgcgcatcagttaattactactccgacacgtcgcgtcagatcgagtggaagggtcaagatggccgaaatttttgcatgtgagggggagtttggatggggtcacatcacatgttttacactaattagaagtattaaacacaaaagaacgataaaacctactcctatttcataactctgaattaaatcgtgagacgaatctattgagcctaattaatccataattagtttatgtgatgctacaataaacattctataattatagattaattaggcttaaaaaattgtcttgcagattagctctcatttatgtaattagttttataaataatctatgtttaatacactacatccgatgtggttcttgatccaaacatcccctaagcaggtgcaacaaaataagcacgcaacaatcaaatttggatgtataagcgggatgctcagatgcagtagattgctttccatcgaaccagatttccaataaactaagtgatccattgaattgagggtggaatttgatccctcgagggatgccgcctcattgtttgtatgtcaattaaaatagttatgaaaaaaataggcgggcagaatcggcgagtgcggcacagagcagcgacgggtgcgggcggaggggaggcagtgaagcggcggcagcagagcactgggattagtgcgttcatggaacctgtcaaggagcgtgtcccgtcgttcactccgttgagcaagcttgggtcgaggaactcgccgacccagcgggatgcttgtcgttcatgtcgtagacgacgtccttagccaggtcgctgctgtccacattgcaatcgcaccacacgatgacggcgacaacctgcccggccatctccacctctcctcaatcgctcttgctccacgcagcgctgccggccaactccacaagttcacaaccgcattcgcccgccgtccgcttcgccgctccacccaccacccaccgcccactgcctccatttcgctgccacgctcactgattccacccgctgccggcccgaagaagggtagagagaagagaaggagaagaaaagagaagaaaaaaagatgtgctgctgacatatgggccccatgtactttttaaaaaaaaatttgttgactaggatgccacgtcagcgaagccacccatatatgttgccataggaccttgtatgcacgatttatataagtttaggggtacacatttcttattttgtggttaagggacctcgaaaaatctcgatgttaaggtgagggacctccggtgaacttattccttgttagaaacaagccaacaaaaaagcccatgttaaacgagacagcccatatacttcgataggtctcctggtcaaccggattgaccgtgctcccgtgggaatcttgcctagaactagaattccaaacaaggcgtgctgtgcttatacattcgtgattactggattgcatgtgtttagacataaaaaaattgggacggctgaaattttaagcacaaagagggggcgggactggtgggccccactttgactgccacgttggaccactttgaccgccaccgtggcatcgtccccaaccaaccccggcaacctgccggaatccagggtggcgagcacacgtggaacagcgcctccagtgtggaactcttgtgagcgcgccgcgggtccttgtcaagctgtcatcatctcgtcgggaccgccgccctgtctttcgcaatcgttttttccaagctctggcttccgttgatgatggctacccgtgccccctgggccgtggccgacccgtacgaaattataaatgccattgctggacaactggacatcaggacatggatgctactactactactacagaaaaggagcaatccgagtcgccacctactcacctttcggctagacattggccatttcttttctctgaaaaagttttgcccgattctgaaattctttttttttttgggtggaaatggcattttccattttggtaggatgatggaatggg

SEQ ID NO: 6407 - DNA, 2000 bp, Oryza sativa
ttattaggtaaggccttgctactgtatttgcattgctgggaagctgagaggatatgtttccatgttacaccttagggttagtgctaattagaatctaatcctgaagagatatgataattgcgtcgcaaccttactcgatattctggtcgacgacatctgtaattccagtacatattaatatttttttagtataaatggggaacattatcttcaaagctaatgattcttttaccaaattttctgaactttatccttttttctggaagtaccatattcgaatttgcagaagagaatatgcttgcagctcttggctctccccatgtttacgaaatttatatttcaaaacgttccacagaatttcatacacattacacaaccagctgaactctgaccaatcagacaacacctaaaattaacccaactaatcccctgccgaggaaagacagtctaacttcgatttgtacaggataaacaaaccgaaatcatttactagtagtattacaaaactagtatctgtagctgtcagtgaattagtctgaactgaatttggatcggactcggagtatatgtacccatccgtcccaaaatataagtatttttagcatagtgacaaatcaaatatttttaactttaactattaatagcaaaaatataaaaaagattaatcatataaaattaatgttattagatttatcattaaacaaactattataatatgcaactatttttatttaaaatattttacttttatagatattattactcaaagtagtattttggagactagccgaagtctaaaaatgtttatattttggaacgtagggagtatatataaacagcagctccagctagaagccaagccaatgcaaatcgtttttgactgaataaatccatcgtctctcaatccccaaaccgcttctgctgcgatacaccaccaaccaagaaaccaggggtggttttctgtcggtgtgtaatactccaggaatccgggggccagccgcaaaaaaactgtccgagtcgcacctaaccagaggcgtccccgtgctataaaaggcgcgcttccccctcctgctcttctcttctctccgctctatttttttcatcctatcgattttgcagtttagccctcgaagaagcaaggatttcgagcccggtccctaggctcgatccggccgtgtcctttgctccgatcgagcgcgcgaggtctcgtaaggtccatcctgagcttgttgctgtggagtgcgcgattccgcgctcgatttcgtttcttccggcgcagatttcgtgttttttggcctagatttggcttgtgggtgaccgcctaggcgtttctcgcgtgtttcggctttttgtctgggatcgatttgtggctggatttgcttgttcctggctgcggagcttggatcttagcattagaaaccctcagattggggatttcctgccggaggaagctttttggaggagctgcctttgggaggaactcttccagttctgagggtttcggtgtttgttgctcgcctggctcgagaagaagctgggaaatctcgtattttagggcgggttctagtagatttcgtgtagtggagagcaaaaagtttgtgtggttttggtggtcaagtctggtggtggaagcccctcaggccggaratttcctccttccggtggacgaccaaaggagccgcccttggaaggaatttcttgccatcccagaggtttccacttcctcaccttggctaagtttaaaactttccgctgttttcccttgccgtgtagtaacmagtwtgggttgctgatcargtcttggttgtgaaaaatgtcaggttggggatttcctcacgcccaggaagccaagcaagggcagccgagsgaactacttccaaattggracgggtttgcgcgtaacggtgcggctatataagtggaaatctgcatccctgggaaggatacaattgttttgaggctgggaactttggaattggtttgcataaggagttcttgga

SEQ ID NO: 6408 - DNA, 138 bp, Oryza sativa
cccctggccttgggccaccaaaaacggccaaaaaccgaggaaagcccgtttgtccctggccggcttcttcctcctccgtccgsgttggtcgttcgcttyttggtccgcaagcccttcaaggcgccttctttcctagcg

SEQ ID NO: 6409 - DNA, 2000 bp, Oryza sativa
agatccgtgccgttccggccggatctggcgggatgggctggcggcggggaaggcgtctgcggcggggttgacgacggcggcggggacgggcgacggtggcggtcgaggtgagttgcgccgggtggtgttgtgggtgatggcagcggggatggcgacggcgttagggtggcggtggtggaggccgcggatccggcggtggcgcacccggatccggcggcggcgtggcggccggcggtggccagagcacgcaggcaccccacggctgccactggcgtcctccggcgcccctctaggcgtcggccggcgttggtggagaggaagacgaccggatctagctcccttgctcaaatccggcgcgtcctctggtgggaaaggggtggttggagtccggtcgttgttcaggtggtgtgaatatcgcaggtatcctcggtgtgcaggtgacatttgtaggcttctgtcgtggatgctttggttgatgggtgctccaaggcgaaagtcttgctccgctctcggtgctagcaatgacgacgcccttgggcgtcgttcaccttcttgaaggcgttgctactggagccctcgttcaactccacttcaagagttttctccgggtaaaaacctagattcgttaggatcggacgatgtcgccgttctgtcggcataaccttcttgaaggcttcattttaggagtttatctcttgttggacggctgtacttaggttcagtttgtcaatgtcggggtttttgccggttttcctttaattaactgtgctgttgtaaggtttttgggttcggtttcccttataaactagatcaactctcttcttctatagtgaattgcaggagctccctgcctgtcccctagaaaaaaatcccattaattgtctccttcctacatgttgtgccaagatcgttaattacctcgccttctaacggttgtcgtcacacctatcatgccaagccaccaataaatgaggatatggcatggatgtggtgttgcccattccttattggctctaaccagcctaaggcgtggccgcacactcttccataaccttgaccatggctatcatccaccgcactcccattgtcagctagtttgtgtctataatgactttttgggtggctcaatcgaaatcgatgagtgatgacgataactatgatttggtgaagaaaatattaacgatgtgagtacaactaaaccagacattgcattataccttagcggccaatataccactctaatgttttattgatcatgctagcacatatcaatcttattcttatgtatccaactagcttgtttttgcgcgcacacacacacacatgctgttgtcaagtgcagaggccgccttcatctagatctagcgatgtagtgtcgcccttgtccaatgctttagtcgttgttttctacattaactcaactcaattttcttcggtttwatattgtccaaggcaaaatctagccatggtgcaagcatagtgccttttgcacttwatttctctatgggccgcctccatccctcaagttaccatatcttctataaagcttgtaaagggatcgatgattccatagcttctctaatggtgagatttaactttaagggttgaaggaaattaaacgaaacaaattaaagatataagaaaaagactaaacgaacctatttagtatattcacagttgttcwatttacttggagcgactcctttttttcctcttccctctaagattcacttttgatagcattttaaatactctcatgaaacatgggttaccacttggaccacataatctcatgaaacatgtgttatcagttggaccacataaaatttgtcatcttctgttcctttttactgacaacacttcccacatccatgcaatcaaagagataaacactatctcttcattttttgcctagtaaatcaatgaagtcatttgtacctacattaaaagctatacccccattgatgacctaacatgtgtacacttccaaaagaagacac

SEQ ID NO: 6410 - DNA, 2000 bp, Oryza sativa
atttcaatcttattgaaaaatttcctaagaagccctttgaaacaaaggattgaatcctatccaatcctttgaaattcctatggaatggacaatcagattttggaggaaatttatcaagaacttcaacctcttggtaactttcctttaagtctatctctctcattcaatttctgcatttttcctatggttcaatcaaacggtcattcctgtgattttccttcgtttttgtaatcctctattttacacttacattcccatcaaaatcctacgtttttcctattcctatgttttctcagtcatgcgattcaaaagggccctaattatacgttatacgttaattggggaggatttttactgtccttgatagtggccggtaccaaatcgtggtcgttcgatgagcaagatcaaacggtcgagcatgagcggtaccgctactttgcacgggggtaccgctcctccttccgcgtgcaggagtaaattgaaagagtaaatatgtactttcgcgtttatcctcttccatgatgctctcgcctctcgtttttgcatcgtcaaagccccaggcggcacggcgccgtcaggagatcggcgatgcccaaggcggcgctaggagctccagccaggctctcgacggtggcgcttatatcagggtgatgctcttgccagcggcagttaggatcttaatgaaatctcaagaggcaaagatcaggggtccggcgaagctctcggcggtggtggtcagaagctcggtgatgccccccagctgcgctcatgggctactgggctagaagatgctgccagttgcacagctgacttcccgtcctttaatttcagcgaagctcaatagctcacccacctatttctttcgtggtacaaatatactggtgttgatttttggtggaaaaaaacttcgttgttactcttgcttactatggttattggatcgattaattactgttatattccattaagcaataagcatctagccaatagccggctcaagatggcggcaggcacagcggcctcgatgagagggcggcgggctgaatgcggcggcgcccgcggcggcctcgatgcgccggcggccgcggcggcctcgttgcggcggcagccgcgccggggtcgatgcgatggcgccgcggcgggagaacaggcttgatacggcggcgccggggaagcttagatgcaacggcgaggaacggatcattagcccgggcacctcattttcattagacgatcctacccccattaaatcaatgattagattagattggtatctcgtacgttatgacaccccataatatctctttaaggatgagaaagatgcttttaattgggtgtcttctcggacaagtcaacctgtcaaacgaagggggattctaattctaacaggtgatctgttgacgtggccagtctctggtcagacgcagcctccatccccagaccccagccgccgccgcccctctcctctccggtgaagttgggttgcttcgtcatcgtccaaccacaccatcccaaagccgccgctcggctgccgccgccattacgtcactactggaacttccttccaggcaacccaccacccgccaccgcacctgcccataaaacccggccacatccatcaagcagcaacagcaactaccagtttggaactaccatcccccgtgaccacctgcccgctttcccgcacaaagttcactagtagttactgctccaatatggagtagtactaatcctccgtatactcgaatcccaggatctctcccggtcggatgctcactcgtcttccccaccactcgtcgccccttgtcttcccctgccgcctctccgccgccgccgccgcccggacgctctccaccgccaccggcagcaactccaccaccgtcaaggttagacgcttcactcctcactggcaaagctctcgcgatagtatgtttcttggatgatggatccgtgatctgatcagtgctctggagagtggtctctgtgggtgttgggcgcag

SEQ ID NO: 6411 - DNA, 2000 bp, Oryza sativa
tagctacaaactttcctcgtcatggcaaatatgaagttttttttgggacggccgtattaagatgaaagctcctagatcgatttatgtcttgatttattcatcttgtgttcattgagtcaggtacttatgatataaaatcacatagtaataatgttctttaaaaaagagcctttttctgcactacatttgcagatctacatcagaacaagggttctagagctatacacgtagcatgcatacctgtgactgtctctgtgagcctgtgactgtaacaaccgccatgctgcttccttcaagaaacggccactgatatgtgcttcacagaagaacaaggctgccggtgacaaagccttggaacagttgaagaacctgctttgtgacaagaatgtaggccatgcaagacacctaacgccgaatcatcatcacgcaccgtgtgttgagagttggtacatggcacatctcgtttgacctgatcgaccgatcccccatctccatgcatgtgttagctaggatatcagcacctgtgttgtacaacaaaatgcaccatggtactacacatcctctctccgaccattgatgagccatcagaactcccagttgatttgatcgctgcaacaacatacaaaaggtaacttagtttggcagtacaattatacaaggacaacagcatatgaaaaatgttggatattatcctttgatataacgtttctactaataagtatacggaatgtagcatcatactttaaatgagccatcaaaaatgccagtttgatcgctgcaataacatagaaaaggtaacttagtttggtggtatctacaaggacaacagaatatatgaagaaaccttagagattatactgtgatataacgtttgtagtaataaatatacggcaatgtagcatcatacttttgatccccaaagacagggatacgaatccaagtttgatgaccaccaacaatagaaaacattcatgtgaatagtccagcatacataaggtattgcattaaacaaagccgtatgatctgtagtgacacttgtgtataaccaaagtagtaggattaaaacggaagcaaaaccttacttttgtctacgcttttgtgctttgtcagtttgatttcacacatgatgtgcaaattatcatgtgttttgtgaggttaaattttggatatggtccagggaatatatatatatatatacatactagtacaacctgtcaggtgtgggcctactatgaggcaaaaaggttaaagtgagaggaacgactgatatatctttgtgcatatgcatgcctcattatggtaatttaaaacaacatctctaacgttctgatacaggagggtataatataatattatataatccatcaaaggtttcgataatgagtagaaagataatgtgtagtgtacaggggcagattatgctgccttctagtttttcatagtacaagcagttatatgaatatttaattggaatgcttatttttaagtagcattttctgtttcatcagaccattttatcctctctccaactgctaagcaatattgagcttcatttttgagagattatcacttatcactccatctacacttgttgacaatgacaagcattaaatcttcaaatgactttgctaaaattaaagccccaaacaaamcaataagacgaccgaaaagccttgcaagcaagttggagttactattagctgataattgatggaattactgaagcagttgagcacaatgcgtagctagctgacttattttatacgcatcaccctaacaacccaagctgccctgccgcgtctcatctcactgtcctctgctccaaaccacccttcctacatgcacccccccacaggtgctatatatgccaccccatgcccgcctcttctcgccacccacaaccaagagaagtagaaacaaacagagagcaattctcttctcctacctagcaacctagtgcagtgcagtgcagtgcagcgaaggtttacttggcgacttcc

SEQ ID NO: 6412 - DNA, 1956 bp, Oryza sativa
ttagggytgctwattaccacwtcckgcaaawtttaccactgatgaaatcctctaacgtaagtacttatcacttcctatatctgaaactgacctgaaaggaaatcgttacagttagcacaaaaaaggcaagatctctcgtagcatcatcaccatcaccagcatcatgcagtcgtgtagtatggtccatagcttcttgaaaggaggctgaacaactaacacctttcctaggaaagaaccccacaaaagacagcaacggattgaaaaggagaagaagatgataaaaaacattttcagaaaagatgattccaggactgaagaagaatgcagtaaagatcttggcttaccgaagaagacacgcatgcaccgttttcaggtagcctgaccatcgtgatctctctcatccgctgttatatgaattactcgcatcgtttttaatagtagatgagttaacgacatgtttaactattcatcttatttaaaattcctatataaatatataagatataaaatatacttaaaatactttgagggatacactaattcacaacaaaataaattataactacatacttttwaattggataaataactaaacgtgtaataaaaagttaatgaagaaatctattaaaaacacaggaggtaattctctttcttgtctaacctgatagaagtacatgattaatcgatgattagccgataggttgcattgctagttggttgctgtcagacataccggaaatgctgtcctcttctctgtgctctctgctgctgttgtgcagtccagtcaagaaccgactggatgagctgtcagccgtgcttacctgctttaatttatgcataatgttgcttcataaactgtctcaaaaaagattaacaccaaaacagtagcacaccgccgttcatgcatactaatgacgaaaattgaccataggcgtgacgagtcacgtcggtacaggattaccgccactgactagccgggcccacgaggcagccatccattcgggaaaggaaaaagacgacgtggagtcgtggactcactggccggtggggacagatatgtgggccccaccaatcagttgccgtcggcatttataatttatttatttatttattttatttagagtgtattttattttgttgggaggtgataaaaagtctccgcttccacagctttgctactaatccgcgcactaattggataatwaktrgtggygmgrragcccaaaggagcaaagcaacaaggggaaaatacccgagacaaaaagcgaattcgataaaacgagcggccgctcgaagcggccactgcacagcgccctctcgcctcctcgcctcgccgccgccgccggcttaaggctctcctccccgcgccgtaccggcgggagtgtggaggtgttgtgctgcggcgtgggtgtgttgggagttggggggtgaagcatgatggatggatccaccgctgcggcggcggagctggaggcggcggaragggtggtgatgaggtgggactccacggcgtcggcgtcctacgggggccgggggcggggacgagcagatgctgttcgatggcgscgktraccgggtkkargcsgarcggttcctccgggctgtggatgacctacggckgctggcgccgccgtccccggccacggtcgggagcccgcgccgcacctcgtccggctagcggcggcggaggggcggcgtccaacgccgttccaggtgcccgatggcgcggctggaggtacgagttccgccacgtgctgtcgtcgcgcgccctcgaacctggagatcgaggcgctcggcgaagttaacttcgctctccatgtgcagcgaccggaccaactccgcgaacttgccgaagaaacggcggctgcgractaagasaactccgtgtcgtcctccgtckcgctscwgcaagattwcgtgctgcgcagcatccgagaaatcgatctckcggacgcc

SEQ ID NO: 6413 - DNA, 2000 bp, Oryza sativa
tttgactttggtcaaaatcaaattgctttaagtttgactaagtttataaaaaaagtagtaacattttcaacccaagataaatttattatcaattaataatttgatgaaactaatttagtattataaatattattttatttgtctataaacttagtcaaacttgaaacagtttgactttgaacaaagttaaaacgtcttataacctgaaacagatgtaaaacagatgtagtactgttttgtgaaaaagaaccttgtgtttgtgggttctacatcattttcttatgtttaattcgtaactgaagattttttggttgatctatctctcatagcatctatccagatcatggtatgcccacatatctatgaaatgagtttaatatgtgtgtgtatatatatatgtgatgactgattacataattattaatattttgtactttttaatgattgtgatgaaatctagctctttattcttatgatttgtatcacattgaagttactcaaggcgcagataaatggctttttccttgttaaatatatataatttagatggttgcactgttacagaagcattttcatgtgtgtatgtgtttcccaaattgtcggttcagcatggcatgtttcgtcacgtcaattaatgcttatggtgtgacaaggttattttataacgtcagttttcttggcgtgatcaaaaagtttagatttaaaaataaaatttggcccgatctattattaaaatattttattaaaaagttttaaaaaataataaacattccctacgatatttttattttaaaattctcactagctagctatttatctgcattaaaaattcgctgccttacaactcctagttaacttgatagtaaaacgtggccatgattcacagaacttagacacatccataatgaccgtatttagtttgttattaattactattattactattactattgaattctaaaagttatagactaaatttagccgtgcaatttggatggacccttgcttgttacatggccagttacttgtttggaaggtagcaacagtacactatacactgactaaaataacccaccacgtgcaacactacagatgctgacttgattgcgaccaaacatcacgagtgagtaacatgatcaccgagcaaacctcctagctatcgtgtaatgccgcacagcaaaagataaaacgacagttaatattttctcttctaaaagttacacatgtaacttgcttattgtgtttgagactttgaggtgaggaacacactcctaacgcatcgccggcgctttgatttctataagatataataaattaagataataaatttgtgtgatatacaaatatatgtactccctttctcactgagtaagacgtatacatgttttaagatccaactctttgaccaataatattcttttataattaaattgatttttatttaatatcattgggttgatatttgaatttactttcgtataactgtgattgtgttgctacaaacatcgtaatatttgagaaattcaaatataaatattagttttgaataccatgccaggtttgatcatgccataattagtacggtgaagggagtatagttaaagtttttttttatagcttgtataaattgaatttaaacttacatgttttctagactaatatactattaatctatcttttatcctttttataactagttactctaattcggattaggctttgtttaggggctggtttgcaacaaccccgcttttttttctctaaatcttaaaataacttggtctggtctctttgcgggctgggcgaaaaaaaaatatgttacacatgtctagattttcaacacagttagttcactatataagcatcagcctatcagctcgacattttatattcacaggtggccggctctcttctgcacacaacgtgtagctcgacaatctacttagcaagatcactttagaaccagaatcaccagcaaccatggagatggagctaccatc

SEQ ID NO: 6414 - DNA, 2000 bp, Oryza sativa
ttaataatgtaactcaaacctaatgttaagatgagagataccaaaatgaccgataagtttaggcacacaaatgcattttaagagttaagagacccagatgacatacaacataagtttggggactactactgtacttaaatctttattttttttccaaataagatggccatatttatacccctatgaacccatatgagattgagccggcatatcttgagattgacgaaattaccatgggtggctcgccgtcaacggtacgtcgcctaccactgaaagaataagtagccgtaaatatgagcacccatatcaagtctaggaacatacccagttgagctatactcacttcgtagacttttaaattttaagagtatatcaactggattcgacaacatgtcttaattatacaaaaaataatattgaaatcataatcaataggaaaatgaaatgatatttaaattgtgattggttgggaaaagaagtaatttagaaattaaatttcatgatggatttagctgaaaaactacttaacagtatcccgtacacacgggataactactaccactaaatatctaagcatcttatcctcttatttgtctcttccccttccatctctccctctctctctttgactaccaccctcatgagcacagagacgacctcatgagcacagagacaacgatggcggttagttgcacggggtggcatgttgggcstggaggatgctcggccctctctccttcgccagcactagggaagacatcaccatgcggagctgctcccgccggctcaggaacgcgcggcgcggcatagcggtgaagcggcgtgcgagctctcacgccgccgcggccactgacgaggaccgcgagctcctccgtccctccaccccacgcgacagcgctgcatcgccgctgctcccctccgtccaactgcctccccacgccggcggtgttgcgccgctgctcgcatccattccttagatacctgcaggtacccctcgcactccattccactttggccaattcctccacccccacgtcggcaatgcttcaccgtcgcttgcacccctttctcatgtgtgtttttctcttttttttgcttgatgatttccttagctgatttttttctccggcttatatggatagtatcgattcccctgtcccatcctcttgaatctctccaattccataagtaccagataccaggtagcacacaccaccagatactaggtaccaggtatcaggtaccaggtatactaggtatcaggattagcctattaggtaccagcctgtgctgtgctgggtaccaggagggagcacacgttcaccacgtggaatctacctagaggaaaggaaagggagtagtcacttaaaatatcccgtagcaatagatcccgttgtgtagctgccctctattgttttcaaagctatactccttttcgatgggcatagatttgacagtaacgcaaaggatcaattctccctctaaaagctccaatttctgtcttggaaaagaaaaactttccaaatttcaaaccaacaaaaacaagctgaaacatgaaaagctgagagaatggcaaatgacgaaaatgccccccctcccaatatctcctctcacccgtaccgtcaactcctccctattccattcccttttctcctcctcctcctcctcctcaccgccggcggcgagcggccggccggcgagcagagcagagcagaggagagagccgacctccatctgggctccaatcgaagctgaaggtatccgctttcccctcctccggtatggcgttgatcggagatttcttcccttcccccctcccctccaaattacctattttgatccggtttctttgatcgtggtgcagcgcctcgtcgtagtttgggcaaaagaagttttgattttttttatttattttgggtgctgaggaagagtgtaattaagctgtgaggattgagaagatggatggaggtgggacgccggatggggatccggtgccggac

SEQ ID NO: 6415 - DNA, 2000 bp, Oryza sativa
atccgtttattccatgaacacactacgaataattactatgataaatccaatgaaaaaaatcattttactcattcgaactatttcattggatcagttccccctattgttttaggtcatttcacacctaaactattaaaaataatccactttactccctccattccaaattgatmtacatatagtttttctgaggttattcctaaatgatctacatatttgtrttcatttattgagtctattcgttatttgtgcattggagtaaatggacattgatgcatgcatctatgcacacaagtatttataacccacatgcaatatcttgatttgctattggctagaaaatattggagatggtgcatgcattgagtttgttgctagagtaaatatagtatgagagagttattagcttttcttagtcttggtgtatctatgaaatatgtagataaatttggaatggagggagtactacctaacaatatttctcctttttctttatatttatataagttgtaattcaagatgatttttagagccatagatgacacatagtcaaagttctaaaatactagcaaaatgaccatgttttgctatgggtaaagaaatatatatatrtgtatagataaaatacgtttttatcaaatatgttagtatcacttgttggtatttaaatatatggtattcacttatttgaacccaatactagactattccagaatatcataaaatattatggactaatttataaaagttaccaaagaatggtgggtkgcagtggcaaattcactgccacctataactagtgccttctaaaggagtacaggttttcaaatattttcgtgattgtttgcttgaactctttaatcttgaagtttaaatcaataagagatgccatcctatgtaacaatgataaaaagtattctaaaaaatattgagaagtactcttaccaaatttcagggtaaaatatgacttatgtagagaaaaaaaagagaaatacttcgtggaattraagtgaaacatttaaaatattttggggactaaaatgtgtcaacaaatagtttaggagattaagtgcgctgataaaatagttcgaggggagtaaaatggaccctttttttttctaaatccaaatactacattgaggattttccccactagatttaactcaagcaactttgaggtattattggtgtaccgtgttgcaaagggtcctctccttgccaaaattggtagactttcatgacagaatccctgtacattaattgcttatcaaaatgccaggcatgcattgcatcccaactgattatatatcccacccacagatgaaactcatcaggatagatagcactaaatataataatacaaccaaagaagttcccaagaaaatcacaaaagattaggccatataacaaaaaaagattcttctacagtgattggtcaatcagcacagtaactagtagtaaaaactttcccccttgtgagttctcagtttctcacatgagagcccatggatgcattgctagagacaaaaggacaggtaatgtctaatgtgtgagatactccaatgatgttttaaataaataataaatgtataataatccatttgatactataccaaataataatagtgtagtatctcatttctttattagacatactctgccaccactgcacacaatccactgcaaaatctctctctctctctctctctctcatgcaatgcaaatgcaacctgtcttatagagagagaaagaagagagaagaggagagagagagggtgcagcaagacttgcaggtgcccataaaagaggtcaccaatggcaatggagtgagcttgctgctgcacctgcattcacaccaccaaatgcagaaaagataatctcctttctctctctattaaacccacacacacacacacaccaagaaggaaggcaagcaagcacagggcaaaccagagcattggaaagcaagaagcagagcacatcaagaagcaagcaaagcc

SEQ ID NO: 6416 - DNA, 2000 bp, Oryza sativa
taatataataacctaagaccagacaagacatttttataagataacgaatatgaacagatgcatgtcctggttcgttaaactatgaaatgtcacatccagatctagattgctattttatgggacgaagggagtggatattgtgcatgtgtgtcatatattaattgactcgagaaaatttcttaatctgtcacaaatggtaagaaaatgctcactgtagtcctctagtttattttttccccctaaaagaataatatttgtgcctgaaactattgtacacgaaaaacaagtgcattgatatagtcaacgacacatgccatttactaggaaaaaaacatacgtatgtcatcaaatattctgtcctcccacttgttttggttagctagggtaatgacattattttatttaatttgttaatgtaagtcgttttcgatagaatattatactcatttgcttgcggaggatatgctgaaataataagaagaaaactggcttaaattagcaggattggaactagcgaaattgaccattggatcaggctaaacattgatttatatatttgaaaacatatccaaattatttgaaagagcattgacatggtggcccacttaggtaagctttctcgctcattgctccttggccgatgtactccagtgagagacgaggcaatttccttttcgtacgacacatctgggtgcaaaaaaagggaaaaaacattccatccttttcatattatatgattatttgccttttttcaaattagttttaagtttgaccaaatttattaaaaaaatattgcaacattacaaactcaaaacaaatatactattaaatattaaatgttagatttaataacattaatcctgtgataggttttgctcaatttttctataatcttaatcaaattttaaaagtttgactaagaaaaaaaaatcaaaacgtgtaaagtatgaaaagggtagcacatgcataaaaggaagtaaatggtgccatgcctaaaaaaaaatgttgccgatttgccatgttcgccgtgcacagctgcatgggcacattcatttcctatttccccctcaaccttccatctgttcaccaatgcaatttttagctcaacatatcatatcttagtataaaattatgcccaccaacttttaaagctcaatatacaaccatgccatattattacccactagcaataattacatatttattctttttaattataggaaaaaaaattcattgcgctctgccattttgaactaaaaagaattcagaattattatttttaaagaaaaagttcacaagaaacaattcaatccaattgctaaagaaattagacctttcagccacgatactgcacgccaagaaccaatgtcgttgtagaatttcccgaccatagctatcaagttgtcttgaccagaaaaaaaagtttacataaataaaatgcatgaaagattacatttaaaattttatttaaaaggatcaaaaaatataaaaaaaactagagaaaaaaaataggcgctccaagcacactgtttttggtactagtatccccccagtgtgaacgaagcaggcaaaagacggacagcctcagaaccaaacaattctccagattctgtccgtggtttggtgagctggacagccgtccacacgcaaatccggaataacccaggggcgtaggtgcaaaatgcgcaggcatgaaaaacaacccgtaggccaatcccagccaagattttgggggaacaaggagagagagaagaggagagaagaggccattcttctcttctccaccacctactctctctctctctctctctcatctcctgccttctctctaggatcgccgccatccaccacatcccacgctttttactgccgcacacataagagcacaggaggaggaggaagaagaagagtagagagagaaagatagagagaggagcaggagaagcattcgttcatccaggagagagagaggcttcaagttcttggtctcctgctctgcc

SEQ ID NO: 6417 - DNA, 2000 bp, Oryza sativa
ccgtggcgggagggatcgagagccgccgctgtcgttgtcactgtccttgtagcagtcgcggcatgaaggaagagatagggaagacagaagagggaggatggaggaagatggaacaaacatgtgggtcccgcgtctaggggtctaacggaaaacgtgatggagtggcacggttccaatttcttcaaatttcagtggcacgtaactaatatcatgaatattagtgtcatttatctaaaatgtcatatttgtaatggcatgaatccaatgaacccaaaaaggactccaataaacaaaggctaatcttgtatttcctcgttcttctctactctctccgtttcataatataagggattttggaggatgtgacatattatgggacaagaagtatatctactattgtaaaaattgaagatatttccactgatattttggtacgtcgtctattttttagtcggtttttaagttctttcgcttttggaaatacataaggagtcatataaaaaatccttaaaaaaactcacatgctatcttgtaacgagagtcgtagtcctaatttctttggaattcttgtctggcataagaaagcaacgtacaagatatagctatcatcctaataagggttctgaattagatatcaatattatcaaattaaaaatcccatatactttttagataaaaaataacaataatatgattaaaatagcattcacctgttacaatgtacgggtattttttcccgtaaaatatagagtaagagagtagaatcggatgagatatatccagtactattgtgctccctccgtcccaaaaaaacgaatctaggattggatgcgatgttttctactactatgtatctggacagatgtatttccagattcatagtactcgaatatgtcatattcagtactatgttgggtttttatggtacggagggagtaactgtggacagaggtaataataggacaccaatatacagttaggggctgtttagttcctaaaaacttttccaaaaaatatcacattgaatctttggatacatgtatggagcattaaatatagaaaaaaagaaaaactaattgcacagtttgcatgtaaatcacgagacaaatcttttgagtgtaattagtctatgattagccataagtgctacagtaaccccacatgtgctaatgatggattaattaggcttaaaaaattcgtctctcggtttctagacgagttataaaattaatttttttattcgtgtctgaaaacacttccgacatccgttcaaaccacgtacaaatttcaccgactaaacatgcgcttgctagctactagttgaataccggagtaaggtggtgtttggttggagggactaaagtggggctaaactttagtccctcttataaaaatataagtccatatggtaaagacttatattttaatgagagagactaaattaagtataaactgcatcagctactcgtaagctacacttatgagtatactcgactgatgaaaaatatagtggaccaccacatgtcataggcgagtgagaccatgctcctcgacttgcgactcgagttctactcctaccaactctaggccaaccagatagatactgagaaaaaaaaaacaacgacactgatgtgacatctcagtgtccatcggccatcgcctcccttttctctctcctctccttctcaccatcttctcctacagcaaatcactcttctctctctctaaaaaacttcacaagcctactagcctactactaggcacgtagctagcccctgccactctatcgcccagcacaagccatacagctacccgctgtcactgcgccagcggccgcagctgcgcaaagaggagcgcgagaacccaagaaaccaaccaagagctgcgtcccataaaggcgcgctgcttcaatccatccatcttctgatcttccatatacttcgcttcctgtaaatgtcatcgccgccccggcggtgcctcgcagcggagcagcagtggcc

SEQ ID NO: 6418 - DNA, 2000 bp, Oryza sativa
tgagtgcttttccccgcaaaaaaaatcgcaccattttcataccaggacgacacaaatatgagtagaagaatatggctcttacaacaaattcagtaagtattacactatatagcagtgattattaccttttgtagataggattttgcatctactttcactaatgaaaattttggtggacagtggtccaagcaaattgctcatgaccactctctatcaaaagcaacgctaaaggctcaattcaacgagctctcatagagaaaaagaataaactcaaaatgccactgtaacgatggctagctggtgtgatcgtgtcagctgctcttccttgcgaaagagacgggaatcaattagaatattcgcctgagaatttgccagtgtgtttggacctggacctaacatgcgtcgaatggaaagatttgaatatacacgctggcaacgtgctccaataggaagcgagtaaatgacacacaacaagttactattatcactgtagcacgaatcgcaaaggaaatggtcaacagagtgagagactattccttcagactagtcgccacctcccaattcatatggagcgaacttcgaatatgagtgagatctgttttgggcctctctccctcgcacatattttgtaggattcgtttgaatataatttgcgtatccaccgtttatgtaatcaatcgcaaatatagttcagaacatttacagtaacatggataagtaacaacacctatgatgacttctctttcaataatgaaatagcaacacatatggtgattttatattgtaacaatgataattattcacttgagtaaatagataatgcacctgtccgcaaatatatataagaattttacctagacattatgtaggtccagatacataaacaaatacatgtatacataacttgaatgtgctatttttgagaatggaagttagtaaagtattactccattttatatcttttttaggggagagtattactccatagcttgcacatggaaacacattatagtgtgatggtgcagttatagcatggcattattcattttacagataaaaaaattctggcgtaaaatgaccaaacttaccaatttttcatcacagacagctgcaaggaaaaaaagttactacaaatacaaacgtgaacaagagaaatcacgaacatctcaaacaaaaaaaaaaagagaaagaaagaaacgtgaataaaatacacgcgaagcgcasgccccgccttcgccgtcctcctgstcctttcccttttccaccttcctcccgccggaacttgacgaaatctgggaagcgagccaaggaggagggggaggagaaccccgccgcamcgcccgatctccccgtgcggcgccgggccggggggttcggagcgggagcctcgaccgcgccgatccggacaggggccaccagattcgccccgcgcstgtgccggcgccgagcgcccaggcggcgttagatcccgccgcccggcccccccaccctyccccgtggtacggtcgctgatacgaggtcctctcggatctctccgtcgttcaagctcacctgtgattgtgctacttttttttttggttgttgttgtgtgtggtgctgattgtgtgatctagtatatagaagcacgcgcttgctgcatttggtcgtgatttattttggatgtttattggcgaagttagcttccagtgatctgatatggattatctagctgattgggtgatttgaagtttagtgctggtatttgwagttwacttcggttgatgctgtcggctatgatgtgttttggtgagatgggctgggtagcggtgctacacatgaatttgcgagattatgtgaatttagagagaaatgtgttcagttttcatcgattagtttgcttagttcacaaatgtatttttttgctgcaggcatgcaaagggatcagaggccacggctatagagtgatacatatatcttgctgctgtgcttttggggcctccggtcctgcttagttagaggag

SEQ ID NO: 6419 - DNA, 2000 bp, Oryza sativa
tggtttggtactgagtaccgaccggccggccggtgagccgactcgccgtgcccgtggtttctttcgccgctggaaaacagatagctcgccgtgttaggtkggcgatcgatcttggatgcttcgatgctgtgtatgcatctgccaagttgcttgctgaacttgcagtcgagcttggccgtttgctgtagattcagtgctagatgcatcaagtgaaagctactactcctacaatggaacgggagaaaagaactgcatcataaggggaatatgatttgtgttagttgacttctaatttcttgagagatattttccgatttatattaattaactgtagcgtaaactcaaagttgcttgtgcatgggtccctgaacttccaagttcttaggataattctcagggtagaccccatcttgtcaccgccctgaatgtttgtgcttaattaattaattgttgaatagccgaatgatttgtgataactattaagggtatataacgaatgaattaactattgtaaagctggaaaatggattatacaagtaagttcatatatataaagtttttctttttctttttgcaaaaaaatgcacttgtttaggagcccaggaagtgtgcgctggcgttaatctattgttagaaaagtccatggcccgtgaatctattcatttccactcgtaaaaggacagatcttacgacaaaatcatgacaaacttgtgtgatttttgcatttgggatctcatcccataatacaggttgggcctccagttatagagcagcccatcttcgaatataaccaggccataaccaggccggcccatattggctttgctccaaaaacaaaaattaagcccaaccgatccatcatccaatgggccgtgatgcatcatgcgcaagcccacctccaaccaaccacttctgccccaaaaccatttcttcccatcatcaaaaaaaaaggaaaaaaaggaaaggaaaaaacrgcaagaaacccaaggaaaatcctcgcttcttctcttccacggggtttttctcctccaatcctttcccctctccctctcctcctcctcctcctcccttgcgccttccacttgcagcgattcctcctccccgcccgctcttctcgaaccttttggaaccttcccccatcccccacaaggttacccttcttgatcggacaacctgcctgattatttcattttatttcctgctctgatttatctcctgtatgttttcaagaaaaggagaaaaaaatggaaactttatatgcaaaattcgtttcttgtatgcacagcagaagcagcagatgggcatcgtcgtcgtcgtcgtcaaccaatccttaggcgacgagcgctgcggcggcgcgcgccatctgctcccctccgccgtgctccggtgctccccgatctgcgcctcccgctccggttggtcggctgtcggaacacgcagctgcaaaaccctagccgagctgcggcgatctcaacgctggcggcgaggccctcctcttcgtcggcgtcgacgggtaatgcggattcttccctctcgtcagttacgcgagatgctcgattgcatttcgggatggggtttatgctctaggtgtgaaccgaataattgccgagccgaaacatgtttgattcggtttgtgtatacacagatctagccagacaacatcatctcagatgtcggggtggggtgtagagcacaccatcaaccccaatttgtcctttttaagagcaaagatatactactacaagtagactgtggtttcagcgaatgtcatcttgccagatattatcggttttgatggggctcaccaatgatgaattctttccatttcagaagcatagaattcagcattttcttttagttgtgagctgtattaggatgtctttcggtattggatcaatgttcgctaaatcttgcttattcgacgcagaaaaatatggcgcatgttttatttacttccccttgctgtcactgaacacatttcctaaagtcaaggacaagac

SEQ ID NO: 6420 - DNA, 2000 bp, Oryza sativa
gtgtgttgtgactttttccttcccataaagcaaatctaatgattttaaaattacacgaaagttacatatcatgatatcaattaggagtacgcatctcatttagcagttaggaagcatatccatataatacaagagagaacagctaacccaaaactctaaaaaaaactcaggctaattaacacaaacaaattaaaaacattgtgtgaaggagcagagcagagcagagaaggctagagtgtggcgtagaggatgatgaattttgatgatgcgatgaattttgtaagcatatgcagatacagtggagagaagaaaccaagtgagattaattgagatcgatgaggtgtgcctcctccttgagatgcgaccacaccagctgttcacagcctgtggaacgcgtcgatcagcagaccaaatcgtgtattttatcatgctgcctcgtgtgccacaatattattgttaacgtaactgctctattatattagtatactattagttaattaaccatggatgacactctgctagattatgtttatttcttcagtgtctcaagaaaaagattgtgtactacgtatgtgtatgtttcaaacttacaagtaggaagttttgaattggttggggttgggcaaagttgttgtcttagctctgtgtttgtagatattagctaattgctctcatgtcactgaaaaatcgcaagttggattttttgttaaaaaaatagtaaccgtggcagcggtggaatgaaaggaaataaaagcaattaactatttcttttccttcatggcaggtcgctagttgccctcaaacatcgatgaaaataacttagtggattttagcattagtggtttccaaaaggaaaaaaagattatatatgagtagtacaaaatcacatttgctaaaatataatacccttttttaataatgggtagatcagcctttgcttccgcaaaagttacaaccaattattacagcgattatagcaactaagaaccgacaatatcaaatcagaaacaacaacatataaaaaagaaattcatggatgaaatataataccatttgtgctaaaataaccgtctttcttggttataaactgtgaacttgagcaatggtttgagagtaaatcatccgtaattctattggtcagagaagtagaccacagtcgatttaatttggaacagttcagtcaaacatctaccaaaaaatcttttaactagacaaaagcgttaagcgtatcacacaatattagttaaataaacttcctttattaaaaccatcctaatccctggcatttgacacagccaaacagtagtttgatactgatacgattcacacatcaattttccaattttgcgctgctctttcctcacatattgatcacatttgccactttttgaaaaatggaattaatcaacgtaaaattccaattaattaactaagcttcctttaataattaattccctcctaaaccctagcattaatttgacacagccaaacagttcatactaattcgattcacacaccaatttttcaaaaaaaaaaatcttagctctttccacacatcatatttatttgtctcttttttgaaaatggaactgatcaacctaaattgtaattaattaactgattaattaaactgcatgaattttgcacttttgacctagctagctagcagcctagctaggaaatcaaatcaaaccaacaaataaaactagttgatggcgatggaatcatgcaaggagatattgaatttgaaccccctgatgaaaaagtcaatgccatcagcttcttcctcttcttcaattcctccactcgttttcagatcattttccatggcgccatggcgcctatataagcacccacccccctctctccccctaaccctaaaaacatacaccatccatttttccaagcttcattccaagccactacactagcacacactacatacaatcttcttcttcttcttcttcttgagttcttggaggtcgaggggtgggtcatca

SEQ ID NO: 6421 - DNA, 170 bp, Oryza sativa
ccgacaccatcagcgccaagacgtcatcgtcgccaccggctcgaacccgcgcgaactgccgaacgcaccgttcgacgaaaagawtawccygttsraccccggcccccctggccatcgacgccgtcccggccaagctgggcgtgatcggcgccggcgtgatcggcctggaa

SEQ ID NO: 6422 - DNA, 2000 bp, Oryza sativa
gtatttttaagcagatatgatttaattttaatatgtctgagattaagattctcatatattttttttaatttttagaactatttcaatagtatatgataagtgggcaaacctaaatgttacataaatgtaaaaaataattatgaaaaatatttcaagcaagtgatcttgctataatataaccatttagtctgtcataggatttatggtcatatatgtatgtttttctctttgtcaaatagttttgataataaatgaacaatcaagtaacatgtgcaataaactactcataatattttttttatagttgaggaattccaacttatcagacataatttgatgaatgtatgtcatgcactctattgatgtgactatgaattatacttcaatcaattagttattataaataagtttgggaaaatagattcattctctaaattaattagtaaagatatcttatgtgattatgaagaataggcgttgaaaaatacgagatgctaaattatatatatttgtcaaaatgtaaccaacaatatgatcctttggagatattatcgtggtagtattttaaaaaacactttattcaggtaagaaaatcacatatagtacaaatagaagtaaaaaaaactccattattccattattgttttattatcgtgacacatgttgttctcataaattcatgtcattatcataaatttagggttgtatggtttcatataatatgttattaactaaaacatgtttaaaatagagtgaagatctattttgaaaatataatctacatgtaaacatttataataaaaaaatttaagcaaacagcctatatgcgcgggttatcttccgttatatattaaaagtgagtgcatgacagggaagaagataggagaaggcggaggtgacgtgagtgagatgccaaaaagccgggctcgggagaataaaatccttgtttgaccaggcttgggaattgggatgctgggagaaaccaaaataataataaaaaataaaaataaaaaccatttttcgtaaaagcccctcgagaaactaaatattacaaccattctcccgtctttcccgggaggctaattgccttcgcaagcaaacaaacccagcgcggtttttgttaatggagaaattgaggattaaactaatgctggttgaggttcagtatgcgtcttctgcagtgagctgcttcctcttctcgtctcctacttaaatactaaagtgtaggtttcgtctctgctcttctgcttttgtactagtagtagtagtaatctgcttctctcttcttcatcttcttctcttgtcttcccttttcttctagtctatcctcgttggctcagttcttggagaggttttttgttcgagttgtgtgagagagaattcgtccattcttgatgaggttttgggttcttgggcacttcttgttctagccaaggtgagaggttaaggttaattcttctttagatggagctttttgaaaatgtttggttgttttgttggtggtttgtttgggtttcttgatggttttgtggcttcttttgttcttggagaaatatgtaaggggttgggttcttttggattttatttggggtacgaataattgaagttcgtttctgtgctaatttggttcgtgggttgtatctatcaattgtcttgattttgagggattaatgtgtagtttgtgcgaggaattttgattttggttcaaactgttgttgttgggcgctttcccttgcaaagattccttgtgtttcttccttttgggtgttttgagtcgattcatgccgcgaatttgggttgaatttgtttgccacaatgacgcggaagtgaaattttgaattgatttttgcagagaaattgcgatttgaatacgctccatcgatatgtgaagccatccaagaactcggtggaaatcaagaattcagaggccatctcgaacgagctcaccatctgcttgcaagaatcagcgagtgcgaagttgacgtagacgacgagaagcc

SEQ ID NO: 6423 - DNA, 2000 bp, Oryza sativa
aagtcctcttttacgagtagaactgcgggcataccactccaaggctccaagctcacaccaatacacgtgcatacgtagtcatatgtgtccgttacttatagtccaaaattgtatgacatagaagatgtatagcatactcatcactttcttcgagttgatagtgcttgtcattttgaataaagacatggtcttgaccgctattttttattacaatatatgtaaaaatatcaataaatatatgattttattgaagtactttttaagtacaatctacatatatggtcaccatatttctaagaaatattttagatattatttatagtcgaattttttagagtttgataatagccttgtcaaaaataacaaatactatcaattcgtaggtagttttacacactacatttactgtatattttaacccttattaaaatcctagcgcacatatgagcgtaatatttatgtacaccaaaatttaaaatttcatgtgtaaagtcatacaccatgactctacaccgtatcatttttttgtccctgtaatatggtaatatattcttaaaactagtgtaagttagtgctaattagtgggacacaagacccaccagcactaatcctggtaggttattaagcgtacacatgtacatttagccatctggtcacatatatattagcttatcaatggatctctttctctccaaattcgacccaacctatttgcaattggcaggttgacagtaataaccttataccatatatcataaacattagttcgcattggaacggtgttttaataagttaacaattaaggtgaagagcgagaggtcgacgaaggtcagaagtagatattgtaatacgacggtgtagtatctatcttctaattatctccatctcaagatatgtggtaatttttaacaatgaatccagataactattatctccatatcctaaatatagtaacttttgattattaatctggactggacatataattatctagattcatagctaaaattacttatattttgggatggacggagtattaaatatgatactcttgtataatatctactacttcctttccaaaatataacttttaattatatatgaatgtggatgggtatttgttcatattatagctaagagctgttatgaatctggatgagtagtggttcagattcatagctaagcgtttctatattttaaaatggagataatattgttggtgacaatggtgtgcacatcaatttcaaaaatttatagatgaacttgtgttaacgaaatatcacatcatttcctctcgtgtatatataacttataatgttacaaattgaaaatataccgtcaagattgtatatgtttttcacatcccttaagcaacggtgttgtgacgtggagttgtgcgtgtacaactttactaatcagagattaaaattccctgagggcacacatattacatataccctgcactatacttcctttgtcccaaagaaaaataacttctgaaaatgaatcgattcatccttaaaagttgaattttttttaaggatagaggtgtaggattttagcaaggtccaatatataggttacggatttgtcattggtcgttgtattcttttatgtatgccagagaatgcattcgcggatatatgggttttatattgcacgtttagcaatgacataatcgggaaacatattgaatactccctccgtcccaaaacataagcatttctacaaatgaatctagataactccatgttcatattcgtgttgtttttttaattaatttagctcacaacatatgggcagatctgagctggaccagggagtcaggtcaggcgagaggcgaggccaccacacaaaactgtagcgagtgtggccacccatgcatgcaatgcagcctcatcggcttacgtcaccgccgtcytccccccccctacataaaccatcagcatcatcatcatcagccgcaagccactccacctcgagctctcgcaatgccggcc

SEQ ID NO: 6424 - DNA, 2000 bp, Oryza sativa
atccagaaggcttgctgggtctgggccttgggggttgcggccaagtcccacctcagcgccagtccggttggcgctgagtgtcccacggtcagcgccattatggctggcgctgaggtcccagcccgcaagcgaaccagcaggcttgctggtctgggccttgggggttgcggccaagtcccacctcagcgccagtccggttggcgctgaggtagctgccacgtcagctggggatcggcccggccgccacggtggcacaatgtcagcgccagtcccgttggcgctgacacagccaacgtcagcgccaatgtgtttggcgctgaggcgacggcctatttttggttgaagtttttggcagtggttagtttcgaaataagttttccaaaagggtcaatttgtcaaaaaaacggtttaaaattcctacacaaatgtaacacatttttcttgactactccaccttccaagttccaacgaaccatcattaattaatttatcttccaactacatgcttaagctcctaatcttgtccaatcaggaattgatacgcgctgagttcatgaaagtattttcctatcacgcataatatgtccttacatatattataaatgctagctatacaaggacaaattgacccttttcaaaaacttatttcgaaactaacccctgccaaaaacttcaaccaaaattaggccgtcagctcagcaccaagcgcattggcgctgaggttggccgtgtcagcgccaacgggactggcgctgaaattgtgcttaaatgattatcgatgcttaaataaaagttatacggttttacgatggagtgatgtgagcggtgggtggagggaccaatctccatcttagtagagatcatgtgttccttttatttggtgcctatatagtaaagcttccacttcgaaacaaaagatgattataaatttgaaaaattgatttttgaagaatattatagattcttttacttgttttcttagcaaacgctaagttcattaaaacttagagtaaaagacatggccaatttaagaccgctgtgtcactaatgtaatcgatcaacttgtaaatcatatatctagatctgtaattttagtttaatatacgactcgaggttgaaatcacctttaataggtcaagccttttctatttacccctgttcaaaacctactgtagaaacaaatatgcatttaatccattcgcttcaagttcatcctcaacccaaagttttcctctctcttctcctcttttgaattaggaaggggaaagcggcaatggctagggtggcacaaagtgcgacgagagtagggtgtactagagagaggaaggtggcacaactgttgtggtgtggtatcttcttcacgaagatgaggtccgtactggactcatgagatcaccctctcctactcttttttgatccgagaaccttcgactatcaataatcaccactgctctaatcattactccctacttcagggaggcggggaaccgaattggtggaatcgatttaggcatacaaaaggggctaaatacaaatttgttgccacggttatttatggtgtggactgaatgcaaaatgtttttctccgttgacaaccacggcagtacctttgattaaaggtagtttggaccacagttggtacattgaacaagatcgtggaccttgacttgcgatttataagttgatgaacctaagtgacaccgcagtccaagtcaccagtgtattttggtataataaatgcatttatattactactaaccttacacctactttctccgtcccaaaaagaatcaacatttctcaaaaagaatcaagctagaacaatgttgattctttttgggacagagggagtatataattagaaattaaaatatgtggcttataaaaatcgtagatgagcaggagcggtgtgttgagattggtagctgaaaggcctcttcttcatgacttccggcaccaaaactattaaacgccggcgaaaaactcaaagaccgcacgcc

SEQ ID NO: 6425 - DNA, 2000 bp, Oryza sativa
acagcagcgagttgaaaggagtcgatgggattttatgcccaaaaccgcgagagatccaccgctgtttgatgggttcgttgggacttgggaaggaatccatcggcgaatygccgcgcggctccgatccggggcgcaagcgcaaggccaccggccmacgtactccactactcctactcgtagagaggcgacgcgtttgcgcgggcggcgccgcggccgccaaacccaaccgtcgctgcctccgtctccgtagtccgtactgcctgtgtctgcctctgctactgctgctgcctgagagcaggtaccatagcatagcaggctacaaaccagctacaaacatattttaaaaaaataaataaggagagagaatggtagcaggctacagatttatagccagctgtagcacggacttcaagacacagtgtgtatgacagatgggaccatatattaatagtgtaatatgtaactattatatgaatgagctattatattggctatagatgaatggtagttattagttggctatactattgaacttgccagagaccaaccagctactccctcacgtgcggctggattaaataaacattaatcaattaattaattatagagacaatcagttgccacttgccaattaaggaagaaggcataagtactgtagcactgcagccgcacactccacgtctccattgggaggaaatggaaaatagtttttcttttttttaaaaaaaaaatagaaaatagtgctccttccgttttatattataaatcgtttgatatttttcttagtcaaaatttattaggtttgatcaaatatatagaaaaaaagaaacatgtacaacatcaaatttcattaaatttaacattgtatatattttaatataatgtttattttatattaaaaaacattactatattttgcttaaagtttgacttaaaaaaatctctactattataaaattgaagatgtttttgccggtattctagtacatcatctgtgtatgagtcggtttttaagtttgtttgcttttgaaaatatatatccgtatttgagttggtttgtaagatcgttcacttttgtatgatacaaaaggaatcatataagaaatctgtttaaaataactcacatgctaaattgagacgatcggattccaaactttagctcatgattttctaaaaatatatatatccaagtgaactcccacagtgaattttatcttaactaaactatataattaaaatagatttcacccgttgcaacgcacgatattttttctagtactccctccgtttcataatgtaagacttcaaacattggttatattcatatatgtgttaatgaatctagacacacatatatatctagattcattaacatctatatgaatatggacaatactagaaagacttacattataaaacagaggaagtaactcataaatacggaacgaaggggtagaaatatccgcatctcatacacacacagaagtggtcagccgccgcccaaaagcttgcctttgtcgccatctccacgtggccacccccatatactattgcttaacgctgtcacctcaccctctcgcggtttgagttttccacttccacggttccaccccgacacctagcgaagtactcgtagtaatccgaatcccaccgttccatccgtcgcggacgccacgctctcggctctcagctcacgtgacgtcaaccccgccaaaacgcgttattgccgtagtactacgcctcttcttccacctccatctccccctccgacatctccagccaattccagctcagctctcgccgccctcccctctcccgccacgtgcgcgccgcccctcctccaaatctccttttcttttccttttctataaataaatcaaaattcacacaccaaatcctatataaacttcttcctctccatccccttcccgctcaaactcaaacaccaacaccttcttcctcttcttcttcttccagcagcagcaacacacactactgac

SEQ ID NO: 6426 - DNA, 826 bp, Oryza sativa
  misc_feature (1)...(826): n = A,T,C or G
gntaaggaacttttttgscctytcaatctctttaacctgatgcatktaaaagatgcacaagcacacagcactaaggggggggggaaaggaggtagaaagctagagagagagagaatagttcccttgtccaaatcttaccctttcactagctctctctgttctcatccccttcttcatcaccttatagtggatgtcattctccactcctttgaacaattgaacctcccccatgcattcatgaacccttaaagcattctcatcatacaccctgacatacatatctcacaaagaagcaagggaggaccaaaaaagaaaattaaagaagaagatcataaaaggagaatccaggggttagaaaaagatcaaaagggggatcaactccactacctctcttgatccatcatgtggaatcaggtacataagaactttacccttcttgagagagtgctgaactccttattactccctaattaaagtttgtttctttgtgaaaaattagcttgttgcttagctacttcttttcatgtgtaaagcaaaagggaagaatatgcaaaacaaatatatgttcttatcaatttatgatagatagaaagttacaagccaatatattctcatgctactcttgcacaaaccctagctcatatggttgtagtcttagctactatcatccttttgttttcctatctaattacttcttatatctattcattcatgttactagcagcatcaagctcaccatggccatcatcagcttcaccaaagtgtggaggcgaatcagctgccgatgacctcggccagcttgctgcttgctcctcggtcgccagac

SEQ ID NO: 6427 - DNA, 1532 bp, Oryza sativa
gtgttttagagtaaggtcataaaaaagcccgctattggttgtgataagtgaacatgtcgcctatagtaagcgttatagctaagacatacaatagagatatcatatacttgtaacataaatattttattgttttacgggcccaccatcttctcctcttctccttcttctcatccttacatggacgcctcttctcatccttacacggacgccggcaacggagaaggtggcggtgaacatgggtgacaacgatggctgtgaatgcggacgagggcggcggcgaccgctgtggacaaggggagggtgatggcgttgatggacaagggcgacgttgtcgacagccacggcggccgcagactaggacgacgtccgccgtggacgaggacggcgggacgagtgcaggcaacggcgacggctgcggtggacgaggacggcgaccgcgggcgtggacgaggacaaccgcggaggacgaggacagcgcgacggatgcgagcgacggcggcaaacgcgagtgatgatggtggggcggacatgagggacgaggacggcgaccgcttgcgaggatggcgggacggccgcgggcgatggcggtggttgtcgtagaagaggacggcgggagggacatgggccatcgcgcgaaggacgaggacggcgaccgcgggcgaggatggtgggacagccgcaggcgatggcggcggccgccgaggacgatgacgatcaaggaaaacggtgacggcgattgcagccgaggacaaggacgggcggctgccatggctgcgggcgagggtggcggtacggtggcggccgaggaagatggcgacgatggtggctggggaagacggcgacgatgacgacacgaaagacgaagaaggcggctgcggccgaggacgaggacgggcggccgtgggctgcgggcgagggttgcgggacggtggcggtcgcggaagacggcggctgcggcggccggggaagacggcgacggcggcggccggggaagaccgggaacggcggcggccgggaaagatggcgacgatggcgacgcggaagacggcgataatggcgaagcggaaggacgcgtggaggcacgggcgctgcttgcgctaccatcgcggcgggcccacgtctcgggccacgcatatcgcccggcggttaattagtcgcccgccggctctctctctcttccagatcagcaaaaaaaaaatcctacgtgaacctcctaacgctcattattgtacagtagagttttcaaaacacccgcattttgtagcaagggtatacgaaatgttgcaaggaggcaggaatgtgtgtgcccacggttttgagtttgagagacgaaaccacgggccgcggaccaaactccagcctcctccacacgagcctcagcccagtagtgatactgacctgacttgcttcccttcctccgaatcgagacacgtcgccatcgtcgtcgtcttccacccgctgctcgtttcctcgtcgcgtcgcgcgggagatctctctctctccctcccttccattaaggtaatcaatcaacc

SEQ ID NO: 6428 - DNA, 2000 bp, Oryza sativa
aactttcagagtgtgccagaaagggccttgctgtcaaaccaaagatgggagatgcgcttcttttttggagcatgaaaccagatgccactctagaccctttaagtttgcatggtcagttcagtgacttatctgctgttcttattactttttttaaactgattgcatgacttgaagcctgctgggcacttctgttctatttgctatgtcctgtttaaaacttccatcgatgctccttcagatactttacgtgtgttttatatgctccaagcagtccctttacaaatttctttatggtctgagcagggggttgtcctgtcatcaaaggaaacaaatggtcatcaaccaagtggatgcatgtccgtgagtacaaagcttgagctttctgaagtcgtgattaccaaaggtatctagtgttcctatggatctgtactgagtaagatgtaaagctggcgatattactgcatattgctttcttaactagttttggtcctcttcaaagtgacttccactcattcaccctagcaccagaaacccaggaagcaatatggctttgaggttatctagcacctttagctttgcattcttctcttttcgtgattactcctaggataggagtcatgcattcagatagtgttctatgtaaattttcagctgaggatggttaacgtttgcttgtagtagcttgatatctgccactttgtgagatctttactatctgaagaaataatttgctcaaaacttgttttataaactgatgtgctgtatctttctttggcagatggaccctatataaagcattgactggggcactttccaggatggcagttatgtaggctttagagatccacaccggtggtattctttgctctctgagaatatatagtagaggcactaagcaagggggtttacttgtccataccgtgtttttggagatggtcttgttgaacctggcgccttttcttctttattttttctggcagactacagaggaatgaatggtccattgttggggacatagggtgtggcgtttgatttagtttgttttgtggtgtattgctatctgctaatgttagtagcttaattatgtacactgttgagctaagttgtcattactatagagctctctcctatacatgaggggaggtgacatgattttggtgtgcctttttctgtcggtggtggtgctgctgggttgtggtcatacaatccaggtgcagacatgatgtattgtttgcgaatttattatattttttcagtctaaccctgaggaaaaggaatctttggtggtgtggaataggcaaaatacgttgggtggcataatgttagatgaagtgattgatacacaggtggttgtagaggtaacgttgagtgatcaagtgcaggcttgctggagcaaaaagaagatgatgcctcactcagtcgttgacggcacaatctagctaacctgctgccattgtggtgattcatgcctcctctccgaagactctttgacttgtactaatggagtggactgctaccaaacacgcatgaatagacgaccagatcatcatacaattcatcaaaattagcactcctagtttcaaactacttaacaaaggaaattcaacaaacttcattaaaatagtgtagtgtatttttttctttaaaaaaaaattgccaacgccaatcgcggagtttcacatggagaagggaagaatggaatgagcgccaggcgtcgcgtcggcgcgcgcgtgagtgcgtgatttgtgttggttgtcttcctcttggcttcgcttcgctgctttgccgcgccttcgccgagggaggccgaccaacgcatcaatcaaacacacaagcacaccacgcggacgcagcagcaggggaggagacaatttcctattcttcctcgccccgcgtcgcctcgcctgagtctgactctccaaacgccgaccagtgacgccgcgagccttgccccttgcccgcgcagatctcaccaaaccctaccagatctgcgccccgcc

SEQ ID NO: 6429 - DNA, 2000 bp, Oryza sativa
ggaagctgcagcggaaagagcctgaaaagcagaccgagaagcaactataccaggtgaggactttgccttcaattgtttgtggcatctcaggatacagacctttaaattggttttgttcagtctataaccgacctttttgtcctttttctttgaagattcttgagcaaaaagaagaaagaattgctcctggggctatctatggatcaagccatacgtatgttacattaactactacctagttacccaacgtcaaacttttcttatggtattccatccaatttgacgatatgaattaactcttatggaatcttgttgcttttgcaggtatgcgattggtgcacaggataaggctggtcctaaaagggtaggcttcatagtcctttgcactatgtttacaagtggtttcactgaatgcgtgctttaatgatttttggttgtggaccactgcaggtggatcttctcaagaatcagaagtctgataaggtggatgtcaccatacaacctgaggagcttgaagttatggatgatgttttggctgccaagtaagattttgtgttgtcaatgcattgtgaagttgagatggtgctaatcacagcgagtggaagatgctaacactttataccatgtacacaggtacgaggaagcccgggaggaggagaagctacggaaccagaaggaagatttcagcgacatggtggcggaggtacattcttcccattgtcaccaactaagaagcatgagctttttgttgtttttattccttggtggtgtgtccctatgtcgctaacaatagggcatatgtgcattttgcagaacgcaagcaagaggaagaggaagcaggagaaggacgggaagtcgaagaagaaagacttcaagttctagatgttgccctttgcgagttagccagatccaaggaagaggaggcggcacggcatccatctgtttttttagattgcccttgtctgagaatagatgaatgcgtaggcacgagtgtagcagcagcacagcccttttttatgtgtgtgtgtattgtatgactgatggccttcaccttgatatgatgatgatgtttactttactggacaattatcgtgtagtagaggacagagagcgttacgttctcttttcacatactagtaacatcttcttagcttccgtgtcatgtttcttttkgttatcttttcctttgctgagaggaggcattctttgcctttctcagcccaggtgacaggcagtccacatccttatcgctctttgctagttagcgctaattctctttagctagtatctaaacaaggcgatattcatgaccagccggaataaggttaccatattttaaatctaacttgaaaaatacaaaacatctctgtccactcgaaactgctagtatacaaaatggatttatcttataaactactctgggactgaacatgtttgaccgttcgtcttattcaaaaatttttgtgaaatatgtaagactatacgtgtacatgaaagtatatttaacaatgaatcaaatgatatgaaaagaataaataattacttaaattttttgaataagacgaatggtcaaacacgtactaaaaaagtcaacggtgtcaaatattttgaaacggaggaagtagtatacatgttgtgatgaaataaattgtagagagttgagttgaagaagagggtgtggccggagacaatttgggctctcgtccacgagtctcccactctactcttcccctttcgcttgtgctttgggccactagtcctcttcattggtcttttgttcccaatcacaaacgaaagcgcaccatgcatggctaccatggctgcatattcctttcacgattacctttcattccaaactctctttgattaccttctattttagagagagattgatcagcagctggttcatattgcatttgaataactagcgtatcaaggattgcattgtactagctaggaggagcattggtcgcttctgggcgattcgattcgattcgagg

SEQ ID NO: 6430 - DNA, 70 bp, Oryza sativa
aaaaaaaaacacaataaaatgcaagcagatgaggcacagaaaatatgtgaaccggctcgatcgctccggc

SEQ ID NO: 6431 - DNA, 2000 bp, Oryza sativa
acttgatcactataggctaggcggcgggaacgtgtaaataggaaaccaggaaaggagtagccgagcaaaccaagaggtaggagccctaaccctagtcatgggtacgatagatcgtcgctcaattgtacgagatgggcatgaggcggagccgcggtcacaaagaaggagcagaaacgaattgacgtcacttcaactttagttttctttttaccatacctacctatgcatgtcttgggccgacacatttttgggtggtccggaccatcttgaagatccatcgatgccctatgagattactacatatccttcaagtttctgacacattcgttgtccttggccgcatattgcccctggccaccgtcgaggtcatgcttggtgccactgacaaaacacgccttgttgagcattgcatcctcaccacaaattgctatccttgccgtctctggtgatctggtcaaatctagcacctttatagcccatgttgacactcgcattgctttatgaaaaataaattaaaataaaattatatcgtacatattatgaaaagtataaaattggtactctttttaaataaactgattgatgcaacatgagtaaaatgctccaatgtttcttgaagttgtatcttgtatgcagatgatatagagggctatgaactagtaaaatacacccccttcccgatgtttagtgtcgtagtatccgagtcttttttttctttggtcttctatttccctcctctcttagcataagtcggtctggcttaatgtattgtgtaacaattattcttttcttctaatatattgacgtgtaatttttttacgtgttcaaaaaaaaaactagtaaaatacagatatatacttttaaacctattaaagtagtgtaaactactctatccgtttcaaaacgtaagaacttagatctaaatttttctaaaatataaagaaacaattcatttgtagtatatcatatagggaaaaaacagtactaatcatatcgtcatatgcgtgtacagagcgaaaatgttaagcggtcggccgatgtctgcacacgcctgttcccacttgatcgaggtggcgcccgccggtgcacgtgtccgcgcctctcggattccgttgcgacgctgtccccagcagctggtctcgctggcttcgctcctcgtctggaggcgagcgagcgagccgggtcggcgctgcgggtgagcgacgcatatgggtttccgccccgcacgccgcccgcccgcccgcgcgccacctgattcgcattcgctccatccgcttcttctcggattccagctgttcccccgtggcctttcttggattcccccgccccccggcccgcggctcccccgccccacgtacccatggcgttgccgaggtggctcccatgatgcgctctcgccgcctcgccatgtgacccgcgcgccamgccgcttttccgagaccgagagacggagagagagaaaaaaacgtagagatccacgccgcattctccatttctccccctcccggctgcagctcgccgtatcctgctttcttgccttgcgggcgtcgtcgtagcstggtaggagtaggggagcccggcgcgcgggcgggccccggtggttggtgaattcgcgcgcaaagcgcagcagcagcagcagcgggaaaaaaaaaaggctaactaagctaggacagaggagagaaaagccgtggcgctttgcggtcacgagattcagggggtggtttgcttttgctcgcaagggaagtgttgggggagccgtagacatccgaactgttctaatggcgaccctctggggggcggtggcggtggcgttgctttgcgcgatgtattggtgaggccggtactaggggagggggtagtagtagtggtacaagtggtggttgtcgtcgtcgtagtcttgtgggttgcgtgcgtgcgttcgtgcgcgccagcgaagttcttgcgacgatcgtgtggggtgggttcgtgtgctctctcgctcctgccattggttgatgagc

SEQ ID NO: 6432 - DNA, 2000 bp, Oryza sativa
attggaatcaatgaactaattcatgttccatatatagatgcaaaatggcatatgcttgctgaaccaaaaggacacatattttttgttggaatgtccaggacatattggaacaaattaaattatgcagatgtgaagtagcagctgcagctatcaagccctttggtactaagatatattactaagctagctatgagctgatgaacctgagaccacatatgagactaggacgtgtcctggtacgtactgcaagggccatattaattgattggtttttcgctaatcatggagtacaggtggcactaagttggtacagatatttaggtcaaatccaacccttgcaattagcatgtatagatagattcatgcatgcaatcaatcaattggtactaaatttcttggctagggatcactaaatttgcagggtcctacgtacgtgtattatgtgaccaattaaccaaccaacagacaatactacacaacgtcaaataggtactggtataaaggtgttggttattcggaacaaacctgcacctattatcaattataagtaccggttatgcgtaaaaaccaacaacaatactttagggtagcggttattaatgaaaatctgacacctatagttaatccggtcaccatgaaacgcagtaacacatctaagtcttgttcagattgatgccatttcaaatcatattattttttttagagttgtcaaatatgtgcatccgtttagtttcttaccaaacttccaaactttggtaattacataataaatcttgccaaaattttggcaatattaccaaattgccaaaattttggtattggtaatttttattttgactataatctgaacagccccatttatgtacggtatgtgatcaattaattaacaccattagaggtttctactttctagaatcttcttatattctcctttcatactcatcactatgtacacggccagggattatatgaaacaagagagaagaaactagaagtaagctaacttttgatgaactctagtaagtgtcaggacccacctgctggtttgtttggaactgtatgagtaagatatgaacagtgtataatttagctcagaatcttaatttactacttaaaaataacatagtagtgacagtgaaactgagtctatatattgctaaaataatacacttttgcctgcccctaattaagccatacattggcggaaaaatcgtcctacttctcaacgggtagttcgatcggatttttgtttaagggctccatgataaattgataagagctaaaaaaattaatgagatgtgtgtttatccttgtaaagcatgggcatattagctagtaagtgaaaaagaaactggggtagatataaaatgagcattaatcaatcggtgataggtctggatgtacacctctaattacctgatttaaatcttctttactacaatttgcattggatgactatttcttctccattaaatggctcttcttgttgcacatttgtgttcttcataactctatttatgtcacatatgactatcatctcaaaagaagtatttctctctaaagaaagaaatcagaataaagcccatatatataatggtcgtagaagcaaaggaaggccttgttaattgggccttaatggatcggcccaaagaaagcaaaccaggtccatcaaaaaccagcaaagcccgtcgatgcaaccgaggctcccactctccctgcacccggtccatgcacccatcccccgtgaaccggcaccctccatgtgggccccacctctcctcggtccatagaccgggtccacgacaaaaaactccctcctcctcctcgcctcgtgctctccgccgcctcgtttccatctccgccgcgctcgccgcgttcacactataaaacaccccctccccgcgccgccgccgccgcagcagccgccaccgccgccggaatccgagacctctcgccgtcccgccacgcgcgcgcgcaagcgagcaaagagagagagagaa

SEQ ID NO: 6433 - DNA, 2000 bp, Oryza sativa
acagtgtctggactgatgatggtagtgggaagtaaggcaatgtttgtgcagagtgagtgttttgtgagagaatcatgatgagtttgtttatgggggagaaataatctgttgacatctgttcatatgctatttgcatttgaatgagagagaaaaaaaagaagtaatcactaatgctttttgtatgtaatgctcttccctagtaacatctgtagctctgtaaaaacaagctgttaaagcacctccctggaaatgccagagtgctagtaatatagcaatatctgtgtagtaaatatcaccgtcttaaaaaaggtagacagaaatataatgtattcctttaaactgaaaagtaaagagactttctttttttttaactgaaagttctaacacgggctttgcaatggtggtaccaagttgggttaactaattgttttgcaacaggcgaaccgatcaagagttcgctgcatgcacccccttgcaattgtttcagttcttgtagaaggtactcttggcaattgtaaagcctgtgtggtgcctggtatgaagtgagctaaagttgggaggcttggtcaaaaccttactgaataaacacattttccggtgacttcatctatcagatttacctgtctctccttattgagcgtggttcgtcccaggtgcatttcttttgcgttgtgtttgccctttgaaaatggttgcaaagcctaaatatctcagagctcttgtgtatttttgccgtgtcgatttatatatggcatggtcttgttatgataatcttgtataactgtctgaatccccatctctgttggacgatgatctgtctggtctttaaaagtcatcatatctgcagtacagcctatgctatgccaacaaaattaccaaaattgccatcttatccccacctaataacagaaacccccctgctggcctactgttctcttctggcttctactcacccctatcctgctaaacaaggggagaacaatttatatatacatttttcttccctgactagggaaggagataatccactccaattcagctggagaaaaaaaatgacttctttgtgtgttcatctcctgaaaattaaataaagaaaaggagaaagaaatgttggatggcaggaggaggggagtggtgatgtcaagtggatgaggaagtagtgtaggaggagccatccttcatctcaacctccaaaagctcatccataacctcctcccttccctttctctcgcttctcccctaacaaatctccacgtctccccccctatctttgtcttcatgtgcagaaactcaaagatctctctccctcacctatattacctgcaccaacaccactgaccactccctcctcctgttcttgctccttcctcccagtgtctctcaaggtaagataagctacatgcatatcagtgtacagaatttgcttttctatcggtttgatttgagtcatcttttctttcgtgatttcttcagtcgtaatagttcttctggcgtggccaagaatttgttgcacgcatagtttcaaaatgaccaaattattaggatctattgcatgttgtcatctttgtttctgattgattttttagttctcttgtttgtatgagtgatgagaggtttttttatatttgttcagttccaacgtcgtttgatcgttggtacagatgatgaagatttctttttttgtttatcatttctgttaaaagaataccacatattttctgcagaaacaaaaaaaatgggtatctgcatgcactccaagagaaaggagtcccttggtttctctgatgatggaaagtcttttttttttggttwaccttgttgctatgaacttttagcagacttgcatagttgcatgtgttctatcagaaaaaaaaargaataagttatcatcatgcatgtagatgattgttattttagtaggaggaaagctatagctcaattcttttgacagtgctgttctttgggtgtagagcggtgcagggttcacaaggcaggagaaa

SEQ ID NO: 6434 - DNA, 390 bp, Oryza sativa
tactggtgtcacatcggcagcggcaactggtattacgtgatgatcttatcctcgtcgtctcgccgtctttatytcgttcgctgcttgctttggcttctcacatcagcactgactccaataacacgctcatcaaacagcgcgcgcgagcgagggatggataggatattttcgttcgcgttcgtgccatcctaaatcccgtctataaagccgtgcacatctctatcctcacctccattccattccactcgccaacccgacacgtctctcatcttcacgcaacgaacagcagcagcagctcaagctaagctaagctaaagtactacgtgttctttcgtcttcgtcggcgccggagtttgattcgtcggagctagctagcaagaggaagaagaa
